United States Patent Application Publication US 2019/0348154 A1 - sequence listing, part 100

SEQ ID NO: 371960 - DNA, 1350 bp, Salmonella enterica
atgttggataaaattgtcatcgccaaccgcggcgagatcgcactacgtattcttcgagcctgtaaagaactcggcatcaagaccgtcgctgtgcactcaagcgcggatcgcgatttaaaacacgtattgctggcggatgagacggtctgtattggcccggcaccgtccgtaaaaagttatctgaacatcccggctatcattagcgccgctgaaatcaccggcgcggtggcaatccacccgggttacggcttcctttctgagaacgccaattttgccgagcaggttgaacgctccggctttatctttatcggcccgaaagcggacaccatccgcctgatgggcgataaagtgtccgcgattaccgcgatgaaaaaagcgggcgtgccgaccgtaccaggatctgacggcccgctgggcgacgatatgaatgcgaaccgcgctcatgccaaacgtattggctatccggtgatcatcaaagcgtccggcggcggcggcggccgcggtatgcgcgtggttcgtagcgatgctgaactggcgcagtccatctccatgaccaaagcggaagcgaaagcggctttcagcaacgacatggtatacatggaaaaatacctggaaaatccacgccacatcgaaattcaggtgctggcggacggccagggcaacgctatctatctggcggaacgcgactgttccatgcagcgtcgccaccagaaagtggttgaagaagccccggcgccaggcattacgccggaactgcgtcgctatatcggcgaacgctgcgcgaaagcgtgcgtagacatcggctatcgcggcgcagggacgttcgaattcctgttcgaaaacggcgagttctatttcatcgaaatgaacacccgtattcaggttgaacacccggtgactgaaatgattaccggcgtcgatttgatcaaagagcagttgcgcatcgcggcgggtcagccgctgtcgatcacacaggacgaagttgtcgttcgaggccatgcggtagaatgccgtatcaatgccgaagatccgaacaccttcctgccaagcccaggcaaaatcacgcgcttccatgcgcctggcggctttggcgttcgctgggaatctcatatctacgcgggctacacggtgccgccgtactatgattccatgatcggcaaactcatctgctacggtgaaaaccgcgacgtggcgattgcccgtatgaaaaatgccctgcaggaactgattatcgatggtatcaaaaccaatatcgatctgcagacccgcatcatgaatgacgagcacttccagcacggtggaaccaacatccactatctggagaaaaaactcggtcttcaggaaaagtaa

SEQ ID NO: 371961 - DNA, 243 bp, Salmonella enterica
atggacgctcgttttgttcaggcccataaagaggcgcgctgggcgctgtggctgaccctttgctatctggcggcatggttagtggctgcttacttacctggagactcgccgggaattaccggtctgccgcactggttcgagatggcctgcttattgacgccgctggtctttattttgctgtgctgggcgatggtgaaattcatttatcgcgatatttcgctggaggatgacgatgcagcttga

SEQ ID NO: 371962 - DNA, 1452 bp, Salmonella enterica
atgcagcttgaggtcattctaccgctggtagcctatctggtcgtggtcttcggggtctcgatttacgctatgcgcaagcgtaccgccggcacttttttaaacgaatattttcttggcagccgttcgatgggcgggatcgtgctcgcgatgacgcttaccgccacctatattagcgccagttcatttatcggcggtcccggcgcggcttataaatacggtctgggctgggtcttgctggcgatgatccagcttcccgccgtctggctttcactgggtattctgggtaaaaaattcgctatcctggcgcgtcgctataatgccgtcacgcttaacgatatgctattcgcgcgttaccaaagccgcctgctggtgtggttggcaagcctgagtttattggtcgcgtttattggcgcaatgaccgtacaatttatcggcggcgcgcgactgctggaaaccgcggcgggaattccctacgaaaccggcctgctaatatttggcgtcagtatcgcactctatacggcgtttggcggctttcgcgccagcgtacttaacgatacgctacagggcctggtgatgctggtcggcacgatagtgctgctggtgggcgtgatccatgcggcgggcggtctaagtcaggccgttgacacgctgcacgctctcgaccccaaactggtaacgccgcagggcgccgatgacatactttctcccgcctttatgacctctttttgggtactggtctgttttggtgtgattggcctgccgcatacggcggtgcgctgcatctcctataaagacagtaaagcggtacaccggggcattattatcggtacgattgtcgtggcgattttaatgttcgggatgcaccttgccggcgcgctgggtcgcgcggtgcttccggatctgacggtgccggatctggtgatcccaacgctaatggtgaaagttttgccgccgtttgccgccgggatcttcctcgctgcgccaatggcggcgatcatgtcaacaattaacgcccaactgctgcaaagttccgcgacgatcattaaagatctctatctcaacctgcgccccgatcagatgcaaaatgagatccggctgaagcgtatgtcggcagcgattacattactgctaggcgcgctgttgctgctggccgcatggaaaccgccagagatgatcatttggctcaacctgctggcgtttggcggcctggaagcggtgttcttatggccgctggtattgggcctttactgggagcgggcaaacgcggcaggcgcattaagcgccatgatcgtgggcggcgtgctatatgccctgcttgccacatttaatattcagtacctgggctttcatccgattgtgcccgcgttactgttaagtttattggcttttctgatcggaaaccgattcggctcttccgcttcgcaagccaccgtattgtctactgataaataa

SEQ ID NO: 371963 - DNA, 882 bp, Salmonella enterica
atgccatggatccaattgaaactgaataccaccggcgcgaatgctgaagagctgagtgatgcgctgatggaagcgggcgccgtttccattacctttcaggatacgcacgatacgccggtttttgagccgttgccgggcgaaacccgtctgtggggcgataccgatgtgatcggtctgttcgacgccgaaaccgacatgaaagacgttgtcgcgattctggagcaacatccgctgctgggtgccggatttgcccataaaatcgaacaactggaagataaagactgggaacgcgaatggatggataatttccatccgatgcgttttggcgagcgtctgtggatttgtcccagctggcgtgacattccggacgagaatgccgtcaacgtgatgctcgacccgggactggcgttcggtacgggtacgcaccccaccacctctttatgtctgcaatggctggacgggctcgatctcaacggcaaaaccgtgatcgactttggctgcggttcaggcattctggcgattgccgcgctgaaactgggagcggcaaaggcgattggtattgatatcgatccgcaagctattcaggccagtcgcgataatgctgaacgcaacggcgtgtctgaccggctggagctgtacctgccgaaagaccagccagaagccatgaaagccgacgtggtcgtcgctaacatcctggcaggcccattacgcgaactggccccgttaatcagcgtactgcccgttgaaggcggtctgctggggctttcaggtattctcgccagccaggcggaaagcgtctgcgatgcttacgccgagcttttcactctcgacccggtcgtcgaaaaagaagaatggtgccgcattactggccgtaagaaataa

SEQ ID NO: 371964 - DNA, 144 bp, Salmonella enterica
atgctgcagaacaacccggacagcattactaagtacgagggcgatggctgcgacccgttaaaacgccagtatcttttgtccgctggtagcagctgtttatccagacggatagtgacaaagaagttatttcaggcattcatttga

SEQ ID NO: 371965 - DNA, 966 bp, Salmonella enterica
atgcgcatcggacaatatcagctcagaaatcgcctgatcgcagcgcccatggctggcattactgacagacctttccggacgctgtgctatgagatgggagcaggattgacagtatccgagatgatgtcttctaacccgcaagtgtgggaaagcgataaatctcgtttacggatggtgcacgttgatgagccaggaattcgcacggtgcaaattgccggtagcgaccctgttgagatggccgatgccgcacgtattaacgtggaaagcggcgcccagattattgatatcaatatggggtgcccggcgaagaaagtgaatcgtaagctggcaggttcagccctcttgcagtacccggatttagtgaagtctatactcatcggggtcgtaaacgcagtggacgttcctgtgactctcaagattcgcaccggctgggcgccggaacaccgtaactgcgtagagattgcccaactggctgaagattgtggtattcaggctctgaccatccatggccgcacccgcgcctgtttgttcaacggagaagctgaatacgacagtattcgggcagttaagcagaaagtttccattccgattatcgcgaatggcgacattactaacccgcataaagccagagctgttctcgactatacaggggcggatgccctgatgataggccgcgcagctcagggaagaccctggatctttcgggaaatccagcattatctggacactggggagctgcttccgccgctgccgctggcagaggtaaagcgcttgctttgcacgcatgttcgggaactgcatgacttttacggtcaggcaaaagggtaccgaatcgcgcgtaaacacgtctcctggtatctccaggagcacgctccagacgaccagtttcggcgcacattcaacgctattgaggacgccagcgaacagctggaggcgttggaggcatacttcgaaaattttgcgtaa

SEQ ID NO: 371966 - DNA, 297 bp, Salmonella enterica
atgttcgaacaacgcgtaaattctgacgtactgaccgtttctaccgttaactctcaggatcaggtaacccaaaaacccctgcgtgactcggttaaacaggcactgaagaactattttgctcaactgaatggtcaggacgttaatgacctgtatgagctggtactggctgaagtagaacagcccctgttggacatggtgatgcaatacacccgtggtaaccagacccgtgctgctctgatgatgggcatcaaccgtggtacgctgcgtaaaaaattaaaaaaatacggcatgaactaa

SEQ ID NO: 371967 - DNA, 885 bp, Salmonella enterica
atgaaagcggaatgtgaacctcagtactttggcgatgaatcgaagaagattattcacggtgacgcgctaacagaacttaaaaaactgccttctgaaagcattgacttaatttttgccgatccgccttacaatatcggaaaagatttcgacggtatggtggagtcctgggacgaagcgtcttttctggcctggctgtatgaatgcattgatgagtgccaccgcgtactgaagaaacacggcaccatgtacatcatgaatagcacagaaaatatgccgtatatcgatctcaaatgccgaacgctttttaccatcaaaagccgtatcgtctggtcctatgatagttccggggtgcaggcgaaaaaatactttggttctatgtatgaaccgatcctgatgatggtaaaaaacccgaaaagctatacctttaaccgtgatgcgattctggtcgaaaccactacgggcgctaagcgcgcgctaatcgattatcgaaaaaacccgccccaaccatacaatcagaaaaaagtgccgggcaacgtctggtcatttcctcgcgtacgttatctgatggatgaatatgaaaaccatcctacgcaaaagcccagcgcgctgttaaaacggatcatactggcctcttctaacccgagcgataccgtattggaccctttcgcgggcagtttcaccacaggcgctgtcgcagcggcgtcaggtcgtaagtttatcggtattgaactcaataatgagtacgtaaaaatggggctcagaagattgagcgtcacttcgcattattcagaaaatgaacttgcaaaagtcaaaaagagaaaaacacaaaacctgtccaaaaagcagcgaaatgtcgggataaacgcgctatcttcagagaagtaa

SEQ ID NO: 371968 - DNA, 165 bp, Salmonella enterica
atgatacgtaagtattggtggctggttgtttttgccgtctccgtttttctttttgatgcgcttttgatgcaatggatcgaattgatggcaactgaacaggataagtgccgaaacatggattcggttaaccctctcaaattgatcaattgtaccgatctggagtag

SEQ ID NO: 371969 - DNA, 2100 bp, Salmonella enterica
atgccggttagtgagtacaaccacatccttgtggcggtttcatttgctgtcgctatttttgcgtcctataccgcattaaatatggccggacgcgtagcaggaagcgcccgatcaaacgccagaatatggctaatgggcggcggcttcgcgctgggcgtcggtatttgggcgatgcattttgtcgggatgctggcgatggatcacgcgatgaacatgcgcttcgatccgttcctcaccggcctctccatgctgatcgcgatcggctcctccctgtttgcgctatggctggtcagcgctgaaaaactgcgcctgcgccgtttactgccgggcgcgctggtgatgggactgggcatcagcgcaatgcattataccgggatggcggcgctgcaatttgcttccattatcgtctggaatagcgcgtgggttgccctctctatcattatcgcgctactggcgtcctgcggcgcgctgtggctcacgttccgcctgcgtcatgagggaacagatgtcgccctgaggcgagcaggcgccgcggtattaatggggatagctatcgccggcatgcattacgccggcatgaaggccgcacactttccccaaaactggccgatggagcatcgtggcgtcgatagcaactggctggctgttcttgtcagcgtggtcgcgctgactatcctgggtattactctgctggtttctttatttgacgcccggcttcaggcccgtaccgcactacttgcctcttcgctggcgcaggcgaaccaggaactggcgcagttggcgctgcatgatacgctcacccgtttaccaaaccgggtgcttcttgaggatcgtctggaacaggccatcagcaaagcgaatcgggaaaacacgtctttcgcgctactgtttatggatctggatggctttaaaaccgttaatgacgcttatggtcatgatatcggcgataagctactggtagcggtcacgcatcgtctgaaccaaccgctgagcgggcagtttaccctggcgcggattggcggcgacgaatttgtgctgcttgcagaagtcagcgcgcctgacgaagcggcttcccttgccagcgcgctggtacattcgatagatgcgccctttacaatagatccgtacgaactggtcgtcacccttagcgtgggaatagcgctctatccgctggacggaaaaaacgaacgggaactgatgttcaacgccgatgccgcaatgtaccacacgaaacatacggggcgtaacggataccatttctttcagccatcaatgaatatgctggcgcaaacccaacttcagctaatgaatgacctgtggctggcgctggaaagacaagagctcaggttagtgtatcagcctaaatttcaggcttctgccggccctattgtaggatttgaggccctgttgcgctggtatcatccaaaacaaggcgtactgaatcctgaccagtttttaccgctggcggaaaaaacgggtcttatcgtcactatcggtagctgggtgatagacgaggcgtgtcgacagctccgcgagtggcacttacagggatacgacttatggtcagtggcggtaaatctgtccgccttacaatttgagcagcccgggcttgtggacaccattacgcggagcctggcccgacacagtatccgtcccgatttattgattctggaaatcaccgaaaccacggcgatgaacaagccagagcaaagcgtcgctatactcaccagattaacggaaatgggggttaaggcctctattgacgactttggcaccggttattccagccttctctatctgaaacgtcttccggcgtgcgaactaaaaattgatcgcgctttcgtacatgaactcagcgaggcaggcgacggcgcgaccattgttgcggctattgtcgcgctggcgaaagcgttaaatctgcaaattgtggcagaaggggtagagaatgaaacgcagcaacaatttttgacccagttaggatgccatacgcttcaggggttcctgcttggcaagccgcgtacggcagaggaaattgctcgcgatattcgggatcctgccaatatattcacaaggtcaatatataatatcaactcaaaataa

SEQ ID NO: 371970 - DNA, 663 bp, Salmonella enterica
atggcgaagaaaacgaaggcggatgcgcttaaaacgcggcaacatttgattgaaaccgctattgcgcagttcgctttgcgcggcgttgccaacacgacgttgaatgatatcgctgatgccgctgatgtcacgcggggcgccatctactggcactttgagaataaaacgcagttgtttaatgaggtttggttacagcaaccacctttacgcgaacttattcaggataggcttacgggatgctggaatgataatcctttacaggatctacgagagaaatttattgcagccttacaatatattgcggcagtgcctcgtcagcaggcattaatgcagattttatatcataaatgtgaattccataatggtatgatatcggaacaggccattcgggagaagatgggtttccatcatcagtcgctgcttgaagtattacagcgatgtatggataaaaaactgatctcaggcagtcttgatctggatgtcatattaattattctgcatggtagttttagcggaatagtaaaaaactggttaatgaatcccacaagttatgatctttataagcaggcgcctgcattagtcgataatgtattaaaaatgctaagcccggatggcagtgtgaggcaattaatgccaaatgaacaacaggcggaagaagcctga

SEQ ID NO: 371971 - DNA, 1158 bp, Salmonella enterica
atgacgaaacatgccaggttttcactcctgccctcattcatcatattctctgctgcgctgctggccggttgtaatgaccagggagatacccaggctcatgccggcgagccgcaagtcaccgtccatgtggtcgaaacagcgccgctagccgtaacgaccgaacttcccggacgtacgtccgcatttcgcattgcggaggttcgcccccaggtgagcgggatcgtgcttaaaagaaacttcaccgaaggtagcgatgtagaggccgggcagtcgctctatcagatcgatcctgccacttatcaggctgattatgacagcgctaaaggcgaacttgctaaaagcgaagcggctgcggctatcgcgcacctgacggtcaaacgctatgttccactggtcggcacaaaatatatcagccaacaggaatatgatcaggcgattgccgacgcccgccaggccgatgccgccgttgtggcggcaaaagccgctgttgaaagcgcgcgtattaaccttgcgtataccaaagtcacctcacccatcagcgggcgtataggaaaatctaatgtgactgaaggcgcgctggtgactaatggtcagtcaactgaactggctaccgtgcaacaactcgatccgatttatgtcgacgtgacgcaatcaagcaacgactttatgcgactcaagcaatccgtcgaacaaggtaacctgcataaagacagcgccagtagcacggttcaactggtaatggaaaatggtcaggtctacccgattaaaggcacgctgcaattttccgacgttaccgtagatgaaagcaccggctctatcacgctcagggcggtgttccctaacccgcaacacagtctgcttcccggtatgtttgttcgcgcccgcattgatgaaggcgtccagcccaatgccatccttgtcccccagcagggcgtaacccgcacgccgcgcggcgacgcaatggtgatggtggttaacgataaaagccaggtcgaagcccgcaatgtcgtggcggcgcaggctattggcgataaatggctcatcagcgaagggttaaaaccgggcgataaggtcatcgtcagcggcttacaaaaagcgcgaccgggcgtccaggtgaaagccactaccgatgctcctgcagcgaaaacggcgcaataa

SEQ ID NO: 371972 - DNA, 3114 bp, Salmonella enterica
atggcaaacttttttattagacgtcctattttcgcctgggttctggccattatcctgatgatggctggcgcactggcaataatgcaacttcccgttgcgcagtatccaaccattgcgccgccagcggtttctatttctgcaacctatcctggcgcggatgcgcagacggtacaggatacggttactcaggttatcgaacaaaatatgaacggtatcgataacctgatgtatatgtcctctaccagcgactctgctggtagcgtgaccatcaccctgaccttccagtccggaaccgatccggatatcgcgcaggttcaggtgcaaaataaattgcagctcgccacgcctttactgccgcaagaagtccagcagcaggggattagcgttgaaaaatccagcagcagctttttgatggtcgccgggttcgtctcagataatccgaacactacccaggacgacatctctgactatgtcgcctctaacattaaggattctatcagccgtctgaatggtgtgggcgacgttcagctatttggcgcacagtacgccatgcgtatctggctggatgcgaatctgctaaataaataccagctcacgccagttgacgtcatcaaccagttaaaagtacagaacgaccagattgcggcaggccaactgggcggcacgccagcattaccgggccagcagcttaacgcctcaatcatcgcccaaacgcgtctgaaagatccggaagagttcggcaaagttacgttgcgcgtcaataccgacggctctgtcgtccatctcaaagatgtcgcgcgtattgagcttggcggtgaaaactataacgttgtagcgcgcattaacggtaaaccggcctccggtctcggtattaaactggcgaccggcgctaacgcgctggataccgcaaccgcaatcaaagcgaaactggcggagctgcagcctttcttcccccagggaatgaaggtggtttatccttatgacacaacgcccttcgtaaaaatatctatccacgaagtggtaaaaacgctgtttgaagcgattattctggtgttcctggtaatgtatctgttcttacagaatatccgggcaaccctgattcctaccatcgctgttcctgtcgtgttgctaggcacttttgcggtactcgccgcctttggctattccatcaataccctgacgatgttcggcatggtactggcgatagggctgttggttgacgatgcgatagtggtcgtagaaaacgttgaacgtgtaatgatggaggataaccttcctccccgagaggcgacggaaaaatccatgtcgcagattcagggagcgctggttggtatcgcgatggtactgtctgcggtatttatcccgatggccttttttggcggctcgaccggggcaatttatcgccagttctctattactattgtttcagcaatggcgctatccgttctggttgcgttgattctgacgccagcgctgtgcgctacgctgcttaaacccgtatctgctgaacatcacgagaaaaaaagcggcttctttggctggttcaataccaggtttgaccacagcgttaaccactatactaacagcgtaagcggcatcgtgcgtaatacgggtcgctatctcattatctatctacttattgtagtcggaatggcggttctgtttttacgcctcccgacctccttcctgccggaagaagatcagggggtattcctgaccatgattcagctcccctctggcgctacgcaagaacgtacgcagaaagtgctggatcaagtcactcattactacctgaataatgaaaaagcgaacgtcgaaagcgtgtttaccgtaaacggctttagctttagcggtcagggacaaaactcagggatggcatttgtcagccttaaaccctgggaagagcgtaacggtgaagaaaatagcgtcgaagccgttatcgccagagcgacacgcgccttcagccagattcgcgacgggttggtgttccccttcaacatgccagcaattgtcgagttaggtaccgcgacaggtttcgactttgaactgattgatcagggaggactcggtcacgatgcgttaacaaaagcgcgtaatcaactcctgggtatggtcgcgaagcatcctgacctattagtgcgcgtacgcccgaacgggctggaagacacgccacagttcaagctggatgtcgatcaagaaaaagcgcaggcgctcggtgtttcgctgtctgatatcaacgaaaccatctccgcggcgttgggcggctattacgttaacgactttatcgatcgcggacgagtgaaaaaagtatacgttcaggctgacgctcagttccgtatgctgccgggagatatcaacaatctttatgtacgcagcgccaatggcgagatggtgcccttctctacctttagctcagcacggtggatttatggttcgccacgcctggaacgctataacgggatgccgtcaatggaactgctcggtgaagcagcgcccggacgaagtaccggtgaagccatgtcgttaatggaaaacctggcttcacagctgccaaacggtattggctatgactggacaggtatgtcgtatcaggaacggttgtcaggtaaccaggcgccggcgctgtacgcaatctcactcattgtcgttttcctctgccttgccgctctgtatgaaagctggtcaattccgttctcggtaatgctggtcgtaccgctcggcgtggttggcgctctgcttgcagcgtcattgcgcggtctgaacaatgacgtttacttccaggttggcttgttaaccactattggcctttctgctaaaaacgccatcctgattgtcgagttcgccaaagatctcatggaaaaagaaggacgtggattgattgaagcgacgctggaagcatcccgtatgcgtttacgtcctattctaatgacctcgctggcctttattctcggggtaatgccgttagttatcagtcgtggcgcaggtagtggggcacagaacgcagtaggcacaggggttatggggggaatgttaaccgcaaccttattagctatcttcttcgtgccagtattcttcgttgttgtaaaacgccgatttaatcgccatcatgattaa

SEQ ID NO: 371973 - DNA, 222 bp, Salmonella enterica
atgaaaagactaattccagttgcattgcttaccaccttattggcaggttgtgcacatgattctccctgcgtaccggtttatgacgatcaagggcggctggttcataccaatacatgtatgaaaggtacaacgcaggataactgggagacagcaggcgctatcgctggcggcgctgcggcggtagcagggttgacgatgggtatcattgcgctttctaaatga

SEQ ID NO: 371974 - DNA, 1140 bp, Salmonella enterica
atgtcaaagcccctcgatctcaatcagttagcgcaaaatattaagcagtgggggctggagctgggctttcagcaggtcggtattactgataccgatctgcgcgcatccgaacctgcgctgcaggcgtggctggacaaacaataccacggcgagatggcatggatggcgcgccacggtatgatgcgcgcccggcctcatgaactcttacccggtacgctacgtgtcatcagcgtgcgcatgaactatctgcccgccaacgccgcgtttgccagtacgttgaaggatcccacgctgggctacgttagccgatatgcgctggggcgtgattatcacaagctgttacgcagccgtcttaaaaaactgggcgagcagatccagcagtactgcggttcgctgaattttagaccgtttgtcgactctgcgcctattcttgaacgcccattagcggaaaaagccggacttggctggacgggtaagcactcacttatccttaatcgggaggcgggctcattctttttcctgggggaattgctgattgatttaccgctgccggtcgaccagccggtcgaggaaggttgcggcaaatgcgtcgcctgtatgaccatttgcccgaccggggcgattgtcgaaccgtatacggtggacgcgcggcgctgtatttcttatctcaccattgagctggaaggcgctattccggaagcatttcgcccactgataggcaaccgtatttacggctgcgatgactgccagcttatctgtccgtggaatcgttactctcagttgaccgacgaagcagattttagcccacgcaaggcgctgcataacccagatttggttgagttgtttagctggagcgaagcgcagtttctgaaagtcactgaaggtactgcgattcggcgcattggtcatttacgctggctgcgcaatgttgccgtcgcgctggggaatgcgccgtggagtaatgccgtcattacggcgctggaaagccgcaagggtgaacatccacttcttgatgagcatatcgaatgggcgattgcgcaacaaattgaaaagcggaacgcctgcatcattgaagtgcagctaccgaaaaaacagcgtctggtcagggtgattgaaaaagggctggtgcgcgatgcctga

SEQ ID NO: 371975 - DNA, 1545 bp, Salmonella enterica
atggaccataacatgaagaaaaaccctgtaagtataccacactccatttggctcgccgatgacatcaaacggctggaacgcgatgcggcggatgccttcggactcacactctatgaattgatgctgcgcgctggcgacgcggcatttcgggtagcccgtgacagttatcctgacacccgacactggctggtgttgtgtggtcatggcaacaacggcggcgatggttacgtcgtggcgcgactagcgcaagcggcgggcattagcgtaacgttgctggcgcaggagagcgacaaaccgttgcctgaagaagcggcgcaggcgcgcgatgcctggctgaatgctggcggcattatccatgctgccgatattatctggccggaagcgacggatctgattatcgacgcgctgcttggcaccggcatagcccaggcgccgcgcgacccggtagccggtctgattgaacaggcgaacgctcatcctgcgccggttgtcgccgtcgatatcccgtcaggtctgctggcgcaaacgggcgccacgcctggcgcggtgataagcgccgcgcatacggtcacgtttatcgccctgaaaccaggcctgctgaccggcaaagcgcgtgacgttaccggcatattgcattatgacgcgttggggctggaaggctggctggcgagccagacgccgccgctccggcgttttgacgcgacgcagttggggcaatggttaacgccgcgtcgaccgacctcgcataagggcgatcatggtcgtctggcgatcatcggcggcgaccagggaacagcgggcgcaattcggatggctggcgaggcggcgctgcgtacgggggctgggttggtcagagtactgactcgcggtgaaaacatcgcgccgttgctgacagcccgcccggaactgatggtacatgaactcacgcctcagtcgctggaagagagcctgacctgggctgacgttgtggtgatcggcccggggcttgggcagcaggaatggggcaaaaaagccttacagaaagtagaaaacgtccgtaaacctatgctgtgggatgcggatgcgttgaacctactggcaatcaatcctgataaacgtcacaatcgcgtgattacgccgcatccgggagaggcagcccgcctgttaggatgttctgtggcagaaattgaaagtgatcgcttactttcagcacagcgtctggtaaaacggtatggaggcgtggtcgtgttaaaaggcgcaggaacgattattgccgctgaacaccaccctctggctatcattgacgctggtaatgcggggatggcgagcggcgggatgggcgatgtcctgtccggcatcatcggcgcattgctcggacagaagtttaccccgtatgatgcggcatgtgtgggatgtgtggctcacggcgcggcggcggacttactggcagcgcgttatggcgctcgcggcatgttggcgaccgatctttttactacgctgcggcgtattgttaaccctgatgtgattgacgtaaaccatgatgaatcgagtaattccgctacctga

SEQ ID NO: 371976 - DNA, 462 bp, Salmonella enterica
atgatgaatcgagtaattccgctacctgacgaacaggcgacgctagacctggggcaacgggtagccaacgcctgtgatggcgcgaccgttatttatctgtatggcgatttaggtgccggtaaaacgacgtttagccggggatttttacaggcgttaggccataacggtaatgtaaaaagccccacctatacgctggtagagccttatgcgcttgataacatgatggtatatcacttcgacttataccgtcttgcggacccggaggagctggagtttatgggcattcgcgattatttcgccaacgacgccatttgtctggtggagtggccgcaacaaggtaaaggcgttctccccgacccggacgtcgaaatccatattgattaccaggcgcaggggcgtgaggctcgcgtaagcgcggtatcctcatcgggtcattcgttactggcgcgtttagccgattag

SEQ ID NO: 371977 - DNA, 1320 bp, Salmonella enterica
atgatttatcgcatcaaaaatgccgtaatagcagtcttaatcctgctgtgcgcgcaggcgggcgccgccagtctctctgatattcaggtgtccaacggcgagcagcaggcgcgcattacgctgagttttatcggcgagccggaatatgcttactcacaggacggtaaacggaccgtggcgctggatatcaggcagaccggcgtgattcaggggctgccgcttcagtttagcggtaacaatctggtaaaaacgatccgtgctggaacgccgaaagatgcgcaatctttacggttgcttgtcgatctgacggaaaatggtaaaaccgaggcggtgaagcggcaaaacggcggcaactatacggtcattttcaccattaatgccgatgttccgccgccaccgccgcctgtcgtcgcgaaacgggttgaaagcgcgcctcgcccgacggagccggcccgtaatccgtttaaatcttctgatgatcgcctgaccggcgtaaccagcagcaataccgttacgcggcctgcggcgcgcgcgtcggcaggcgctggcgataaagtggtgattgctattgatgccggacatggaggccaggaccccggcgcgataggcccgggcggtacgcgcgagaaaaatgtcaccatcgccatcgcgcgtaagttacgcacattgctgaataacgatccgatgtttaaaggcgtgctgacgcgtgacggcgactattttatttcggtgatggggcggtctgacgtggcgcgtaagcaaaacgccaacttccttgtctctattcatgcggatgccgcgccaaatcgcgacgccaccggcgcctccgtctgggtattgtccaatcgtcgcgcgaacagcgaaatggcaaactggcttgagcagcatgagaagcaatccgaactgttaggcggcgctggcgatgtgctggcgaacagtcagtcagacccttacctgagccaggcggtactggatttgcaattcggtcattcgcagcgggtagggtatgatgtggcgacgaacgtactaagccaactggacggcgtggggtcgctgcataaacgtcgcccggaacacgcgagcctgggcgtgctgcgttcgccggatatcccgtccattttggtggagacgggctttatcagtaatcacggcgaagagcgattgctggcgagcgaccgctatcagcagcagattgctgacgctatataccgagggttgcgtaagtactttgcagcgcatccgatccagtctgcgccgcagggcggcccaggccagacggccagtaccaaccagcctggcaccataaccgccgcgaattaa

SEQ ID NO: 371978 - DNA, 1857 bp, Salmonella enterica
atgccgattcaggttctgccgccgcagcttgcgaaccaaatcgccgctggcgaagtggtggaacgccctgcgtcggttgttaaagagctggtagagaatagtctggatgcaggcgccacccgcgttgatatcgacattgagcgtggcggcgcgaagcttattcgtattcgcgacaatggctgcggcattaaaaaagaggagctggcgctggcgctggcccgtcatgccaccagtaaaatcgcctcgcttgacgatctggaagcgattatcagtctgggatttcgcggcgaagcgctggcgagtatcagttcggtctcgcgtttgacgctaacgtcgcgcacggcggagcaggcggaagcctggcaggcgtatgcggaagggcgtgacatggacgtgacggtaaaacccgccgcgcacccggtcggcaccaccctggaagttctggatctcttttacaatacgcccgcccggcgcaaattcatgcgtaccgaaaaaacggaatttaatcatatcgatgagatcatccgtcgtattgcattggcccgttttgacgtcacgcttaacctgtcgcacaacggcaaattggtacggcagtatcgcgctgtcgcaaaggacgggcaaaaagagcgccggttaggcgccatctgcggcacgccgtttctcgaacaggcactggcgatcgagtggcagcatggcgatctgaccctgcgcggctgggtcgccgatccgaatcacaccaccacggcgttaacggagatccagtactgctatgtgaatggccgcatgatgcgcgaccgcttgatcaaccatgccattcgccaggcctgtgaagataagctgggcgcggaccaacagcctgcgtttgtgttgtatctggagattgacccgcatcaggtggatgtcaatgttcatcccgccaagcacgaagtgcgttttcatcaatcccggctggtgcacgacttcatctatcaaggggtgctgagcgtcctgcaacagcagacggaaacgacgctgccgctggaggagattgcgccagcgccgcggcatgtcccggaaaaccgtatcgccgccgggcgcaaccattttgctgtacccgccgagccaactgcggcgcgcgagcccgcgacaccgcgttattccggcggcgcatcgggcggcaacggcgggcgtcagtccgcgggtggttggccgcacgctcagccaggttatcagaagcagcagggcgaggtttatcgcgcgcttttacagacgccggcgacgagccccgcgccggagccggttgcgcctgcgcttgacggacatagccagagttttggtcgcgtactgacgatagtcggcggtgactgtgcgttgctggaacacgcggggactatccagctcttgtcgctgccggttgcggagcgttggctgcgtcaggcgcagcttacaccgggtcaaagtccggtttgcgcgcagccgttgctgattccgctgcgtttaaaagtgagcgccgatgaaaaagccgcgctgcaaaaagcccaatctttgttgggagaattgggtattgaatttcagtcagatgcgcagcatgtgaccattcgggcagtgcctttacccttacgacaacaaaatttacaaatcttgattcctgaactgataggctacctggcgcaacagaccacatttgcaacggtcaatattgcacaatggatagcgcgtaatgtgcagagcgaacatccgcagtggtcgatggcgcaggccatatcgctgctggcggatgttgagcggctatgtccgcagctggtaaaagcgccgccgggtggcctgttacaacctgttgatttacattcggcgatgaacgccctgaagcatgaatga

SEQ ID NO: 371979 - DNA, 951 bp, Salmonella enterica
atgaatgatgtaagcaaagcgagcctgcctaaggcgatatttttgatggggccgacggcctccggcaaaacggcgctggcgatagaactgcgtaaagttttgccagtagagttgataagcgttgattccgccctcatttatcggggaatggatattggcacggctaagccgaatgccgatgagctgaaagcggcgccgcatcgactgctggatatacgcgacccgtcgcaggcgtattcggcggcggattttcgccgcgacgcgttagcgcaaatggcggagatcacctctgcggggcgtatcccgctgttagtgggcggtaccatgctgtattttaaggcattgctggaagggttatcgccgctgccttcagcagatccggaagtcagatcccggatagagcagcaagcagcggagcttggatgggaggcgttgcatcagcaacttcaggagatagatccggttgccgccgcgcgaattcatccaaatgatccgcaaagactttcccgggcactggaagtttttttcatttcgggtaaaactttaacggagctaacgcaaacgtcaggagacgcgctaccgtaccaggtgcatcagttcgctatcgccccggcgagccgtgaactgctccatcagcgcattgaactgcgttttcatcagatgttggcttcaggttttgaagcagaagtccgggcgctttttgcccgaggagatttgcatacggacttgccttccatccgttgtgtgggataccgccagatgtggtcatacattgagggcgaaatctcatatgatgaaatggtttatagaggtgtttgcgccacgagacagttggcgaagcgccagatgacctggttgcgcggttgggaaggggtgcgctggcttgacagtgagaatcccgatcgggcgcgaaaagaagtattacaggttgttggtgctatcgcagactga

SEQ ID NO: 371980 - DNA, 309 bp, Salmonella enterica
atggctaaggggcaatctttacaagatccgttcctgaacgcattgcgtcgggaacgtgttccagtttctatttatttggtgaatggtattaagctgcaaggtcaaatcgagtcctttgatcagttcgtgatcctgttgaagaacacggtcagccagatggtttataagcacgcgatttctactgttgtcccgtctcgcccggtttctcatcacagcaacaatgccggtggcggcgccagcaataactaccatcacggtagcaacgcgcagggttctactgcgcaacaggacagcgaagagactgaataa

SEQ ID NO: 371981 - DNA, 1281 bp, Salmonella enterica
ttgtttgaccgttatgatgccggtgagcaggcggtactggtacacatctatttttcgcaagacaaagatatggaagacctccaggagtttgaatctctggtctcttccgccggtgtcgaagcaatgcaggtgattaccggtagccgtaaagcaccgcacccgaagtactttgtaggtgaaggtaaggcagttgaaattgcggaagccgtgaaagcgactggcgcagcggtcgtattgtttgatcatgcattgagtccagcccaggagcgaaacctggagcgtttgtgcgagtgccgggttatcgatcgcaccggtcttatcttagatatttttgcccaacgtgcgcgaacccatgaaggtaagttgcaggttgagctggcgcagctacgccatctggctacgcgtctggtgcgtggctggacccaccttgaacgtcagaaaggcgggattggtttgcgcggtccgggtgaaacccagctcgaaaccgaccgtcgtttactgcgtaatcgcattgtgcagattcagtcgcgcctggagaaagttgagaagcaacgtgagcaggggcggcagtcgcgcatcaaggccgacgttccgacggtatcgctggtgggctataccaacgccggaaaatccaccctttttaatcagatcactgaagcgcgggtctatgcggcagatcagctatttgcgacgctggacccgaccttacgtcgtattgatgtagcggatgtcggtgaaaccgttctggcggatacggtaggctttatccgccatttaccgcacgatctggtggctgcctttaaagctaccctgcaggagacgcgtcaggcgacgctgctgctgcatgtggtcgatgcggcggatgttcgtgtgcaggaaaacatcgaggcggtaaacaccgttcttgaagagattgacgctcacgaaatccccaccttaatggtgatgaacaaaatcgatatgctggacgactttgaaccgcgtatcgacagagatgaagagaataaacccatccgcgtttggctttcagcgcaaagcggcgtggggataccacagctttttcaggctttgacggagcgtctttccggcgaggtggcgcagcatacgctgcgtttgccgccgcaggaagggcgtctgagaagccggttttatcagcttcaggcaatagaaaaagagtggatggaggaagacggtagcgtcagtctgcaggtacgaatgccgattgtcgactggcgtcgcctctgtaaacaagaaccggcgttgatcgaatacgtgatctag

SEQ ID NO: 371982 - DNA, 1260 bp, Salmonella enterica
atggcgtggaatcagcccggtaataacggacaggaccgcgacccgtggggaagcagcaaacctggcagcaactctgggggaaatggaaacaaaggtggccgcgatcagggacctcccgatctggatgatatcttccgtaagctgagtaaaaaactcggtggttttgggggcggtaaaggcaccggttccggcggcggtagctcatcgcaaggcccgcgtccgcaactgggaggccgtattgtcgccatcgcggcggcggcagtagtcattatctgggcggccagcggtttttataccattaaagaagccgagcgcggcgttgtgacgcgttttggtaaattcagccatctggtagagccaggtctgaactggaagccgacatttattgacgacgttacgccggtgaacgtcgaagcggtgcgcgaactggcggcgtcaggcgtgatgctgacgtctgatgaaaacgtcgtgcgcgttgaaatgaacgtgcaataccgcgtcaccgatccgcagaaatatctgtttagcgtgaccagcccggacgatagcctgcgtcaggccaccgacagcgcgctgcgtggcgtcattggtaaatacacgatggatcgcatcctgaccgaaggtcgtaccgttattcgtagcgatacccaacgcgagctggaagagactatcaaaccgtacaacatggggattaccctgctggacgtgaacttccaggctgcgcgcccgccggaagaggtgaaagccgcctttgacgacgcgattgccgcacgtgaaaacgagcagcagtacattcgtgaagcggaagcgtataccaacgaagttcagccgcgcgccaacggtcaggcgcagcgtattctggaagaggcacgcgcctataaaacccagactatcctggaagcgcagggtgaagtcgcccggtttgcgaagattttgccggaatataaagccgcgccgcagattacacgcgagcgtctgtatattgaaacgatggaaaaagtgctgagccatacccgtaaagtactggttaacgacaagagcggtaatttaatggtgctgccgttagatcagatgctgaaaggcgggaatgcgccggcggcaaagagcgacaatagcgctagcaacctgctgcgcctgccgccgtccacaaagtctaacgccagcggagcaagcaacacgtcgtcctcaaatcagggcgatattatggaccaacgccgcgcgaatgcgcagcgtaacgactaccagcgtcagggggaataa

SEQ ID NO: 371983 - DNA, 1005 bp, Salmonella enterica
atgcgtaagtcagttattgcgattatcatcatcgtgctggtagtgctctacatgtccgtctttgtggtcaaagagggcgagcgcggcattacgctgcgttttggtaaagttctgcgtgacgatgagaacaaaccgctggtttacgcgccgggtctgcactttaagatcccgtttattgaatcagtgaaaatgcttgatgcgcgtatccagacgatggataaccaggccgatcgctttgtgactaaagagaagaaagacctgattgtcgactcctacatcaaatggcgtatcagcgactttagccgttactatctggcgaccggcggcggcgatatttcgcaagccgaagtgctgttaaaacgtaaattctcggaccgtttgcgttctgagattggtcgcctggacgtaaaagacatcgtgaccgattctcgtggtcgtctgactctggaagtgcgcgacgcgctgaactccggttcagccggtaccgatgatgaagtagcgaccccggcggcggatgacgcgattgccgaagcggcggaacgcgtcacggcggaaaccaaaggtaaagtaccggtcatcaacccgaacagtatggcggcgttgggtatcgaagtggtcgatgtgcgtattaagcagatcaacctgccgaccgaggtttctgaggcgatttacaaccgtatgcgcgccgagcgtgaagcggtcgcgcgtcgtcatcgttcacaaggtcaggaagaagcggaaaaactgcgtgcggctgctgactatgaggtgacgaaaactctggcggaagccgagcgtcaggggcgaatcatgcgtggtgaaggtgatgctgaagccgcgaagctgtttgccgacgcgttcagtcaggaccctgatttctacgcgttcattcgtagtctgcgcgcttacgagaagagcttcgaaggtaatcaggacgtgatggtattgagcccggacagcgatttcttccgctacatgaagacaccgagttcgacgacacgctaa

SEQ ID NO: 371984 - DNA, 198 bp, Salmonella enterica
atgaattcaacaatctggttggcgcttgctctggtattagtcctcgaagggctgggaccgatgctgtatcccggcgcatggaaaaaaatggtttcggcactggcgcaactgccggaaaatgttttacgacgttttggcggcggacttgtggttgcgggagttgtggtctactacatgttgaggaaaacgattggctga

SEQ ID NO: 371985 - DNA, 1299 bp, Salmonella enterica
atgggtaacaacgtcgtcgtactgggcacccaatggggtgacgaaggtaaaggaaagatcgtcgatcttctgactgaacgggctaaatatgttgtacgctaccagggcggtcacaacgcaggccatactctcgtaatcaacggtgaaaaaaccgttctccatcttattccatcaggtattcttcgcgagaatgtaaccagcatcatcggtaacggtgttgtgctgtctccgagcgcgctgatgaaagagatgaaagaactggaagaccgtggcatccccgttcgtgagcgtctgctgctgtctgaagcctgtccgctgatccttgattatcacgttgcgctggataacgcgcgtgagaaagcgcgtggcgcgaaagcgatcggcaccaccggtcgtggaatcgggcctgcttatgaagataaagtggcacgtcgcggtctgcgtgttggtgaccttttcgacaaagaaaccttcgctgaaaaactgaaagaagtgatggaatatcacaacttccagttggttaactactacaaagttgaagcggttgattaccagaaagttctggatgatacgatggctgttgccgacatcctgacttctatggttgttgacgtttcggacctgctcgaccaggcgcgtcagcgtggcgatttcgtcatgtttgaaggtgcgcagggtaccctgctggatatcgaccacggtacttatccgtacgtaacttcttctaacaccacagcaggtggcgtggcgaccggttccggcctgggcccgcgttatgttgattacgttctgggtatcctcaaagcttactccactcgtgtaggtgcaggtccgttcccgaccgaactgtttgatgaaaccggcgagttcctctgcaagcagggtaacgaatacggcgccactaccggccgtcgtcgtcgtaccggctggctggacaccgttgccgttcgtcgtgcggtacagctgaactccctgtctggcttctgcctgaccaaactggacgtgctggatggcctgaaagaggtgaaactctgcgtggcttaccgtatgccggatggtcgcgaagtgactaccactccgctggcagctgacgactggaaaggtgtagagccgatttacgaaaccatgccgggctggtctgaatccaccttcggcgtgaaagatcgtagcggcctgccgcaggcggcgctgaactacatcaaacgtatcgaagaactgaccggcgtgccgattgatattatttctaccggccccgatcgtactgagacgatgattctgcgcgacccgttcgacgcgtaa

SEQ ID NO: 371986 - DNA, 426 bp, Salmonella enterica
gtgcagttaacgagtttcaccgattacggcttacgtgcgctaatctatatggcgtcgttaccagatggacgaatgaccagcatttctgaggtgacagaagtctacggcgtgtcccgtaatcatatggtcaaaattatcaatcagcttagccgggcgggctttgtcactgccgttcggggaaaaaatggcggtatccgcctgggtaaaccggctaatactatttgtattggcgatgtggtgcgtgagctggaacccttatcactggtcaactgtagcagcgaattttgccacatcacccctgcctgtcgtctgaaacaggcgctttctaaggccgtgcagagttttctcaaggagctggataactacacgcttgccgatttggttgaagagaatcaaccgctttataaattattactggtggagtga

SEQ ID NO: 371987 - DNA, 2439 bp, Salmonella enterica
atgtcacaagatcctttccaggaacgcgaagcagaaaaatacgcgaatcctatcccgagccgggaatttatcctcgaacatttaacgaaacgtgaaaaaccggccagtcgcgaagaactggccgtagaactgaatattgaaggcgaagagcagcttgaagccttgcgtcgccgcctgcgcgcgatggaacgcgacggacaactggtctttacccgccgccagtgctatgcgctgccggaacgcctcgacctgctgaaaggcaccgtgatcggtcatcgtgacggttacggtttcttacgtgtcgaaggccgcaaagacgatctgtatctttccagcgagcagatgaaaacctgtattcatggcgatcaggtgctggcgcagccgctgggcgccgatcgtaaaggtcgccgcgaagcgcgtatcgtccgtgtactggtaccgaaaaccagtcagatagtcgggcgttatttcaccgatgcgggcgtcggctttgtggtgccggacgacagccgtctcagcttcgacattcttatcccgccagaagacgtcatgggcgcgcggatggggttcgtggtcgtggttgaactgacccaacgtccaactcgccgtactaaagcggtagggaaaatcgtcgaagtgctgggcgacaatatgggcaccggtatggcggttgatatggcgctgcgtacccatgaaataccttacatctggccgcaggcggtagagcagcaggtcgccgggctgaaagaagaggtgccggaagaggcgaaagtcggtcgtgtcgatctgcgcgatttgccgctggtcactattgatggcgaagatgcccgtgactttgacgacgcggtttactgtgagaaaaaacgcggcggcggctggcgtttgtgggtcgctattgctgacgtgagctattatgtacggccgccaacgccgctggatcgcgaggcgcgcaatcgcggcacgtcggtttacttcccgtcacaggttgtcccaatgttgccggaggtgctctccaacggtctgtgttcgctaaacccgcaggttgacaggctgtgtatggtctgtgaaatgaccatctcggcgaaaggtcggctgaccggctacaaattctatgaagcggtgatgagctcccatgcgcgtctgacctataccaaagtctggcatatgctgcagggcgatcaggatctgcgtgaacaatatgcgccgctggtgaagcatattgaagagctgcacaacctctacaaagtgctggataaagcgcgtgaagagcgcggggggatctcgtttgagagcgaagaggcgaagtttatctttaacgccgaacgtcgcattgagcgtatcgaacagacccagcgtaatgacgcgcataagcttatcgaagagtgcatgatcatggcgaatatctcggcggcgcgctttgtcgaaaaagctaaagagccggcgctattccgtattcatgataagcccaccaccgaagcgatcacctcattccgctccgtactggcggagctggggttggagctgccgggcggaaataaaccggaaccgcgcgattatgccgaactgcttgaatcgattgccgaccggccggacgccgaaatgctgcaaactatgctgctgcgttcaatgaagcaggcgatttacgatccggaaaaccgcgggcactttggcctggcgttgcagtcttatgcgcactttacctcgccgattcgccgctatccggatctttctttgcaccgcgccattaagtacctgctggctaaagagcaagggaacaagggcaacaccacagaaacgggcggttatcactactcgatggaagagatgttgcagctcggccagcactgttcgatggcggaacgccgcgctgatgaagcgacgcgtgatgtctccgactggctgaaatgtgactttatgctggatcaggtaggcaacgtctttaagggcgtgattgccagcgtcaccggtttcggcttctttgtccgtcttgatgaactgtttatcgatgggctggtacacgtttcctcactggataacgattactatcgcttcgatcaggtagggcaacgtctgattggcgagtccggtgggcagacatatcgcctgggcgaccgggtcgaggtacgcgtcgaagcggtgaatatggacgaacggaaaattgactttagcttgatttccagcgagcgcgcaccgcgtaacgtcggcaaaacggcgcgtgaaaaagcgaaaaaaggtgaaagtaaaaacgccggtaaacgtcgtcaggtaggtaaaaaagttaacttcgagcctgatagcgccttccgcggcgagaaaaaagcgaagccgaaagcagcgaagaaagacgcgagaaaagcaaaaaagccatcggctaaaacgcagaaaatagccgcagcgaccaaagcgaagcgtgcggcgaagaaaaaagcggcagagtga

SEQ ID NO: 371988 - DNA, 732 bp, Salmonella enterica
atgagcgaaatgatttacggcatccacgcagtgcaggccctgctggagcgcgcccctgaacgttttcaggaagtctttattttaaaaggccgtgaagataaacgtctgttgccgctgattcacgcccttgagtcccagggcgttgttatccagctggcaaaccgccaatatctcgacgagaaaagcgacggtgccgtgcatcagggtattatcgctcgcgtgaaaccaggccggcagtatcaggaaaacgatctgccggatctgatcgcattacacgaacgcccctttttgttgatcctcgatggcgtcaccgatccgcataatcttggcgcctgtctgcgcagcgccgatgccgctggcgtacatgcggtaatcgtgccgaaagaccgctccgcgcaacttaacgcgacggcgaagaaagtcgcctgcggcgcagcggaaagcgtgccgttgatccgcgtcaccaacctggcgcgcacgatgcgcatgttgcaggaagagaatatctggattgtcggaacggcgggcgaggctgaccatacgctgtatcagagcaaaatgcctggccgcatggcgctggtcatgggcgcagaaggtgaaggtatgcgtcgtctgacccgtgagcactgcgatgagctgatcagcattcctatggccggtagcgtgtcgtcgctgaatgtctctgtggcgaccgggatttgtctgtttgaagccgttcgccagcgaacctga

SEQ ID NO: 371989 - DNA, 405 bp, Salmonella enterica
atggcatggactccacggacgctggcggatgcgttaaacaacatcgccgaattagatattgatatagaaaataatgagtcttcattaataataaaaatgaatgattatggcgatttaccactggcggttttatttacctcgcaacaaatagttatcgagacttatatctgtccggtaaatacgattagagataccgcggaatttaatcttttcttactgagaaatcagaaggttttaccgctgtcttcggtcggtattactcaggtaaaacaggaggaatattatgtcgcttttggcgcgctgtcgttaaattcgtcgcttgccgacgtgacgctggaaatcaccacgcttgtagaaaatgcgttggatatcgctgaaataacacaagtctattcacaggaataa

SEQ ID NO: 371990 - DNA, 699 bp, Salmonella enterica
atgggaattttaaaaagtttgttcacattaggtaaatcattcgttgctcaggcagaagacgccattgatgaagcgcagggtgtacgtatgctggagcagcatattcgcgacgcaaaagccgagctggataaagcgggtaaatccagagtggatttattggcgcgggtgaagttaagccatgacaagctgaatgatttacgtgagcgtaaagccagccttgaaacacgggcgttggcggcaatgagtaagaatgtcgacgccgctttactcaacgaagtggcggaagaaatagcccgtctggaaaatgccattcttgccgaagaacaggtgctgactaatctggaagcctctcgtgatgcggtggagaaggccgtaacggcgacaggccagcggattgcgcagtttgagcagcaacttgaagtggttaaggcgacagaagccatgcagcgcgcgcagcaggcggtgacgacctcgaccgtcggagccgcgtcgaatgtgtctacggcggcggagtcgcttaaacgtttacaaacgcgtcaggctgaacgccaggcccggctggatgccgccgcgcagctggaaaaagtcgccgatggacgcgacctggacgaaaaactggcgcaggccggtattggcgcaaccaataaaagcaatgctcaggatgtgttggcgcgtttacagcgtcaacaaggcgaataa

SEQ ID NO: 371991 - DNA, 1071 bp, Salmonella enterica
atgctctttacgtggattgtcaaaacctgccagcgtcatttgtccagactgacctggcccgctttgctgggcctgtttatcgggcagtatctgctttgctatctggtgctgcgcctgttgcgcgaaagcgcgttggtgagccagttaagcgattttatctattactgctcggtggtgggttccacattaggttttggcgatcttagcccgcagacggcgccaggacgtctgttcaccgcgctgtggcaaattccggttagcgtcgggttgttcggcgcgttaatgggaaaagtgattgcgcaggtgcagggaatgttagcgaaaggaataacgggcatgggcgattatcgccatttacaccatcatatgctggtgattggctggcggggtcatcaaaccgaaaagatgatctcattgctgctatatgacaagcggcgtgcctttgaacgggttctgctgtgcgaactggaagatattcagcatccgctgccgggtaataactgggtggattttatccgcatcagcaactttaacgatccgcaggaacaccagcgcatggggctggagcagtgccagagcgtgattattttcgctcgtaccgatgagcagaccttcacggcggcgctctcgctggcagactatgtacccgcgcagtgccatattgtggtttatctggaagacgagcgttatgccggattactggaaacccactgcccgcgcatggagatagtccgtaacctttccgctgaacaactttcccgttccattcaggacccaggatcatcgcaatctgtcgcttccattatgaatccgatgctgggcgataccggattcgcgctgcctgtcccggcttctgtcgcgcctatgcgatacggcgcgctaatgcgttatatgaagcttcatcatgacgcgacggtgctggggatcagtcactgcaagaatggtcgtggtatggaattgaatccggtgatttcaactgaagtcagaggcggtatgtggctacatctggtcggtaataatcgcattctggctgaagaggtcgcatggcaagagatagaggttcccctatga

SEQ ID NO: 371992 - DNA, 660 bp, Salmonella enterica
atgatgcaattttttcagcgtttgctcggtaaaacaagcgcgccagcgccgattcgcggaccattaggattacatcttaacgccggtttcacgctggatacgctggcatttcggctactggagtcgtcgttgctggtggcgctaccgggtgaaaaatacactgtcgcggcagcgagtcgtatagatttaggcggcggcagtcagatttttcgctactacacctctggcgatgagtttctacaaattaacaccactggcggcacggatgttgacgacattgatgacatcaaactctttgtatatgaggaaagtttcggtattaacgaggaacgtcactggcgttcagccattgcgccagcggcaatagggccgatgacgctcaactggcaagaacggcgctggcagcgcttttttaaccatgaagagccgggcaatattgaacctgtctacatgctggaaaaggttgaaaatcagcaggcagagaaatgggacgttcacaattttacgatgggcttccagcgccaggtgacggatgacgcctgggagtatcttctattgaacggggaagaatcatttaatgagcgcggtgagcctgaatgggtgttttcacgcgccctcggcgtggatatcccgctcacttcactgacggttattggttaa

SEQ ID NO: 371993 - DNA, 399 bp, Salmonella enterica
atgcatatactggacgcattactggctttctgcgcctatttttttattggcgcggcaatggtcattgtatttctttttatttactcaaagataacgccgcataatgaatggcagctgataaaaaataacaatactgcggcatcgctggcctttagtggtacgttgctgggctatgtcatccccttatccagcgcggcgataaactcggtcagtatcccggactattttgcctggggcggcattgcgctggtgattcaactactgatttatggttgcgtaaggttatacatgcctacgctgagcgaaaaaattattcatcacaacgtggcggcggggctatttatgggaaccgcagcgctggctggcggtatttttaacgctgcctgtatgacatggtaa

SEQ ID NO: 371994 - DNA, 639 bp, Salmonella enterica
atggcaaaaaaacgaaaatccagaagcacatccggcgtaggccattcggcaataagacgaatagccgaaccggtcaatccctttgagcggcaacgaaatcgctacacgccaaaatgcctgacgctggcgattatgggtggagcggccttttttctcctgaaagggtgcggtgatggcggcaatactgacaacgacggcgatgggacgttttacgccacggtgaacgactgtattgacgatggcaatagcgccagcgtttgcgctgacggctggaataatgcgaaaacagaattttacgctaatgtgcctaagcaattgacgcaggagcgctgtcagacgcagtttggcgattgctactttgatatcaccgagcggagctgggttccggtattaagcggctttttactcagccgcgcgattcgtcagaaccgtgatgaacaatacatctatagcagcggcggttcatcttacgtctcccgtcccgtctggcgcaccacatccggcgattatgcgtggcgcagcggcacagggaaaagcgataccgtgaccagccctggttatatcacacggaaagcgtccaccgtctcccgcggcggctatggccgttcttccagcgcccgcgggcactggggaggctaa

SEQ ID NO: 371995 - DNA, 1164 bp, Salmonella enterica
atgctacgacacaacgtaccgatacgccgggatctggataagatcgcctgcgatcacggttttgactttcatgttatcgataacgaaatttactgggatgaaagccgggcctaccgttttacattacggcaaattgaagaacagatcgaaaaaccgaccgcagagcttcatcagatgtgtctggagattgtcgagcgggccgtccgggatgagcagatcatgcagcagctggcgatcccgccattgtactgggatgtcatcgccgaaagttggcgcagccgcgatccttcgctttacgggcggatggatttcgtctggtgcggcaaagatccggttaaattgctggaatacaatgcggatacgccgacgtcgctctatgagtcctcctactttcaatggctatggctggaggatgctcgtcgtagcggcgccatcccgcgtgatgccgatcaatacaacgcgatacaggagcggctgatcgcccgcttcagcgagctgtacagtcgggaaccgctctacttttgctgttgtgaagataccgacgaagatcgcacgacggtgctgtaccttcaggattgcgcgcagcaggcgggccaggaaacgcgatttatctatattgaagaactgggacttggcgtaggcggtgtgctgaccgatctggacgataacgtgattcgccgcgcctttaagctctacccgctggaatggatgatgcgcgatgacaacggcccgctgttgcgaaaacgtcgtgagcaatggattgagccattgtggaaaagtattctgagtaacaaagggctgttgccgttattgtggcgctttttccctggccatccgaatcttctgccggcctggtttgagggcgaaaaatcgctcgcagcgccaggcgaaagcagcgtacggaagccgatttattcacgtgaaggcggcaacgtcacgattttcgacgagcggcaaaatgttatcgatcatgccgacggcgactacgctgacgagccgatgatttaccaggcgtttcagcctttgccgcgctttggcgatagctatacgctgattggcagttggatcattgacgatgaagcctccgggatggggattcgcgaggacaatacgctaattaccaaagacacttcccgtttcgtcccacattatattgccggttaa

SEQ ID NO: 371996 - DNA, 1623 bp, Salmonella enterica
atgtcctggcaaacacataccgtctttaatcaacctgctccgctcaataacagtaacttattcctgtctgatggcgcgctgtgtgaagcggtttcccgggaaggcgcgggatgggatagcgatcttctcgccagcattggccaacaactgggaacggcggaatcactggaactggggcgtctggcgaacgcgcatcctcctgagttgctacgttacgatccccagggacagcgtttggatgacgttcgctttcatcccgcctggcacctgttgatgcaggggctttgcgctaatcgggtacataacctggcctgggaggaagaggcaagggcgggaagttttgtcgcccgggcggcgcgttttgtattacatgctcaggtagaagcgggaacactctgtcctgtcacgatgacctttgccgcgacaccgttgctattgcagatgcttcccaccactttccatgactggctggcgccgctgcgcagcgatcgctacgattcgcatttgctgccgggcgggcaaaaacggggcctgctcatcggcatgggaatgacggaaaagcagggcggatctgacgtactcagtaatacgacccacgcggagcggctggcggatgattcatatcggctggtgggacataaatggtttttctctgtgccgcaaagtgatgcgcacctcgtgttggcgcaggcaaaaggaggactatcctgtttctttgtgccgcgtttcctgccagacgggcaacggaactctgttcgtcttgaacgcctgaaagataaactcggtaatcgatctaatgccagcgccgaagtcgagtttcaggatgccgtcggctggcggctgggagaagagggcgaagggattcggcatatcttaaagatgggcggtatgacgcgtcttgattgcgcgctcgggagtcatggcttaatgcggcgtgcgttttcagtcgccatttaccatgctcatcagcgtcaggcttttggtaagccgctgatcgaacaaccgttgatgcgacaaaccttaagtcgtatggcgctatgcctggaggggcagacggcgcttttgtttcggctggcgcgcgcctgggagcaacgtcgcgaggcgaaagaggcattatgggcgcgattattcacgccagcggcgaaattcgccatctgtaagcagggaatcccttttgtggctgaggcgatggaggttctcggcgggatggggtattgcgaagagagcgaactcccgcgcctgtaccgtgaaatgccggtgaacagtatctgggaaggttccggcaatatcatgtgtctggatgtacttcgggtgctgacaaaacaacacggcgtctatgacgtattgagtgaagcttttgcggaagtcaaaggtcaggatcgccattacgaccgcgcggtacgtcagctacagcaacgtttacgcaaaccggacgaagcaatgggcagagagattacgcagcagcttttcttgctggggtgcggagcggaaatgctgcgtcatgcctcgccgccgctggcgcaagcgtggtgtcagatgatgctggatacacgcggcgaaatgccgctgtctgcccaggtacaaaatgatttactgttaagggcgaccgggggactgcggtaa

SEQ ID NO: 371997 - DNA, 276 bp, Salmonella enterica
atgaaacaagaacttgccttatcctcactgctgctttctgccggactggtgagtacgacggcacagtctgccgaattcgccagtgctgactgcgtaacgggtctgaatgaaatcggcctgatctcggtcagtaatgttgcaggaaacccacaggatgtggagcggattatcgccctgaaagccgatgaacagggtgcgtcctggtacagaattattcaaatgtatgaagaacaacagtcggataactggcgcgtacaggcgatactctatgcctga

SEQ ID NO: 371998 - DNA, 303 bp, Salmonella enterica
atgcgtcggtttgcttcattgatagcagcgctgttattaagcgcgtgtagcgtgctgcagggtacgccgcaacctgcgccgcctatcgccgatcacccgcaggaaatccgtcgcgatcaaacgcaaggactacagcggatggggaccgtaagcgcgctggttcggggctccccggatgatgcaatagatgaaatcagagcgaaagccgtcgctgcgaaagccgattattacgttatcttaatggttgatgaaacggttgtaaccggccagtggtattcacaagccattttgtatcgtcaataa

SEQ ID NO: 371999 - DNA, 750 bp, Salmonella enterica
atgatagcgattgaaacacgacaattagccggaggcgtcgtactacatgccttcccggaagggaaacgcgccgtgccgcttccctgtgtggtgttctatcatggcttcacctcctccagcctggtttatagttattttgccgttgccctggcacaggcaggattccgggtagtcatgccggatgcgccggagcatggcgctcgcttcggcggcgactcacagggacggatacaccgattctggcagattctgcaccaaaacatgcaggaatttacgacgttacgtgcggcgattcaggcggaaaactggctacttgacgggcggttggcggtgggcggcgcatccatgggcggtatgacggcgctgggcattatgacgcgtcaccgagaggtaaaatgcggggccagtttaatggggtcgggctattttaccgggctcgcccggacgcttttcccgccgttatccccgcagaacccggcgcagcaggcggaattcgacaatatcatcgcgccgctacgtgaatgggaagtcacacatcagttagagcgcctggccgacaggccgcttctgttgtggcatggtcaggaggatgacgtggtgcctgctatcgaaaccttccggctccagcaggcactcgccgcggcgaagctggataagcatgtgacctgtttatgggccgcaggcgtgcggcatcgcattacgccagaagcgttgtcggcgacggtagcgtttttccgacagcatctttaa

SEQ ID NO: 372000 - DNA, 756 bp, Salmonella enterica
atgactgaagcacaaagacatcaaatactgctggatatgctggcacagttgggctttgttaccgtcgaaaacgtgattgagcgtctggggatctccccggcgacagcgcgccgcgacatcaacaagctcgacgaaagcgggaaacttaaaaaagtgcgcaacggcgcagaggccattacccaacagcggccccgctggacgccgatgaatctgcaccaggcgcaaaaccacgatgaaaaagtacgcatcgcgaaagcggcgtcgcagctggtaaacccgggtgaaagcgtagtgattaactgcggctccaccgctttcctgctggggcgtgaaatgtgcgggaaaccggtacagatcattaccaactatctgccgctggcgaattatctgatcgatcaagagcatgacagcgtgattatcatgggtggtcagtataataaaagccagtcgattaccctgagcccgcagggaagtgaaaacagtctctatgctggccactggatgtttaccagcggaaagggcttaaccgcggatggcctgtacaagaccgatatgctaaccgccatggcggaacaaaaaatgctcagcgtcgtcgggaaactggtcgcgctggtcgatagcagtaaaattggcgagcgcgcggggatgctgttcagccgcgccgatcagatcgctatgctgattaccggcaaaaatgccaatccgcaggttttgcaacagcttgaagcccagggtgtaagcatactccgcgtttaa

SEQ ID NO: 372001 - DNA, 1065 bp, Salmonella enterica
atgagtaaagtacaaagcatcacgcgtgaatcatggattctgagcacgtttccggagtggggaagctggctgaacgaagagattgagcaagagcaggtcgcgccgggtacgttcgctatgtggtggctgggctgtaccggtatctggctaaaatctgaaggcggcactaacgtatgcgtcgatttctggtgcggtaccggtaaacagagccacggtaatccgttgatgaaaaccggccatcagatgcagcgtatggctggcgtcaaaaaattacagcctaacctgcgcaccacgccgtttgttctcgatcctttcgctatccgtcagattgacgccgtactggcgacccacgaccataacgatcacattgacgtcaatgtcgcggctgccgtaatgcagaattgcgccgatgatgttccgtttatcggcccgcagacctgcgtggatttgtgggttggctggggcgtgccgaaagaacgctgcatcgtggtaaaaccgggcgatgtcgtgaaagtgaaagatattgaaattcatgcgcttgatgcctttgaccgcactgcattaatcaccctgcctgccgatcagaaagctgctggcgtactgccggacggcatggatgtacgcgcggttaactatctgtttaaaacgccgggcggcaatctctatcacagcggcgattctcactattccaactactacgcgaaacacggcaacgaacatcaaattgatgtcgcgctcggttcttacggtgaaaacccgcgcggtattacggacaaaatgaccagcgcggatattttacgcatggcggaatcgctgaataccaaagtggtgatcccgttccatcacgatatctggtcgaacttccaggccgatccgcaagagatccgcgtgctatgggaaatgaagaaagatcgcctgaagtatggttttaaaccgtttatctggcaggttggcggcaagtttacctggccgctggataaagacaatttcgaataccactatccgcgtgggtttgacgattgctttaccattgaacccgatctaccgttcaaatccttcctgtga

SEQ ID NO: 372002 - DNA, 1398 bp, Salmonella enterica
atggagatcctctacaacatctttaccattttttttaatcaggtaatgaccaatgccccgctattactgggtattgtgacctgcctgggctatatcctgctgcgtaaaagcgtcagcgtgatcatcaaagggacgatcaaaaccatcattggcttcatgctgctacaggccgggtccggcattctgaccagcacctttaaaccggtggtggcgaaaatgtctgaggtctacggcatcaacggcgcgatttccgatacctatgcttcgatgatggcaacgatcgaacggatgggtgatgcgtatagttgggtaggctacgcggtgttgctcgcgctggcgctgaatatttgttacgtcttgttgcgacgcattaccggtattcgcaccatcatgttgaccgggcacatcatgttccagcaggcggggctgattgcggtctctttctatatcttcggctattccatgtggaccaccattatctgcacggcgatactggtttccctgtactggggtattacctccaacatgatgtacaagccgactcaggaagtgaccgatggctgtggtttctccatcggtcaccagcagcagtttgcttcctggattgcctataaagtcgcgccgttcctgggcaaaaaagaggaaagcgttgaagacctcaaactgccgggctggctgaacattttccatgacaacatcgtctccacggcgattgtaatgaccatcttctttggtgccattctgctctcctttggtatcgataccgtacaggcgatggcgggtaaaacccactggacaatctatatcctgcaaaccggtttctcctttgcggtggcgatcttcatcatcacccagggcgtgcgtatgtttgtcgccgagctctctgaggcctttaacggtatctcccagcgtctgattccgggcgcagtactggcgattgactgcgccgctatttatagcttcgcgccgaacgcggtggtctggggctttatgtggggcaccatcggtcagctgattgcggttggcatcctggttgcctgcggctcctcgatcctgattattcctggctttatcccgatgttcttctctaacgccactatcggcgtgttcgctaaccacttcggcggctggcgtgcggcgctgaagatttgtctggtgatggggatgatcgaaatctttggttgcgtctgggcggtgaaactcacggggatgagcgcctggatgggtatggcggactggtcgattctggcaccgccgatgatgcagggcttcttctccctcggtatcgcctttatggccgtcatcattgtaattgcactggcttatatgttcttcgctggccgcgcactgcgcgcagaagaagatgcagaaaaacaactggcagaacagtctgcttaa

SEQ ID NO: 372003 - DNA, 306 bp, Salmonella enterica
atgaccgtacgtattctggctgtgtgtggcaacggacagggcagttccatgatcatgaaaatgaaagtggaccagtttttaacccaatcaaacattgaccacacggtaaacagctgcgcggttggcgagtacaaaagcgagttgagcggcgcggatatcatcatcgcttctacccatattgcgggcgaaatcaccgtgaccggcaacaaatatgtggttggcgtgcgtaacatgctctctcctgctgacttcggcccgaaactgctggaagtgatcaaagaacatttcccgcaagacgtgaagtaa

SEQ ID NO: 372004 - DNA, 465 bp, Salmonella enterica
atgaaattacgtgattcactggcggagaataattctatccgcctgcaggctgaagcgaatacctggcaggaagccgtcaagatcggcgtcgatttactggtggctgccgacgtggtggagccgcgctattaccaggccattctcgatggcgttgagcagtttggcccctattttgtgattgcccccggcctggcgatgccgcatggccgcccggaagaaggggtgaagaaaaccggtttttcgctggtgacgctgaaaaagccgctggagttcaaccacgaagataacgacccggtcgatattctgatcaccatggcggcggttgatgccaacactcaccaggaagtgggcatcatgcagatcgtcaacctgtttgaagacgaagctaattttgaccgtttacgcgcctgccgcaccgcgcaggaagtcctggatctcattgaccgcaccaacgcggcagcttaa

SEQ ID NO: 372005 - DNA, 651 bp, Salmonella enterica
atgtcattaccaatgttgcaggtcgcgctggacaaccagactatggatagcgcctatgaaaccactcgcctgattgccgaagaagtcgacattatcgaagtgggcaccattctgtgcgtgggcgaaggcgtgcgtgcggttcgcgatctgaaagcgctttacccgcacaaaatcgtgctggcggacgccaaaattgccgatgccggtaaaatcctctcccgtatgtgtttcgaagccaacgcggactgggtgacggtcatttgctgcgccgacatcaacaccgcgaaaggcgcgctggatgtggcgaaagagttcaacggcgacgtgcagatcgaactgaccggttactggacctgggaacaggcgcagcagtggcgcgatgcgggcattcagcaagtggtttatcaccgcagccgtgacgcgcaggccgcaggcgtggcgtggggcgaggcggatattaccgcgattaagcggctctccgatatgggctttaaagtgaccgtgaccggcggactggcgctggaagacctgccgctgttcaaaggcattccgatccatgtctttatcgcggggcgcagcattcgcgatgccgaatcgccggtagaagccgcacggcagttcaaacgctccattgcccaactgtggggctaa

SEQ ID NO: 372006 - DNA, 855 bp, Salmonella enterica
atgctgtcgaaacaaattccgctcggcatctatgaaaaagcgctccctgccggggagtgctggctggagcgcctgcggctggcgaaaacgctgggttttgactttgttgaaatgtcggtggacgagaccgacgcccgactggcgcggctcgactggagtcgcgagcagcgcctggcgctggtgagcgcggttgctgaaaccggcgtgcgcgtgccgtccatgtgtctgagcgcgcatcgtcgttttccgctcggtagcgaagatgacgcggtacgggcgcaggggctggagattatgcgtaaagcgattcagtttgcgcaggacgtcgggattcgcgtcattcaactggcggggtacgacgtttactatcagcaggccaatgacgaaacgcgttgccgcttccgcgatgggttaaaagagagcgttgatatggctagccgcgcccaggtgacgctggcgatggagatcatggattatccattgatgaattccatcagtaaagcgctgggctatgctcactacctcaataacccgtggttccagctctatccggatatcggcaatctgtctgcctgggataacgacgtacagatggagctacaggcgggaatcgggcatatcgtcgcggtacacgtcaaagatactaaacccggcgtgttcaaaaatgtgccgtttggcgaaggcgttgtcgatttcgaacgctgcttcgaaacgctcaaacagagtggctattgcgggccctatctgattgagatgtggagtgaaacagcagagaacccggcggcagaggtagcgaaagcgcgtgactgggtgaaagcgcgcatggccagcgccggtctggtggaggcagcctaa

SEQ ID NO: 372007 - DNA, 687 bp, Salmonella enterica
atgcaaaagctcaagcagcaggtatttgacgctaacatggatttgccccgttatggactggtgacgtttacctggggcaacgtcagcgctatcgatcgcgaacgcgggctggtggtgattaagccaagcggtgtcgcctatgaaaccatgaaggtagatgacatggtggtggtggatatggatggcaaagtggtggagggaggttatcgtccttcttccgataccgctacccatctggcgctgtatcaacgctatccgtcgcttggcggcgtcgttcatacccactccacccacgccacggcatgggcgcaggcggggatggctattccggcgctcggtaccacgcacgcggactatttctttggcgatattccttgtaccagggcgttaagcgaagaagaagtgcagggcgagtacgagctgaacaccggtaaggtgatcatcgaaacgctgggcgaggtggaaccgctgcatacgccaggcattgtggtgtatcaacacgggccgttcgcctgggggaaagatgcgcacgatgcggtacataacgcggtcgtcatggaggaagtggcgcgaatggcgtggattgcgcgcggtattaaccctggcctcaaccccatcgacgattatctgatgaataaacacttcatgcgtaagcatggcccgaatgcgtattacgggcagaagtga

SEQ ID NO: 372008 - DNA, 276 bp, Salmonella enterica
atgcgagcccggataatgttatttctggctgcgcttttgcctggcgtaacggcaacggcagccatcgagttaaataatcaccaggccagaaatatggatgatgtgcgcagcttaggcgtgatctacatcaaccataagttcgccacggaaagcgaagccaatctggcgctgaatgacgaggccgacgcgcgaaacgcaatgtattatcacgtcatacttatccgggaaccgggtagcaacggcaacatacacgccagcgcgaatatttatcgctag

SEQ ID NO: 372009 - DNA, 396 bp, Salmonella enterica
atgcgtcattacgaaatcgtttttatggtccatcctgaccagagcgaacaggttccgggcatgatcgagcgttactctgctgccatcactggcgcagaaggcaagatccaccgtctggaagactggggccgccgtcagctggcttacccgatcaacaaactgcacaaagcgcactacgttctgatgaacgttgaagcgccgcaggaagtgatcgatgagctggaaactaccttccgcttcaacgatgccgttatccgcagcatggttatgcgtactaagcacgctgttaccgaagcttctccgatggttaaagcgaaagacgagcgccgtgagcgtcgcgatgatttcgctaacgaaaccgcagatgatgctgaagctggggattctgaagagtaa

SEQ ID NO: 372010 - DNA, 315 bp, Salmonella enterica
atgaccaaccgtctggcgttgtccggcaccgtgtgcagggccccccttcgaaaggtcagtccatcaggaattccgcattgccagttcgtgcttgagcatcgttctgtgcaagaggaagccggctttcaccggcaggcgtggtgccaaatgcccgttattgttagcggacacgaaaaccaggccattactcacagtataacggtcggcagccgcataaccgttcaggggtttatttcttgccacaaggcaaagaacggtctgagcaaaatggttctgcatgccgagcagattgaattgatagattctggagactag

SEQ ID NO: 372011 - DNA, 228 bp, Salmonella enterica
atggcacgttatttccgtcgtcgcaagttctgccgtttcaccgcggaaggcgttcaagagatcgactataaagatatcgctacgctgaaaaactacatcaccgaaagcggtaagattgtcccaagccgtatcaccggtacccgtgcaaaataccagcgtcagctggctcgcgctatcaaacgcgctcgctacctgtctctgctgccgtacactgatcgccatcagtaa

SEQ ID NO: 372012 - DNA, 450 bp, Salmonella enterica
atgcaagttattctgcttgataaagtagcaaacctgggtagcctgggtgatcaggttaacgttaaagcgggctatgctcgtaacttcttggtaccaaagggtaaagctgttccggctaccaagaaaaacgttgaatacttcgaagcacgtcgcgctgaactggaagctaaactggctgacgttctggctgctgcaaatgcacgcgcagagaaaatcaacgccctggaaaccgttactatcgcgtctaaagcaggcgacgaaggtaaactgttcggttccatcggtactcgcgacatcgctgacgctgtgactgcggctggcgttgacgtggctaagagcgaagttcgtctgccgaacggcgttctgcgtaccactggcgaacacgaagtgaacttccaggttcacagcgaagtattcgcaaaagttatcatcaacgtggttgctgagtaa

SEQ ID NO: 372013 - DNA, 927 bp, Salmonella enterica
atggatacccaacgccaggcctccccgtttgcccgcaaaaacgtcgtttatgtgtgtgccgcattttgttgcttgctatggggcagcgcttatccagccatcaaaagcggttatgacctctttcagatagccaccgatgatatcccttctaaaattgtttttgctggttatcgttttttgtttgcgggtgggttgctactactgttcgcgctgcttcagcgtaaaccgattggtcggtttcgtccgcgccagtttgctcagttgacgttactggggctgactcagacgtcgctgcaatatctctttttctatatcggccttgcgttcacctccggcgtgaaaggctcaatcatgaacgcgacaggcacattcttcagcgtattgctggcgcactttatttatcagaacgaccgattgagctacaacaaaacgctcggctgtattctgggctttgcgggcgtcatggtggtgaacgtcagcaacggcctggatttcagctttaatctgccgggagaaggctccgtggtgctggcggcgtttattctttctgcggccacattgtatggcaaacgtctctcgcagacggtcgatccgatggtcatgactggctatcaattggggattggcggtctggtactggtcattggcggttacgtttttggcggtacgctgacgatacatggcttctcgtcggtggcgattttagtctacctgacgctgctctcgtcggtcgcttttgcgctatggagcattttactcaaatataatcgcgtggggatgattgcgccgtttaactttctgatcccgttttctggcgcggctctttcggctatttttctcggcgagaatatattggagtggaaatacatgattgcgctggtgctggtgtgttcggggatttggtgggtgaataaggtgaagcggtaa

SEQ ID NO: 372014 - DNA, 636 bp, Salmonella enterica
atgcccgggcgctttgaattaaaaccaaccctggcgaaaatctggcacgcgccggataattttcgcatcatggaaccgctgccgcctatgcatcgtcgtggcattatcattgccgctatcgtgctggtgatcggtttcctgctgcccgccagcgagaccagcgactcacctgtcgtcacgcgggaagcgcaattggatctgcaatcgcaatcacagccgccgacggaggcccagcttcaggcgcagctggtcgcgccgcaaaacgatccggatcaggtggcgcccgttgcgccggaacctatccaggaaggccagccggaagaacaaaaccagccgcagacgcagcctttccagcaggatagcggcatcggtcaacagtggcgctcgtaccgggtagagtctggtaaaactctggcgcaactgttccgtgaccacgggctgcccccgacagacgtttatgcaatggcgcaggtagaaggcgctggcaaaccgctgagtaatctcaaaaatggtcaaatgattaaaattcgccagaatgccagcggggtggtgacaggtttaacgatagatggcgataacggtcaacaggtgctgtttacgcgtcagcctgacggcagttttattcgcgcacagtaa

SEQ ID NO: 372015 - DNA, 621 bp, Salmonella enterica
atggccaccccgacttttgacactattgaagcgcaagcgagctacggcattggtttgcaggtagggcagcagctcagcgaatccggtcttgaagggctgttgcctgaagcgctggttgcaggcattgctgatgcgctggaaggtaaacacccggcggttcctgttgatgtggtgcatcgtgcgctgcgtgaaattcatgagcgtgcggacgcggtgcgtcgtgagcgtttcaaagcgatggcggccgaaggcgtgaaatacctggaagaaaaccgcgaaaaagacggtgtgaacagtactgaatctggtttacagttccgcgttctgacgcagggcgaaggcgcgattccggcgcgtaccgaccgcgtacgcgtgcattacaccggtaagcttattgatggcaccgtatttgacagctccgtcgcgcgcggcgaaccggctgaattcccggtaaatggcgtgatcgccggctggattgaagctctgactctgatgccggtaggttccaaatgggaactgactatcccacaggagctggcctatggcgagcgtggggccggggcctctattccgccattcagcaccctggtgtttgaggtggaactgctggaaattctgtaa

SEQ ID NO: 372016 - DNA, 1404 bp, Salmonella enterica
atggtagatcaggtaaaagtcgcagccgacgaacaggctccggctgaacagtcgctacggcgcaatcttacaaaccgtcatatacagcttatcgctattggcggcgctattggtaccggtctgtttatgggatcgggtaaaacgatcagtctcgccggaccgtcgatcatttttgtgtatatgatcatcggttttatgctttttttcgtgatgcgcgccatgggggaattgctgctctcgaatctggaatataaatcgtttagcgattttgcttccgacctgcttggcccctgggcgggatatttcaccggctggacgtactggttttgctgggtagtgaccggtatggctgacgtggtggcgattactgcctacgcgcagttctggtttcccggcctttccgattgggtcgcctcgctggcggtagtgatcctgctgctaagcctcaacctcgccaccgttaaaatgtttggtgaaatggaattttggtttgctatggtcaaaatcgtcgccattgtggcgttgattgtggtcgggctggtgatgattgcgatgcactttaaatcgccgacaggcgttgaagcgtctttcgcgcatctgtggaataacggcggctggttcccgaaaggtattagcgggttctttgccggtttccagattgcagtgttcgctttcgtgggcattgagctggttggtactaccgccgcagaaactaaagatccggaaaaatcgctgccgcgcgcgattaactcaataccgatccgtatcatcatgttctacgtctttgcgctgattgtcattatgtcggtgacgccgtggagttccgtggtgccggataagagcccgttcgttgagctgtttgtactggtgggtctgcctgccgccgcgagcgtgatcaactttgttgtgctgacctcggcggcgtcttccgccaacagcggcgtcttctcgaccagccgtatgctgtttggcctggcgcaagaaggcgtggcgccaaaagcgttcgctaagctatcgaaacgcgcggtaccggcgaaaggcctgaccttctcctgtatctgcctgctgggcggcgtggttatgctgatggtcaacccgagcgtgattggcgcattcaccatgatcactacggtttcggctatcctgtttatgtttgtctggaccatcattctgtgttcatacctggtgtaccgcaaaaagcgtccccacctgcatgaaaaatccatctataagatgccgctcggtaagctgatgtgctgggtctgcatggcgttctttgcgttcgtgctggtattactgacgctggaagacgatacgcgccaggcgctgatcgtgacgccgctgtggtttatcgcgttgggtctgggctggctgttcctgcgtaagaacaaactggctaaatga

SEQ ID NO: 372017 - DNA, 1140 bp, Salmonella enterica
atgaccattcgacgctggattttaagcgctacgcttttgctgctgcctgttcctgcgttcgcagattttcagtatcagcaggataaggacggcgttttttataccgccgacgacgaaccgcaaattctctcccgactgcctgacgttagctattcgcatttacggcgtattgccgatttatctcacccgcaagaccctcgcccgttaatagaaatcaatcccgacagccataactgcgacgacaatcatatttgtcagcacgcttatctcagcgatgggcgctttatcctgtgggcaggcaaaatcgtccagaataccggggatgagcctgccgttgatgttgccagctttcagtcttttggcgcctttgccgccgataaacacggtctctattttgatggtaaacgtcgtgatagcaatgcgggtgaaaaacgtgtggatatggcgactctggcagagacgaaaatctggaatctgctgcgggataaaaataatctctattatgaaggccgctggctggggcgggccgatgggtttcgcgtgttgaggctggattccacttcggcaagggagtttattgtgacgacggcgcaacgggtgattgtgaacggcatacccattaccgctgatgctaatacgtttcaaatcattcgctggatgcctggcgaggtactaatttatcgtgataaaaccggtaagcatgactatgagattgataattccagtcggtactgcggctattttaatattggcctgcgtgaggtgacatggctgaaacatgaggcaaccaacgccgggagcagttgtaaagtggaaaccctgccgggtgtcgatccggagtatttttttcgtctgaacgggaacaccggttggtataaggatcgtatttatcaggtgagcacgaatgcgttgggcgagggggtactgcgcatttttacgtcgcaggaaaaacttccggcgctgaaaatagatagagttacctataattactaccatctggctttgtccgcggatgggcaattatatcgccagatctcacgtgatcaatggcagcgctataacccgatattaacagagtggacgacggtatcaccagcgcccactgacgttatctctttgcttccctctgattaccactag

SEQ ID NO: 372018 - DNA, 672 bp, Salmonella enterica
atgaagcagttaaacggcgggaatgtgtatcgtcccacagggaaagaaaaaaacctgcaagccattttaaatattcatcggcacgttattcaaaacatctcccctgtcactattacggccggtaaaacactggatatcaagattgataatcaatcccacatcctgttaatcactaaaggcgctattaaagtatgtcggcgtatcgacagcattgtaatgggctgcggtgtctcaccaatgattttaggccttgtagatgcctatgctgacttataccagttagaagagaattcagacgtcttttttatcgccgaaaccacctgtgaatattatcctgtcccagtaaaagattttgtggaaatagccgatgaaaagcatctctggcgtgacatttcgaacatcctgatgtaccgcattgctttcatgactaaccgtgacagaaaccttatcgggcaggacgcctatagccagataaaagcgctgttacttgaactgtggtcgtatcctgaaagctcacgatttgagatcaacgcacagaacttcatacaacagagaaccgggctttcacgcagccgtatcatgcaggtactttcagaactaaaagcgggagactatataaaaatactgcatggaagactgttagagcttcgaaacctgccggtttcattttaa

SEQ ID NO: 372019 - DNA, 546 bp, Salmonella enterica
atgtttaataagaaaattatcatcctggcaatgttaactgccgtagcatccacaccggtatttgcccagaacacgattacgttcaatggcaaaatttacgatcaggcgtgtacggttcaggttaatggctccacggataccaccattgatttaggcaattacagcaaagaacgcatcgcggaaaaaggcgccacaaccgattacgtgccgtttaccgtaagcctggttagctgcccggaagcagggactggcgtaccaacccaggccatgttccgcttccacggcgcaacggatgattccaacccaacgtacttcaaaaacgcggacgaaggatcggaaacgggcgccgcgggtgtcggtatttctattcagaacgcctcacatagcgatgtgacagataacacggatgatgctgcagtaaacctgccaaccgacggctcgaaagcagactttatctattacgccgccatggcaaacgatggttccgcaaccgtaaccggtggagatgttagcactcaggttacgtataccgtttcgtatcagtaa

SEQ ID NO: 372020 - DNA, 684 bp, Salmonella enterica
atgaaacacataaagaaatccgtgttggtcgtattactgacaagccatgttgcccatgccagcattgttgttggcggaacccgactggttttcgacggcaataatgatgagtcgtcaatcaatgtagagaataaagacagcaaagcgaatcttgttcagtcatggttatcggttgccgatccccaggtcacaaataagcaggcgtttattatcaccccgcctctttttcgccttgatgccgggcaaaagaacagtattcgggttattcgctctggcgcccccctacctgcagatcgggaatctatgtactggctcaatattaagggtattccttctattgatgataatgcctccgcgaaccgcgtggaaatctccattaatacccaaataaagcttatatatcgaccgccagcattaacaaaatcaacgcctgatagccagagccaacaattaaaatggcagacggcaggtgatgttattaccgtaaataaccccactccctattatatgaactttgccagtgtgacgcttaacagccatgaagtgaaatcagcgaccttcgttccgccaaaatcatcagcgtcatttaaattgggttctactgccgcccctcatggcacggtaacgtggcgattaatcagcgattatgggatgagtttagagccgcattccggttcattctag

SEQ ID NO: 372021 - DNA, 2538 bp, Salmonella enterica
gtgcaattctccagagtagagccccgttctcaattagcgttatcgtttctctttatatgctgttccataaaaccagcgttagcgcatgatcattttaatccattatcgttggaaaatgatgaaccgggcgtggagaatgtcgatctatcggttttcgaaaagggggggcaggcagaaggcacctataatgttgatatttatattaataacaccagtgttgaaacaaaaaatattgcctttaaaaataaaaaatcagcagataataagctctccctacagccgtgtcttagcgttgaacaactcaagcagtggggcgtaaaaacagaaaacttccccgagcttaaaaatgacccaaacgggtgtaccgatcttagtctgctggctggcgctgtagcaaagtttaatgtcatcggtaaccggctggatttagcgatccctcaaatcgcgttgatcgccgacccgcgagaattcgtccctaccagcgaatgggatgaaggcattaatgcttttttgctgaactacagttttaccggatcgcaggatcacgatattgatgaaaaccggacggaaaatagcgaatacgctaacctgcgccctggtattaacattggcgcatggcgttttcgtaactactcaacctggaatcatgatagcgatgggcaaaatagctgggattctgcctacacctatgtttctcgcgatatcgaatttttaaaaggacagctgatcgccggggaaaataacacgcccgcagacgtctttgacagtatttcatttaagggcgtacagatctcttctgatgacgatatgttgccggacagtatgaaagggttcgccccggtcattcgcggggtggccaaaagcagcgcgcaggtaaccgttgaacaaaacggttataccatctacaaaactaacgttccggcgggtccattcgccatcaacgatctttatccaaccggcggttcgggcgacctgtacgtcaccatcaaagaatccgatggttctgaacagcatttcattgtgccctacgccagcgttccggtattacagcgtgaaggccacctgaaatacgacctgacggtaggccgcacgcgttcatcagatacgcattccgcgcaacagaacttcgctgaactgacggccttatacggattagcaggcggcataaccgcctatggcggaatagagagtacgctgagcaatgatgtttatcatgcggcgctcatcgggacaggcttaaaccttggcgatctgggcgcattgtctttagacgtcaccaactcatggtcaaaaattaaagcaggcgatgtggttagcgatacgcttaccggacaatcctggcgtattcgttacagcaaagatattcagtcaacaggtaccaatttcactgtcgccggctaccgttattcgaccaaagattactacgctcttgaggatgtgctggatacctatagcgataatagtcactatgatcatgtacgtaatcgcaccgacctgtcgttatcgcaagacattatctacggttccatttcactcactttatataatgaagattactggaatgacactcataccacatcattaggtattggctataacaacacatggcataacgtaagctatggcattaactattcttatacgctgaacgccgataattctcaggatgaagacgacgatacggaagacagtaatgaccagcaaatttcaatcaatattagcattccgttagatgcctttatgccgtcaacgtatgccacctacaatatgaactccgcgaaagacggcgataccacgcatactgtcggtttaaacggaacagcgctggcacagaaaaatctctcatggagcgttcaggaaggttattcctctcaagagaaagccaccagcggtaatgtgagcgcaacctataacgggacgtatgcggatattaacggcggatatagctacgataatcatatgcgtcgcctgaattatggcgttcagggcggcgtactgttacatcgaaatggcctgacactatcccagccaatggacgacaccatcatattggttaaagcccctggcgcagcgggtgtccccgtgaataacgaaacgggcgtggacaccgattttcggggttatgccgtcgtaccttatgcttcgccttaccatcgtaatgaagtctctttagatacgacgggcattagaaaaaatattgagctcattgataccagtaaaacgctggtgcctacccgtggcgcggtggtcagggctgaatataaaaccaatattggttacaaggcattgatggtattaacccgcataaacaatcttcctgttccttttggcgcgaccgtctcgtctttaacaaaaccagacaatcacagcagttttgttggtgatgcggggcaagcctggttaaccggactggaaaaacaagggcggttattagtgaagtggggaccaacagcagcagaccggtgtcaggtctcttatcgtataccgagctccccctccgcttctggcgtagaaatcttacacgagcaatgccagtga

SEQ ID NO: 372022 - DNA, 558 bp, Salmonella enterica
atgaatatgaacagatttgctgcattagccgccctgttaacgttcacgggtctggcattatggtcgccatcgatcagcgcggcatacaataccgcagatgccgtagacattaacgttacgggattaatttatgccgatccgtgtaccgtgacggtccccgacacgctctctcttggacaatatgcccgggcggatatcgccgtggccggcggcaataccgccaccattcctttcaccataaaaatgacgaattgcccggcaacgaccacaaaagccgcgatttcatttaacggcgtaccttatcccgatccaaattatgcttctgcgatttatgcaaacagcgcggccaatccggcgcaggatttaggattacagctttttaacctggacggtaaaagtctggtcaatctggccaacaacgtcacttacacggtggatatcaacagtaatacccatgaagccaatttgcctgtcgccgcaaggatgtataccccgtatggaaaagtcacggcaggggatttcacgtccgttgtgacgatcactattgcatggcaataa

SEQ ID NO: 372023 - DNA, 1086 bp, Salmonella enterica
atgagaaggttatatctggcgcttattctgctgttcgcgtattccggtcatagttacgcctcctgtaaacgttccggtaatgaaggcgcgatcactatcaccccgccgtcgcagcttgtggtggatagccacgcctataccgcaggcgaggtgttgtggcaatcgggctgggtttccacctccgaagtcacaatggatggctgtagtcgcgattataaggtcggatttttatatgaacccggtagcgcgcagtcaaatacatcagcgacaatcaatgcgaatgacgggaacaacacgccggtatttagcaccgggatttccggcgtgggcgttgcgattaaaacccaaacgaatgctggcccttacgataatgtcatgccaatcgataatacctaccataatggcgatggcaataaaacacaccatgcgatggctcccgcctacaatgttgaactggtcgccttaggcggtccgatcacctccggtaccgcgacattccaaagtccactggcgcgcgtatcttttcgcgatagcgcaacggaagactccggcggcgatatcctgacccatctgtatttggggaatacgcaattgattatgaaagcgatgggatgtcgggtagaaacacctgccatcaccgttgatttaggcagcgtcaatttaggcagtttcgctaacagtcaaacggcgggcacaggcgagcaggatatcttattgacctgcgaacaaggcaccgctatttccgcatcgttaagcgcccagcctgccagcggaaataaccctgataattcagtcatccagttgagcaatgcgagcgcgccaaccagcgcaaccggcgttggcgtacagttgggtattcaggcgccggacgccggtttctttaccgacagtttgccaatcaatcaaaaaattgatctctttactcacacgattaccaccaatgccgatggcagccagacggttaacggcggaaccatgaatatgtcgaccaccctgaaaattagcgcgcgctactataaaaccgccgccacggtaacggccgggcaagcgaatgccacggcaacattaaacctgacctataactaa

SEQ ID NO: 372024 - DNA, 1350 bp, Salmonella enterica
atgttgaaatcccccctgttgtggaaaatgattacgttaggcggcgccatgatcctgctgttaattcccctgatgatggtacggcacaccatcgtggagcgtgctgattatcgaagccatgtggagaatgctattcgtcagagtaccagcggcccacaaaaggttgtcggcccgctggtggcgattccggtgacagagctctataccgtgctggaagaggagaaagaggtccagtataagcgcagctatctctatttttggctgccggagtcgctattggtcgaaggcaatcaaaacgttgaagcgcgaaaaataggtatttatcaggggcaggtgtggcataccgatatggcgataaaggcggagtttgatgtggcccgtctgcatgagctgaacagaccgaacattacccttggaaagccctttatcgtcgtgggcgtcggcgatgcgcgcggtatcagcgcagtaaaagcgccgcaggtcaatggtgaaacgctcactgtagaaccggggaccggcttaccggaaagtagagagggcattcatatcccgctgccggacagtcagtgggcgacgcgcaacctgacgttggcgatgtcgctaaatttaagcggaaccggcagcttttcactggttcccgtcgggcgtagcagtgaaatgaccctgaccagcaactggccgcacccaaattttgtgggggattttcttcccggtaaacgcgaaatcagcggttcaggatttcaggcccagtggcaaaccagccggtttgccacgaatctcggcgaacagtttgctgatgcgcaaaaggtggattgggacaacttaccagcgtttagcgtcgctgtatcgacgccagccgaccagtatcaactgacggacagagcgacgaaatatgccattttgttgattacgctaacgtttatggctttctttgtcttcgaaaccctgacggggcagcggttacacccgatgcagtatctgctggtggggttatcgctggtgatgttctacctgctgttgctggcactgtcggaacatatcggtttcacgccagcctggatcgccgcaagcctggtgggcgcgttgatgaatagcgtttatttgcaggcggtgctgaaaggatggcgcaatagcgtactgtttacgttagcgttattggcgctggatggcgtgatgtggggattgctgcgttcggaagatagctcgttgcttctgggtaccggcgttctgctactggcgcttggcggcgtgatgttcctgacgcgccatctggactggtattcgctctcttgtcagcaacgtaagtcattaccgccagtaaaagatgacgaattacgtttgtggaaataa

SEQ ID NO: 372025 - DNA, 1425 bp, Salmonella enterica
atgcgcatcggaatgcgtttgctgctgggctactttcttattgtcgccgtcgccgccgtgtttgtgctgtctatctttgttcaggagataaagccgggcgtccgccgcgcgacggaagggacgctgattgacaccgcaacgctgctggcggcgctggcccgcgacgatctcctttccggcaacccgactgacggccagctggcgaaggcattcgcccaactgcaacatcgcccgtttcgcgccaatatcagcgggatcgtcaaagtgcgcaatgaataccatgtctacatgacggatgcacaggggaaggtgttgtttgattcggaaaacaaagcggtggggcaggattattctcgctggaatgacgtctggcttacgctgcgcggacagtatggcgcccgcagcacggcaaaagattctgccgatcccaatagcaccgtgatgtacgtagccgcgccgataatcagcgatggacggattatcggcgtcctgtctgtcggtaaaccgaatgcggcaatggcgccggtgattaagcgcagcgaacggcgcattctatgggccagcgccgttttactggggattgcgctggcgattggcgcggggatggtctggtggattaaccgctccatcgcccggttgacgcgctatgcggattccgtcaccgaaaaccgcccacttgcgttacctgcattaggcagcagcgagctgcgtaaactggcgcaggcgctggagagtatgcgcattaagctggaaggcaagaatgacattgagcagtacgtgtatgcgttgactcatgagctgaaaagtccgctggcggcgatacgcggcgcggcggagattctgcgtgaaggaccgcccgcggatgtggttacccgctttacagagaatatactggcgcaaaatacgcgaatgcaggcgctggtagagaccctgctgcgccaggcgcggctggaaaaccggcaggatatccctctcgcgctggttgctgttgatgaactatttacgcagcttagcgaggcgcgcagcattcagttggcggcaaaaaatatcacccttactctacggccttcctcgctggttgtcgtcgccgacgcggagcttctggcgcaggcgctgggcaatgtgttggacaatgctatcgactttacgcctgaaaatggcgttatcacattaagcgctcagccgatgggggagaaagcgatcctgcaggtgacggattccggctgtggtattcctgattttgcgctgccgcgcattttcgaccgattctattcgttgccccgtgaaaacggacgtaaaagcagcgggcttgggctggcgtttgtcagcgaggcggcgcggctcctcaacggtgaggtgacgttgtgcaaccgtcccgaaggcggcgtgctggcctcgttgacacttcaccgtcacttcacataa

SEQ ID NO: 372026 - DNA, 690 bp, Salmonella enterica
atgcagcaaccgcaggtctggttagtcgaggatgaacagggaatcgccgatacgctcatctacaccctgcaactggaagggtttaccgttgagctattcgctcgcgggctgcctgcgctggaaaaagcgcgtcagcaacggccggatgcggtgattctcgatgtgggactaccggatatcagcggctttgagctgtgtcggcagttgctggaacgccatcctgcgctgccgattcttttcctgactgcccgtagcgatgaagtggatcgattgcttggtctggagatcggcgcagatgattatgtcgccaagccattctcgccgcgcgaagtgagtgcccgcgtgcgcacgctgctgcgccgggtgaaaaagtttgctgcgccgtcgccggtggtgcgtaccggacattttgaactcaatgaaccggcggcgcagatcgcctggtttggtacgccgctctcgctgacgcgttatgagtttctgcttcttaaaaccctgctgctgtcgccggagcgcgtgtactcgcgtcagcaattgatggatattgtctggtctgatgcccaggagaccttcgatcggacggtcgatacacacatcaaaaccctgcgcgctaagctacgcgcgatcaacccggatctctcgccaattaacacgcatcgtggaatgggatacagcctgaggagcgtctga

SEQ ID NO: 372027 - DNA, 489 bp, Salmonella enterica
atgaatggtaacaatatgaaatacaagagcttagtacttttctcaattttgttgctgctggggcagagcgcccgcgcggaacaaattggttcagtcgatacggtatttaaaatgttcggtcctgaccataaaatcgtggtggaagcttttgacgatcctgatgtcaaaaacgtgacgtgctatgttagccgggcgaaaacgggcggcataaaaggcggattggggctggcggaagatacgtctgacgccgccatctcttgtcagcaggtcgggcctattgaactgagcgacaaaattaagaacggcaaggcgcagggagaagtggtgttcaaaaaacgcacctcattgatatttaagtcattgcaggtcgtgcgtttctatgatgagaaacgcaacacgctggcgtatctggcctactccgacaaagtagtcgacgggtcgccgaagaacgccatcagcgcggtgccggtcatgccgtggcgacaataa

SEQ ID NO: 372028 - DNA, 870 bp, Salmonella enterica
atggatcaggctggcataattcgcgacctgttaatctggctggaaggtcatctggatcagccgctgtcacttgacaatgtggcggcaaaagcaggctattccaagtggcacctgcagagaatgtttaaggacgtgacgggccacgccattggcgcttacatccgcgcccgtcgtttatcgaaatcagcagtggcgctgcgtttgaccgcgcgtccaattctggatattgctcttcagtaccgcttcgattctcagcaaacctttacgcgcgcctttaagaaacagttttcccagacgccagcgctgtatcgtcgctcctcggaatggagcgcctttggcattcgcccgccattacggctgggcgagtttaccgtgccggaacatcagttcgttacgctggaagatacgccgctccttggcgtcacgcagagctattcctgctcgctggaacagatttccgacttccgccacgaaatgcgcgtgcaattctggcatgatttcctcggtcattcgccaactattccgccagtgctttatgggcttaatgaaacgcgccccagcatggagaaagacgatgagcaggaagtattctataccaccgcactgccgcaagagcaggccgatggctatgttcagtcggcgcatcctgtgctgttgcagggcggtgaatacgtcatgttcacctatgaagggttaggaaccggcgtgcaggattttatcctgaccgtttacggcacctgtatgccaatgctgaatctgacccgtcgtaaagggcaggatatagagcgatactatccgtcagaagataccaaaaccggcgatcgccctatcaacctgcgctgcgaatttctgatcccgattcgtcgttaa

SEQ ID NO: 372029 - DNA, 516 bp, Salmonella enterica
atgcaccaggttatctctgcgaccaccaatcctgccaaaattcaggcaattctacaggcatttgaagagattttcggcgaaggatcgtgccatattacgcccgtcgccgtcgagagcggcgtaccggagcagcccttcggaagcgaggaaacgcgtgctggcgcacgaaatcgcgtggataatgcgcgacgcctgcatccacaagctgatttctgggtagccattgaagccggaattgacgatgacgccaccttcagttgggtggtgattgataacggcgttcagcgcggtgaagcgcgatcggccacgctgccgctgcccgccgtcattctcgacagagtccgccagggagaagcgcttggcccggtgatgtcccactataccggtattgacgagattggtcgcaaagagggcgccattggcgtatttaccgccggaaaattaacgcgctccagcgtttactaccaggcggtgatcctggcgctcagcccgtttcataacgcggtgtatcgataa

SEQ ID NO: 372030 - DNA, 327 bp, Salmonella enterica
atgacccagcgttccccttattcatcggctatcgccgaacaacgtaatcaggagtggcttcgttttgtggagttactccgtcaggcatatgcagaggatctgcatctgcctttattacaactgatgcttacgccggacgagcgtgaagcgctgggaacgcgcgtgcgcattattgaggagttgttgcgtggcgaaatgagccagcgcgagttgaaaaccgagctgggggcgggcatcgccaccatcacgcgcgggtcaaacagcctgaaatccgcgccggttgaactgcgtcattggcttgagaacgtactgctgaaaaacgcctga

SEQ ID NO: 372031 - DNA, 1938 bp, Salmonella enterica
gtggatagagccaaaccatttgtctggcgtctcgtcgccgccagcgtatgcctgctgaccttttgtcacctcgcgcgggccgactcactggaagagcagcgtaaccgctatgcgcagattaagcaggcctgggacaaccgccagatggatgtggtagagcagatgatgccgggtctgaaagattatccgctctacccgtatctggaataccgtaagatcaccgacgatttgatgaaccaaccggcgattgccgtcacgcagtttgtgcgcgccaatcctacgcttccgcctgcgcgtacgctgcaatcacgcttcgtcaatgagctggcgcgtcgtgaagactggcgcggcttgctggcgtttagcccggagaaacccggcaccacggaagcgcaatgtaactattactacgcgaaatggagtaccgggcaaacggaagcggcctggcagggcgcgaaagacctttggctgaccggcaaaagtcagccgaatgcctgcgataaactgttcagcgtctggcgggcctccggcaagcaagacccgctggcgtacctggaacgtattcggttggcgatgaaagccggaaatacgggtctggttacggtgctggccggacagatgccggcggaatatcaaacgatcgcctcagcgatcattaccctcgctaatgaccctaataacgtgttgaccttcgcacgcaccaccggcgccaccgattttacccgccagatggcggaagtcgcgtttgccagcgtcgcccgccaggacgcggaaaatgcgcgtctgatgatcccctcgctggtacaggcgcagaaacttaatgaggaacaaacgcaggcgctgcgcgatatcgttgcctggcgactgatgggcaacgatgtgaccgatgcgcaagcgaaatggcgcgatgacgcgattatgcgctcgcaatcgacgtcgcttatcgagcggcgcgtgcgtatggcgctggggatgggcgatcgtcgcggtctcaatacctggcttgcccgactgccaatggaggcgaaagagaaagacgagtggcgttactggcaggcggatttattgctggagcgcggtcgtgacgccgaagcgaaagagatccttcatgctttaatgcagaagcgcggtttttatccgatggtcgcggcgcagcgtttaggcgaagagtacacgcttaaaatcgataaagcgcccgccaacgtaaacagcgcgttgacgcaggggccggagatggcgcgtgtacgggagctgatgtactggaacctggataacacggcgcgcagcgaatgggcgaatctggtaaaaagccgtagtaaatctgaacaggcgcagctggcgcgctatgcgtttaaccagcactggtgggatctgagcgtacaggcgacgatcgccggaaaactgtgggatcatctggaggagcgtttcccgctggcgtataacgatctttttacccgctatacccgcggaaaagatatctcacaaagctatgccatggcgattgcccgccaggagagcgcctggaacccgaaagtaaaatcgccggtaggggccagcggcttaatgcagattatgccgggaacggccacccatacggtgaaaatgttttcgattccggactaccgcggccccggccaactgctggagccggagaccaacatcaacattggcaccagctatttgcagtatgtctatcagcagtttggtaataaccgtattttcgcctcggcggcgtataacgccgggccggggcgcgtgcgcacctggcttggcaatagcgccgggcgtatcgatgccgtagcgtttgtcgaaagcattcccttttcggaaacgcgcggctacgtgaaaaacgttctggcctatgacgcttactatcgccactttatggggcagaaagaggccttaatgagcgactctgagtggcagcgacggtattaa

SEQ ID NO: 372032 - DNA, 1668 bp, Salmonella enterica
gtggctcaattcgtttataccatgcatcgtgtcggcaaagtggttccgccgaaacgtcatattctgaaaaacatctcgctgagcttcttccctggcgccaaaatcggcgtgctgggccttaacggcgccggtaagtctaccctgctgcgcatcatggcgggtctcgataaagatatcgagggcgaagcgcgcccgcagcccggcattaagattggctacctgccgcaggaacctcagctaaacccggaacacacggtacgcgagtcgattgaagaggccgtttcggaagtggttaacgccctcaaacgtctggatgaagtgtacgcgctgtacgccgatccggatgccgacttcgacaagctggccgcagagcagggccggcttgaagagattatccaggcgcacgacggtcataatctgaacgtgcagcttgagcgcgctgctgacgctctgcgtctgccggactgggatgccaaagtcgaaaaactgtccggcggcgagcgccgtcgcgtggcgctgtgccgtctgttgctggaaaagccggacatgctgctgctcgacgaacccaccaaccacctggatgccgaatctgttgcgtggctggaacgtttcctgcacgacttcgaaggtaccgtcgtggcgattacccacgaccgttacttcctcgataacgtcgccggctggattctggaacttgaccgcggcgaaggtattccgtgggaaggcaactactcctcctggctggagcagaaagatcagcgtctggcgcaggaagcgtctgccgaagcggcgcgccgtaaatccattgagaaagagctggagtgggtgcgtcagggcgcgaaaggccgtcagtcgaaaggtaaggcgcgtctggctcgctttgaagaactgaacagcgttgagtatcagaaacgtaacgaaaccaacgaactgtttattccaccaggaccgcgtctgggcgacaaagtcattgaagtcagcaacctgcgtaaatcctacggcgaccgcgtactgatcgatgacctgagcttctcggtaccgaaaggcgctatcgtcgggatcatcgggccaaacggcgcgggtaaatcgaccctgttccgcatgatgtccggtcaggagcagcctgatagcggcaccattacgctgggtgaaaccgtcaagctggcctcggtcgatcagttccgcgacgcgatggacaacagcaaaaccgtctgggaagaagtgtccggcgggctggatatcatgaagatcggcaacactgaaatgccaagccgcgcctatgtaggccgcttcaacttcaaaggcgtcgatcagggcaaacgcgttggcgaactgtccggcggtgagcgcggtcgtttgcatctggcgaagctgctgcaggtgggcggtaacgtcctgctgctcgacgaaccgacgaacgacctggatatcgaaaccctgcgcgcgctggaaaacgccctgctggagttccctggctgcgcgatggttatctcgcacgaccgttggttccttgaccgtatcgccacccacattctggattatcaggatgaaggtaaggtggaattcttcgaaggcaactttaccgaatacgaagagtacaagaaacgcacgctgggcgccgaggcgctggagccgaagcgtatcaagtacaagcgtattgccaaataa

SEQ ID NO: 372033 - DNA, 1233 bp, Salmonella enterica
gtgtcatcgttcgactatctcaaaaccgcgattaagcagcaaggttgcactctgcaacaggtggctgacgccagcggtatgaccaaggggtatctgagtcagttacttaacgccaaaatcaaaagccccagcgcgcaaaaactggaggcgctacaccgttttctcgggctggagtttccccgccgacagaaaaacattggcgtggtgttcggtaaattttatccattgcataccggacacatctacttgatccagcgcgcctgtagccaggtggatgagttgcatatcattatgggatatgacgatacgcgcgaccgcgggctgtttgaggatagcgccatgtcgcagcagcccaccgtgtcggatcgcctgcgctggttgctgcaaaccttcaaataccaaaaaaatattcgcatccacgcctttaatgaagaggggatggagccttatccgcatggctgggacgtctggagcaacggcattaaagcgtttatggcagagaagggaatacagccgagctggatctacacttccgaagaggctgatgcgccgcagtatcttgagcatttagggattgagacggtgctggtcgatcctgaacgcacgtttatgaatatcagcggggcgcaaatccgcgaaaatccgtttcgttactgggaatatattcctacagaagtgaagccgtttttcgtgcgtaccgtcgcgattctgggcggggaatcaagcggcaagtctacgctggtcaataagctcgccaatatttttaataccaccagcgcctgggaatatggccgcgactatgttttttcgcatctgggcggcgatgagatggcgttacagtattccgactacgataaaattgcgctgggccatgcgcaatatattgatttcgcagtgaaatatgcgaataaagtggcgtttatcgataccgatttcgtcaccacccaggcattttgcaaaaaatacgaagggcgcgagcatccctttgtccaggcgctgatcgacgagtatcgcttcgacctggtgattttgctggagaataatacgccgtgggtagctgacggactgcgaagcctgggcagttcagtggatcgtaaagcgttccagagcctattggtcgagatgctgaaagagaacaacattgagttcgttcacgttaaagaggctgattacgatggccgctttttgcgctgtgtggaactggtgaaagagatgatgggcgagcagggataa

SEQ ID NO: 372034 - DNA, 1383 bp, Salmonella enterica
gtggcaaaagctcccaaacgcgcctttgtttgtaatgaatgcggggccgattacccgcgctggcaggggcaatgcagcgcctgccatgcctggaacaccattaccgaggtgcgccttgccgcgtcgccgacggtggcgcgtaacgaacgtctgagcggatacgccggcagtgcgggcgtatcaaaagtgcagaaactgtctgacatcagtcttgaggaactgccgcgcttttctaccggttttaaagagtttgaccgcgtgctgggcggcggggtggtacccggcagcgccattttgattggcggtaaccccggcgcgggcaaatcaacgttgctgctgcaaacgctgtgcaagctcgccgagcagatgaaagcactgtacgtcaccggcgaagagtcgctacagcaggtggcgatgcgcgcgcaccgtctcggcctgccgaccgctaatctgaatatgctctccgaaaccagcatcgagcagatctgcctgatagcggaagaagaacagccgaaactgatggtgatcgactccatacaggtgatgcatatggcggacatccagtcgtcgccaggcagcgtcgcccaggtccgcgaaacggcagcctacctgacgcgcttcgccaaaacgcgcggcgtggcgatcgtgatggtcggccacgtcaccaaagacgggtcgctggccgggccgaaagtgctggaacactgtatcgattgctcagtattgctcgacggcgacgccgattctcgttttcgcacgctgcgcagccacaaaaaccgctttggcgcagtcaatgagctgggcgtcttcgccatgaccgaacaggggttgcgcgaagtgagcaatccgtccgccatctttttaagccgcggcgatgaggtcacttccggcagttcagtgatggtcgtctgggaaggcacgcgaccgttgctggtggagattcaggcgctggtcgatcactcgatgatggcgaaccccagacgcgtggcggtcggtctggaacaaaaccgtctggctatcctgctggcggtgctgcaccgacacggcggtctacaaatgtcggatcaggacgtcttcgtcaacgtggtcggcggcgtgaaagtcaccgaaaccagcgcggatctggctttactgctggcgatggtctccagcctgcgtgacaggccgttgccgcaggatctggtggtgtttggcgaagtggggctggcaggcgagattcgtccggtgccgagcgggcaggagcgtatttccgaggcggcgaaacacggttttcgtcgggcgattgtgcctgccgccaacgtaccgaaaaagccgccggaaggaatgcaggtgttcggtgttaaaaagctcgcagatgcgttaagcgtgtttgacgacttataa

SEQ ID NO: 372035 - DNA, 969 bp, Salmonella enterica
atgcctaacattacctggtgcgatctgcctgaagatgtctctttatggcctggtttgcctctttctttaagcggcgacgaggtgatgcctctggattaccatgcaggccgcagcggttggctgctgtatgggcgcgggctggataagcagcgtttaactcaatatcagaccaaactgggcgccgcaatggtgattgtcgccgcctggtgcgtggaggattatcaggtcattcgtctggcggggtcgctgacgccgcgtgcgacgcggctggcgcatgaggcgcagctggatgttgcgccgctgggtaaaattccgcatctgcgcacgccggggctgctggtcatggatatggattccacggcgatccagattgagtgtatcgatgaaatcgcgaagctggccggtaccggtgagaaggtggctgaagtgacggagcgcgcgatgcgcggcgagcttgattttaccgccagcctgcgcagccgcgtggcgacgctgaaaggcgcggatgccgatattttgcgccaggtgcgcgggaatctgccgctaatgccaggattaacgcagttggtgctaaaactggaagcgctcggctggaaaatcgctatcgcctccggcggcttcactttcttcgccgactatctgcgtgaccagctacgcctgacggcggcggtcgccaatgagctggagatcatggacggtaaatttaccggtcacgttatcggcgatattgtggatgctgagtataaagccaataccttgcttcgtctggcgcaagagcatgacatcccgctggcgcagacggtggcgattggcgacggcgctaacgatctgccaatgatcaaagcggcagggttaggtattgccttccatgccaagccaaaagtaaacgaaaagacggagattacgatccgccacgctgacctgatgggcgtgttttgcattctctccggcagcatgaaccagaaatga

SEQ ID NO: 372036 - DNA, 645 bp, Salmonella enterica
atggctcgcgcaaaactgaaatttcggctgcatcgtgcagtcattgtattgttctgtctcacactgctcgtcgcgctcatgcagggcgcttcatggtttagtcaaaaccaccagcgacagcgcaatccgcagttggaagagctggcccgcacgctagcgcgccaggtgacgctcaacatcgccccgctgatgcgcagcgaaacaccggatgaaaatcgcatcaacgccgtgctgcgtcagctcacgcaagagagccgtattctggatgccggcgtctatgatgaacagggcgatcttattactcgcgctggcgaaagcgtcaacgtgcgcgacaggctggcgctggatggcaaaaaagcgggcagctattttaaccaacaaattgtcgagcctatccaggggaaaaacggcccattgggctacctgcgtctgacgctggatacccacacgctggccaccgaagcaaagcaggtcgataacaccaccaacattctacgcctgatgctgctactctcgctggcgataggcgtggtgctgacgcgcaccttgctacaaggtaaacgcacccgctggcagcagtcgcccttcctgctaacggccagcaagcctgttccggaagaggaagagcgtgaggaaaaagagtaa

SEQ ID NO: 372037 - DNA, 1017 bp, Salmonella enterica
atgacaacattacgcctgcttatttctgactcttacgatccctggtttaacctggcggtcgaggagtgcattttccgccagatgcccgccacccagcgcgtgctgttcctgtggcgcaacgcggatacggtggtcattggacgcgcgcaaaacccgtggaaagagtgtaatacgcggcgtatggaagaagataatgtccgtctggcccgccgtagcagcggcggcggcgcggtattccatgacctcggtaatacctgttttacctttatggccggtaaaccggaatacgataaaaccatctccacccatattgtgctcgcggcgctgaattcgctgggggtcatggccgatgcttcgggacgcaacgatctggtcgtaaaaacgccggacggcgatcgcaaagtctccggttcagcctatcgcgaaaccaaagatcgcggcttccatcacggtacgctgctgctgaatgcagacctcagccgtctggcaaactatctgaatcccgataaaaagaagcttgcggcgaaaggaatcacctccgttcgctcccgcgtggccaatcttaccgagctattaccgggtatcacccatgaacaggtctgccaggcggtgacggaagcctttttcgcccattacggcgaacgcgtcgacgcggaagtgatttcaccggataaaacgccggatctgccgaattttgccgaaacctttgcgcgccagagcagttgggagtggaatttcggccaggcaccggcgttcagccatctactggacgaacgtttcacctggggcggcgtcgagctgcattttgacgtcgagaaaggtgtgattacccgtgcgcaggtgtttaccgatagcctgaacccggcaccgctggaagccttaggcgagcgtttacaaggctgccagtatcgagtggatgtgttggagcaggcctgcgaatctttaattgctgaattcccggctcagaaaggtgagctgcgggaactggctgcgtggatggctcaagctgtacgctaa

SEQ ID NO: 372038 - DNA, 1329 bp, Salmonella enterica
atgagcgcattaaccgatttgctcttacaggggccgagttccgccgctgaattaagatcatcgctggccgttagtcaggcgacgttctctcgtctggtttccgcgcatcaggacgtcatccagtttggtaaagctcgtgctacgcgctacgcgcttgttcggcctgttcgcggcgtcgcggcctttcccctctggcaggtcaatgcacaaggacaggccgctaagtttggcgttctttatccgtgttggcctcaggggagttgcctggttgcgcttgatacaggtgaatggcaatggtttgacagcctgccatggtatctgaccgatcttaggccacaaggattccttgggcgagcctggggaaggaccgtggctgggtatgcgcatctgcctgatgacatccggttgtggcaagaggatgaagtcctgtatgcgctgcgggcgtatcagggtgaaaatgcgggcggctggatcgtgggtgaggagaattaccagcgttgggtgaccgcgccggatgcgacggcgattacgcagtccgaaaaactcaatcgctatcagcaattggcggaagacgcgctcgcaggtgaggtcatcggctcttcagctggtggtgagcagcctaaatttgcctgttttgcagaaacaagatggggcaatcagaacgtactggtgaaattcagcgcgcgtgcaaggaacaccgtttctgaacgctggagcgacctcttgattgccgagtccatcgcattagccgtgctttctgccgccagcatcaacgccagcttagccacggctatttgcagcgagggaggacaggtctttctggaaagcattcgcttcgactgcaccgggatacgtggtcgtcggcaaattgtttccctggaggcgttgcaaggcgagtatgcatcttcgccaggcatctggccggtggtcacgcatcggcttgccgggcagggcattatagatgctgttgcccatcagcaaattgagaaaatttgggcgtttggtcggcttatcgccaacagcgatatgcatgcgggtaacctctcgttttattactccgatgccccgatggcgctcgcgcctgtctatgatatgttgccgatggcttacgctccggcggcatcgggcatgttgcgctacgcgcctgtcgacattcgtgtggaggccacaatcgataagaaagcgtgggaatttgccttgccgttggccgagcgcttttgggtgctggtcgctgatgataaacgcatcagcgcgggctttcaggagattgcccgcgcgatggtgggaaaattgaagttagccgcgcagaccatcgggcggctggcgtag

SEQ ID NO: 372039 - DNA, 720 bp, Salmonella enterica
atggcaactccacatattaatgcagaaatgggtgatttcgctgacgtcgtattgatgccgggcgacccgctgcgtgcgaagcacattgctgagactttcctcgaagatgttcgcgaagtgaacaacgttcgcggcatgttaggtttcaccgggacttacaaaggacgtaagatctccgtgatgggccacggtatgggtatcccgtcctgctccatctacaccaaagagctgatcaccgatttcggcgtgaagaaaatcattcgcgtcggctcctgcggcgctgtgcgcatggacgtcaaactgcgcgacgtggtgatcggtatgggtgcctgcaccgactccaaagtgaaccgtatccgctttaaagatcatgactttgcggctatcgctgacttcgacatggtacgtaacgcagttgatgcggcaaaagcgctgggcgttgacgcgcgcgtaggcaacctgttctccgctgacctgttctactctccggacggcgaaatgttcgacgtgatggaaaaatacggcgtactgggcgtagagatggaagcggcgggtatctacggcgttgcggctgaatttggcgcgaaagcgctgactatctgcaccgtgtccgaccatatccgtacccacgagcagaccactgccgctgagcgacagacgaccttcaacgacatgatcaaaatcgcgctggaatctgtgctgctgggcgaccaggagtaa

SEQ ID NO: 372040 - DNA, 1224 bp, Salmonella enterica
atgaaacgtgcatttattatggtgctggactcattcggcatcggcgctactgaagacgcggatcgttttggcgacgtaggttccgacactctgggccacatcgcagaagcttgcgccaaaggcgaagctgacaatggccgtaaaggcccgttgaatctgcctaacctgactcgtctggggctggtgaaagcgcatgaaggctctaccggtaaaattgccgccggcatggacggcaacgcggacgttattggcgcatacgcatgggcgcacgaactgtcctccggcaaagatacgccgtcaggccactgggaaatcgccggtgtgccggtactgttcgactggggctatttcagcgaccacgaaaacagcttcccgcaggaactgctggataagctggtgaaacgcgccaacctgccgggctatctcggtaactgccactcttccggcaccgttattctggaccagctcggcgaagagcacatgaaaaccggcaagccgattttctacacctccgctgactccgtgttccagattgcctgccacgaagagacctttggcctggataaactctacgagctgtgcgaaatcgcccgtgaagagctgaccgaaggcggctataacattggccgcgtgatcgcgcgtccgtttatcggcgacaaggccggtaacttccagcgtaccggtaaccgtcacgacctggccgttgaaccgccagcgccgaccgtgctgcagaaactggtcgatgaaaaacagggccacgtggtgtccgtcggtaagattgccgacatctacgccaactgcggcatcactaagaaagtgaaagcgaccggtctggacgcgctgttcgacgcgaccctcaaagagatgaaagaagcgggcgataaaaccatcgttttcactaacttcgttgacttcgactcttcctggggccaccgtcgcgacatcgcgggctacgccgcaggtctggagctgtttgaccgccgtctgccggagctgatggagctggtgggtgaagatgacattctgatcctgaccgctgaccacggctgtgacccgagctggaccggtactgaccatacccgtgagcacattccggtgctgatctacggtccgaaagtcaaaccgggctctttaggtcaccgtgaaaccttcgcggatatcggccagacgctggcgacctactttggcacatcgccgatggactacggtaaaaacatgctgtga

SEQ ID NO: 372041 - DNA, 1323 bp, Salmonella enterica
gtgtttctcgcacaagaaattattcgtaaaaagcgtgatggtcatgcgttgagtgacgaagaaattcgtttctttattaatggtattcgtgacaatactatctctgaagggcagattgccgccctggcgatgaccatcttcttccacgatatgaccatgccggagcgtgtttcgctgaccatggcgatgcgggattccggtactgtccttgactggaaaagcctgaatctcaatggcccgattgtcgataagcattcgaccggcggcgtaggggacgtgacgtctctgatgttggggccaatggtagcggcctgcggcggttatgtgccgatgatctccggtcgcggtctcggacataccggcggtacgctcgacaaactggaagcgatcccgggcttcgacatcttcccggacgacaaccgtttccgcgaaattattcaagacgtgggtgtggcgattattgggcaaaccagctcgcttgcaccggcggacaaacgtttttacgccacccgcgatattaccgcgacggtggactctattccgctgatcactggttccatcctcgccaagaaactggccgaagggctggatgcgctggtaatggacgtcaaagtcggcagtggcgcgtttatgccaacctatgaactttctgaagcccttgctgaagcgattgttggcgtggcaaacggcgcgggagttcgcactacggctttgttaaccgatatgaaccaggtgctggcttcgagcgccggtaacgcggtggaagtgcgtgaagccgtgcagttcctgaccggagaataccgcaatccgcgcttgtttgacgttaccatggcgctatgcgtggagatgctgatctccggccagctggcgaaagacgacgccgaagcgcgtgcgaaattacaggcggtgctggataacggtaaagcggcagaagtctttggtcgtatggtggccgcgcagaaagggccaagcgatttcgttgagaactacgataaatacttgccgaccgccatgttgagcaaagcggtatatgctgataccgaagggtttatcagcgcaatggatacgcgtgcgctggggatggcggtcgtctcgatgggcggcggccgtcgtcaggcgtcagataccattgattacagcgttggctttaccgacatggcccgtctgggcgacagcatcgacgggcagcgcccgctggcggtgattcatgccaaagacgaagccagttggcaggaagcggcgaaggccgtcaaagcggcaattatccttgacgataaagcgccagcaagcacaccttcggtctatcgtcgaattactgaatag

SEQ ID NO: 372042 - DNA, 780 bp, Salmonella enterica
atgactgatttaaaagcaagcagcctgcgtgcgctcaaactgatggatctgaccactctgaacgatgacgacaccaatgaaaaagtgatcgcgttgtgtcatcaggcaaaaactccggtcgggaatacggcggcgatttgtatttacccgcgttttatcccgattgcgcgtaaaactctgaaagaacaaggtacgccggacatccgcattgcaacggtgactaacttcccgcatggcaatgatgacatcgatattgcgctggcggaaacccgtgcggcgatcgcctacggcgctgacgaagtggacgtggtattcccgtaccgcgcgttgatcgccggtaacgagcaggtgggttttgacctggtaaaagcctgtaaagacgcttgtgccgcagcgaacgtattgctgaaagtgatcatcgaaactggcgagctgaaagaagaggcgctgattcgtaaagcctctgaaatctccattaaagccggtgcggatttcatcaaaacctctaccggtaaagtgccggtaaacgctacgccggaaagcgcgcgcatcatgatggaagtgatccgcgacatgggcgtttccaaaaccgttggcttcaaaccggcgggcggcgtacgtacggcggaagacgcgcagaaattcctcgcgattgcagacgaactgtttggcgctgactgggcagattctcgtcactaccgctttggcgcatccagcctgctggcaagcctgctgaaagcgctgggtcacggcgacggtaagagcgccagcagctactaa

SEQ ID NO: 372043 - DNA, 1551 bp, Salmonella enterica
atgcctgcctcatgcgaaactgcgctccagcagcgttgccagcaaattgtgaccagcccggtgctcacgcctgaacaaaaacgccattttctggcgctggaagctgaaaacgccctgccttatccccccctgccggaagatgcccgccaggcgctggatgaaggtgtcatttgcgatatgtttgaggggcacgcccccttcaaaccgcgctacgtgttgcccgattacgcccgatttctggctaacggttcacagtggctggaactggaaggcgcgaaagatctggatgatgcgttatccctactcaccattctgtatcatcacgttccttccgtgacgtccatgccggtttatctcggccagcttgatgcgttgctgcaaccatatgttagaattctaacacaagatgcgatcgatattcgaataaaacgtttctggcgttatctcgacagaacgctgccagacgcctttatgcatgccaatattggccctgccgatacgcctgtcacacgagcgattttgcgcgctgatgccgagctaaagcaggtgacgcctaacctgacgtttatctacgatgcggaaattacgccggacgatctgctgctggaggtcgccaaaaacatttgcgaatgcagtaagccacacatttccaacggccctgtaaatgataaaattttcacaaaagggcattatggcatcgtcagttgttataactcgctaccgcttggcggcggcggcagtacgctggtacgtctcaacctgaaagccgtggcagaacgcagtacgtctgtcgatgacttcttttcacgcacgctaccgcactactgccgacagcagatcgccatcattaattcacgatgtgaattcctctatgaaaagtcacatttctttgagaatagctttcttgtacaggaaggtttgatcgatcccgaacgttttgcgccgatgttcggtatgtacgggctggcggaagccgtgaatctgctgtgcgaaaacgcgggcctgaacgcccgttacggcaagaatgaaacggcgaacgagctgggctaccgtatcagcgcccaactggcggatttcgtcgaaaatacgccagtgaagtatggctggaagcaacgggcgctgctccatgcccagtctggcatcagttccgatatcggcactacgccgggcgcgcgtctgccgtatggcgatgaaccggaccctatcacccatttgcaaaccgtcgcgccgcaccatgccttttaccatgccgggatcagcgacattctgacgctggacgaaaccatcaagcgtaatccgcaggcgctggttcagctttgtcttggcgcgttcaaagccgggatgcgggaatttactgccaatgtcagcggcaacgatctggtgcgcgtcaccggttatatggtgcgcctgtcggatctggcgaaatttcgcgccgaaggctcgcgcacgaataccacctggctgggagaagaagccgcacgtaatacccgcatcctggaacgacagccacgcgtagtcagccatgaacaacagatgcgctttagtcagtaa

SEQ ID NO: 372044 - DNA, 588 bp, Salmonella enterica
atggcgcagaccatgagcgttgacgatgtgctgcgtcatattcgtaaagcatcgctgtttattgaaggtattaccgtcagcggcggagaggcgaccacgcaattaccgtttattgtggcgctatttacggcgatcaaagccgatccgcagttacaacggctgacctgtctggtggacagtaatggtcagttaagcgagaccggctggcaaaaactactgccggtttgcgacggcgtaatgctcgatctgaaagcctggaagagcgagtgtcatcaccgtctgaccggacgtgataacacgcatattaagcacagtatccgctttcttgctgcgcggggaaaactggcggagctgcggttgctggttatcccgaatcaggtggactatgcggcgcatattgattcactggcggcgtttattacttcgctgggcgaggttccggtgcgtttgaatgcctttcatgcgcatggcgtctatggcgaagcgaaggcctggccaggcgcgacgccgcaagaggtggaacggctggctgacggattgcgcgcgcgtggggtggcgaagctgattttgccggcgctatatttgtaa

SEQ ID NO: 372045 - DNA, 774 bp, Salmonella enterica
gtgagctggcgctttatcgatacgcattgccattttgatttcccgccctttacgggcgatgagcgcgccagtattcagcgtgcctgtgaggcgggcgttgaaaaaatcatcgtgccggcgaccgaggcggctcactttccccgcgtgctggcgctggcggcgcgtttcccgtcgctttatgctgcgctgggattataccccattgtgattgagcgtcatgccgatgacgatcctgataagctgcaacaagcgctggcgcaacaacagaacgtcgtggcggtaggcgagatcgggctcgatctttatcgcgacgatccgcagtttgccaggcaagagcgatttttagacgtgcaactgcaactggcaaaacgctacgatctgccggtgatcctgcactcgcggcgcacgcatgacaaactggcgatgcacttaaagcgccaggatctgccgcgaaccggtgtggtgcatggttttgccggcagtctgcagcaggccgaacgctttgtgcgactgggctataaaatcggcgtcggcggcaccatcacctacccgcgcgccagtaaaacccgtgatgttatggcgcggttgccgctggacgcgctgttgctggagaccgatgcgccggatatgccgctaaaggggtttcaggggcagccgaaccgcccggagcaggcggcgcgcgtatttgatgcgctctgcgaattacgtccggagcccgcagaggtgatagccgatacgctgtatcgcaataccattaccttgtttcggctctga

SEQ ID NO: 372046 - DNA, 1095 bp, Salmonella enterica
atgaaaaataggaaggcagaggtgggccagcgaataccggttacgctcggcaatattgcgccgttatcattaacaccgttccggccaggccgtatggcgctggtctgtgagggcggggggcagcggggtatctttaccgcaggcgtgctggatgagtttatgcgtgcgcagtttaatcctttccatctctacttcggcacatcagccggtgcgcaaaatctctcggcgtatctctgcaaccagcccggctacgggcgtaaagtcattatgcgctataccaccaggcgcgaattttttgatccgctgcgatttgtacgcggaggaaaccttatcgacctcgactggctggtggaatccaccgccgcccggatgccgctgcaaatggataccgcagcgcgcctgtttgacagcggaaaatccttttatatgtgcgcctgccggggggatgattacacgccgggctatttctcgccgacaaaacaaaactggcttgatatcattcgcgcctccagcgccataccgggtttctaccgtaccggcgttacgttagagggcatcaactatctggacggtggcattagcgacgccattccggttcaggaggcggcaaagcggggggcgaaaaccattgtggtgatccgcaccgtaccctcgcaaatgtattacacgccgcagtggtttaagcgtatggagcgctggctgggagagagcagtctacagccgttggtcaacctggtgcagcatcatgaaacgtcctacagcgcgatccaacaatttattgaaaagccgccgggtaagctgcggatcattgaaatttatccgccgaaaccgctgcacagcatggcgctgggcagccgtatcccggcgctgcgtgaggattacaaaaccgggcaattatgcgggcgttatttccttgccaccgttggtaaattgctcgccgcaacgccgcctctcttgcgccattcgtcgcggattgccgtgccggaaacggtggtcgtgcctccggcgccggtggccaatgatacgcatgtggcggaggtcattagcgcgccgcaggcaaacgacaccacatttaccgacgaggatctggcgtga

SEQ ID NO: 372047 - DNA, 162 bp, Salmonella enterica
atgtttcgttggggcattatatttctggttatcgcgttaattgccgccgcattgggttttggtggactggctggtacggctgccggcgcggcgaaaatcgtcttcgtcgtcgggatcgtgctcttcctggtcagcctgttcatgggccgtaaacgaccctag

SEQ ID NO: 372048 - DNA, 618 bp, Salmonella enterica
atgactatgacaagactgaagatttctaaaactctgctggccgtaatgttgacctctgctgttgcgacaggttctgcctttgcagaaaacgcaacaacggacaaggcgcaaagcggaaccgaaaccgcagggcaaaaagtcgatagctctatgaataaagtcggtaacttcatggatgacagcgccatcactgcgaaagtaaaagctgcgctggtagaccatgacaatattaaaagcaccgatatttctgtcgaaaccaatcagaaagtcgtcaccctgagcggctttgtagaaagccaggcgcaggctgaagccgccgtgaaagtggcgaaaggcgtagaaggcgtgacctccgttagcgacaaacttcacgttcgcgacaataaagaaggttccgtgaaaggctatgccggcgatacggccacgaccagtgaagtcaaagccaagttgctggcggacgatcttgtcccttcccgtaaagtgaaagtagaaacgaccgatggcgtcgtacagctctccggtaccgttgaaactcaggaacaaagcgaccgcgctgaaagcatcgcgaaagccgttgatggcgtaaaaagtgttaaaaacgatctgaaagttcagtaa

SEQ ID NO: 372049 - DNA, 1590 bp, Salmonella enterica
atgacgttgtctccttatttgcaagaggtggccaaacgccgcacttttgccattatttctcacccggacgccggtaaaaccaccattaccgaaaaagtgttgctgttcggacaggcgattcagaccgccggtacggtaaaaggccgtggctccagccaacatgcaaaatctgactggatggagatggaaaaacagcgtggtatctccatcaccacctcggtgatgcagttcccatatcacgactgtctggtgaacctgctggacaccccggggcacgaagacttctccgaagatacctaccgtaccctgacggcggtggactgctgtctgatggtgatcgacgccgcaaaaggcgttgaagacaggactcgtaagctgatggaagttacccgtctgcgcgatacgccgatcctgacctttatgaacaaactcgaccgtgacatccgcgacccgatggagctgctggatgaagtggaaaatgagctgaaaatcggctgcgcgccgatcacctggccgattggctgcggcaagctgtttaagggcgtttatcacctttataaagatgaaacttatctgtatcagaccggtaagggccacaccattcaggaagtgcgcatcgttaaagggctgaataacccggatctggacgccgccgtcggtgaagacctggcgcaacagctgcgcgacgagctggaactggtgcagggcgcgtctaacgagtttgatgaagagctgttcctggcaggggaaattaccccggtatttttcggtaccgcgctgggtaactttggcgttgaccatatgctggatggtttagtggcgtgggcgcccgcgccgatgccgcgtcaaaccgatacccgcacagtggaagcctcggaagagaaattcaccggttttgtctttaaaattcaggccaatatggacccgaaacaccgcgaccgcgtggcgtttatgcgcgtggtttccggtaagtatgagaagggcatgaagttacgccaggtccgtaccggcaaagatgtggtgatttccgacgcgttaacatttatggcgggcgatcgttcgcacgttgaagaagcgtacccgggcgatattttgggtctgcataaccacggcaccattcagatcggcgataccttcacccagggcgagatgatgaagtttaccggtatcccgaactttgcgccggaactgttccgtcgtattcgcctgaaagatccgctcaagcagaagcagctactgaaagggctggtgcagctttctgaagagggggcggttcaggtattccgtcccatctccaacaacgatctgattgtcggcgccgtgggcgttttgcagtttgacgttgttgtcgcgcgcctgaaaagcgaatacaacgttgaggcgatttatgaatccgtcaacgtggcgacggcgcgctgggtggaaagcgccgatgcgaagaaattcgaagagtttaagcgtaagaatgaaacgcagctggcgctggatggcggcgacaacctcacctatatcgcccccacgatggttaacctgaacctgacccaggaacgttaccctgacgttcagttccgtaaaacgcgcgaacactga

SEQ ID NO: 372050 - DNA, 681 bp, Salmonella enterica
atgatgaagtgggactggattttctttgatgccgatgaaacgctgtttacgtttgattctttcaccggcttacagcggatgttccttgactatagcgtcacctttaccgctgaggatttccaggattaccaggccgtgaataagccgctatgggtagattatcagaacggcgcgattacctcattacaattgcagcacgcgcgttttcaaagttgggctgaacggctaaacgttgcgccggggctgctgaatgacgcttttattagtgcgatggcggagatctgttctcctttgccgggcgccgtttcgctacttaatgcgattcgcgggcaggctaaaatcggtattattactaacggttttaccgcgctacaacaaactcgtctggagcgcaccgggctgcgcgagtatttcgatctgctggtgatttccgagcaggttggcgtcgcgaagcccgatccgaaaatctttaactacgccctggagcaggcggggaatcctgaccgctcgcgcgtattaatggttggcgataccgcggaatccgatattcttggcggcattaacgccgggctgtcgacctgctggcttaacgcgcatcatcgcgagcagcccgcgggtattcatccaacctggactgtggcgtcattaagcgaactggagcagctcctgtgtaaacactga

SEQ ID NO: 372051 - DNA, 447 bp, Salmonella enterica
atgaacacgatttctatcctcagcacgaccgatctccccgcagcctggcagattgagcaacgcgctcatgcgtttccgtggagcgaaaaaacgtttttcggcaacctgggtgaacggtatctcaaccttaagctgaccgctgatgacagaatggccgcgtttgccattacacaggtggtgctggacgaagcgacgctgttcaatattgccgtcgatccggattttcagcgtcgggggctggggcgtatgctgcttgagcatctgattgatgaactggaaaaacgtggggttgtaacgctatggctggaggtacgcgcctctaacgctgccgccatcgcgctgtatgaaagtctggggtttaacgaggcgacgattcgccgcaattactatcccacggcacaagggcatgaggacgccatcatcatggcgttaccgataagcatgtaa

SEQ ID NO: 372052 - DNA, 438 bp, Salmonella enterica
atgacatcccgacgagactggcagttacagcaactgggtattacgcagtgggcgctgcgacgtcctggcgcgctacagggcgagattgcgatttcccttcccgcgcacgttcgtctgatcgtggttgcagaggaattacccgcgctgaacgagccgctaatgcgcgatattttacgcgcgttgaccgtgagtcccgatcaggttttacccctggcgcctgagcgcgtcgccatgctgccgcagggcagccgttgtaatagctggcggttaggaactgacgcgccgctccaactcgaaggcgctcaggtcacgacgccggcgtttaatgaactccgggcaaacccggcggcacgcgccgcactatggcaacaaatctgcgaacatgaacacgatttctatcctcagcacgaccgatctccccgcagcctggcagattga

SEQ ID NO: 372053 - DNA, 1029 bp, Salmonella enterica
atgtctgcttttaccccggcaagtgaagtcttgctgcgccacagtgatgatttcgaacaaagccgtattctttttgccggagatttgcaggatgacctgcccgcgcgctttgaatgcgccgccagccgcgcgcatacgcaacagtttcaccactggcaggtattaagccgccagatgggcgataacgtccgttttagcctggtcgcgcaagccagcgatgtcgccgactgcgatacgctgatctactactggccgaaaaataaacccgaagcgcagttccagttgatgaatattttgtcgctgatgccgtcgggcgtcgatgttttcgtcgtgggagaaaaccgcagcggcgtgcgtagcgccgaaccgatgctggcggactatgcgccgctgaacaaagtagatagcgcgcgacgttgcggcctttaccatggccgtctggaaaagcagccgcagtttagtcttgaatcctggtgggccgagtacaacatcgacgggctgaccatcaaaacgttgccgggcgtattcagccgcgacggactggatgttggtagccaactgctgctgtctacgctgacgccgcacaccaaaggtaaagtgctggatgtcggctgcggcgctggcgtgctttccgccgcgctggccagccattcgccgaaagtgcgcctgacgctgtgtgacgtcagcgctccggcggtggaagccagccgcgccacgcttgccgctaatggtcttgaaggcgaggtattcgccagcaacgtcttttcggaagtcaaaggacgttttgacatgatcatctccaacccgccgttccacgacggaatgcaaaccagcctcgatgcggcgcaaacgctcattcgcggcgcagtgcgccatctgaacagcggcggggagttacgcatcgtggcgaacgcctttctgccctatcctaagattctggatgagacttttggcttccatgaagtcatcgcgcaaaccgggcgctttaaggtttatcgtaccgtgatgacccgtcaggcgaagaaatag

SEQ ID NO: 372054 - DNA, 705 bp, Salmonella enterica
atgcctttaagcgcacaacaattagccgcacagaaaaatctatcctatgttctggctgaaaagctggcgcagcggatattaaagggtgactacgcccccggtactattcttcccggcgaaatagaactgggcgagcagtacggcgtaagtcgaacggcagttcgcgaagcggtgaaaacgttgacggctaaaggtatggtgctacctcgtccgcgcattggtacgcgggtgatgccgcagggaaactggaactttctggatcaagagctgctgacctggtggatgacggaagaaaattttcatcaggtggtagagcattttctggtgatgcgtattagcctggagccgcaagcctgcctgctggcggcgactcttggcacaccggagcagaaagcgcggcttaatgccttaatggaagagatggtcgcgctgaaaaagcattttaagcgtgaacgctggattgaagtggatatggcgtggcacgagcatatctacgaaatgagcgccaatccctttctaatctcttttgcgacgctatttcattcggtttatcacacttactttacctcaatcacctataacgaggtggtaaagctggatttgcaccaggccattgttgatgccatcgctgatggcgacggcgaacgcgctttccaggcctgccaggcgttgttaatagcgcccaatgagagaccagataattaa

SEQ ID NO: 372055 - DNA, 246 bp, Salmonella enterica
atgaccagcaaaaaagcgcgcagtatggctggcctgccgtggatcgcggcgatggccttctttatgcaggcgctagacgccaccattttgaataccgctttaccggctattgcgcatagtcttaaccgttcaccactcgccatgcagtccgctattatcagttataccctgacagtagctatgttaattccggtaagcggctggctgaccgctttggtacgcgtcgcgtttttatggttgccgtaa

SEQ ID NO: 372056 - DNA, 1191 bp, Salmonella enterica
atggttgccgtaagtctgtttacgttaggctcgctggcctgcgcgctctccagttcactatctgaattggttatttttcgcgtcgtacaaggcgtcggcggagcgatgatgatgccagtggcgcggctggcgttattgcgagcctatccgcgtagtgagctgctgcccgttcttaactttgtcactatgccggggctggtaggtccgattctggggccggtattaggcggcgtactggtgacctgggcaagctggcactggatcttcctgattaatattcccattggtgttgcaggcattctgtatgcccgcaaatatatgcccaacttcaccacgccgcgtcgcaagtttgacatgaccggcttctttctttttgggttaagtctggttttattttccagcggaatggaactgtttggcgaaaagattgtggcgacatggatcgcatccgccattattttttgcagtatcgttctactattggcctatatccgccacgcccgccgtcatccgacaccgttaatatcactatcgctgtttaagacacgcacattttccgtcggtattgccggcaacctcgccacgcgtctggggacaggctgcgtaccttttttgatgccgttaatgctacaggttggttttggctacccggctctgatcgccggctgcatgatggcgccgacggctttgggttctattatcgcgaaatcgaccgtaacgcaggttttacgacgtttgggataccggaagactctggtcggcattacggtatttatcggtctgatgattgcccagttttcgtttcaatctcccgccatgccgatctggatgctcgtactgccgctattcattcttggaatggcgatgtccactcaatttacggcaatgaatacgattactcttgcggatctgacagacgataacgccagcagcggcaacagcgttctggcggttacgcagcaattgtctatcagtttaggcgtggcgatcagcgcggcggtgttacgtatttatgaaggttttgcgggcaccagtaccgtggaacagttccactatacctttatcacgatgggggcgatcactatcgtgtccgcgctgatgtttatgctgctaagagccaaagacggcaacaatctgattaaagaacggcataaatctaaaccgacccacgcaccgtcaaaaccggagtaa

SEQ ID NO: 372057 - DNA, 990 bp, Salmonella enterica
atgaaagatgttgcccgcctggcgggagtctctacatcgacggtctctcacgttattaacaaagatcgctttgtgagtgagacgattactgaaaaagttgaagcggcgattaaatcacttaactatgcgccttccgcgctggcgcgaagcctcaagttaaaccagacccgcacgattggtatgctaattaccgccagtaccaaccctttttattccgaactggtgcgcggcgttgagcgaagctgttttgagcgcggttatagtctggtgctgtgcaataccgaaggcgacgagcaacggatgaaccgcaacctggagacgctgatgcaaaaacgggtagacggtttactgctgctgtgtaccgaaacgcatcagccttctcgtgaaatcatggagcgttatccgtctattcctaccgtcatgatggactggtcgccgtttgatggtgagggcgatagcgatctcattcaggataattcgttgttaggcggtgatcttgccacccaacaccttatcgataaaggatttacccgaatagcctgtattaccggcccgctggacaaaacgccagcgcgtttgcggctggaagggtatcgggcggcgatgaaacgcgcagggctggctattccgcaaggctatgagatcaccggcgattttgaatttggcggcggctttgacgccatgcaggcgttactcgcccatcaacagcgaccgcaagcggtttttaccggaaacgatgcgatggctgtcggcgcctatcaggcgctatatcaggcggggcttcgtatcccgcaggatatggcagtcattggctatgatgatattgagctggcgcgctatatgacgccgccgctgacgactatccatcagccgaaagatgaattgggcgagctggctattgatgtgttgattcatcggatggcgcagcccgccttgcaacaacagcgacttcagcttactccggttttgacggtgcgtgggtcggtttag

SEQ ID NO: 372058 - DNA, 930 bp, Salmonella enterica
atgaaaaccgcaggtaatctcatcgtccttggcagcattaatgccgatcatatccttaatcttgagtccttccctaccccgggtgaaacggtaaccggtagccattatcaggtcgcgtttggcgggaaaggcgcgaatcaggcggttgctgcgggacgtagcggggcaaatattgcgtttatcgcctgcacgggcgatgacgatattggcgacagtattcgtaaacaattagtcagcgatcgtattgatatcgcgccagttagcgttattaaaggcgagtctaccggggtggcgctgattttcgttaacggcgaaggcgagaacgtcatcggtattcatgccggagcgaatgccgcgttatcgccggcgttggttgatgcgcaacgtgaacgtatcgcgcaggcggatgcgttactgatgcagctggaatcgccgctggaaagcgtactggcggcggcgaaaatcgcccatcaacatcatactactgttgcgctgaacccggcgcctgcccgtgagctaccggatgaactgctggcgctggtggacatcatcacgccaaatgaaacggaagctgaaaagctgacgggcgtgcgtgtggaaaatgacgacgatgccgcgaaagctgcgcaggttttgcatgataaaggcattcgaaccgtattaattaccttaggaagccgtggcgtctgggccagcgtagacggcgagggccgccgcgttcctggatttagcgttgaggctgtcgataccattgccgccggagatacgtttaacggcgcctttatcaccgcgatactggaggagacgccgttgccggaagcgattcgctttgcccatgccgccgccgcgattgccgtaacgcgtaaaggcgcgcaaccttccgttccgtggcgcgaagagatagaagcgtttttacatcagcaggggtaa

SEQ ID NO: 372059 - DNA, 891 bp, Salmonella enterica
atgaacatgaaaaaactggctaccctggtatctgctgttgcgctgagcgccaccgtgagcgcgaatgcaatggcgaaggacaccattgcgctggtgatctctaccctcaataatcccttcttcgtgtcgttaaaagacggggcgcaaaaagaggcggataaactgggttataacctggtggtgctggactcccagaacaaccctgccaaagagctggcgaacgtgcaggatttaaccgttcgcgggaccaaaattttgctgatcaacccgactgactccgatgcggtgggtaacgcggtgaagatggctaaccaggcgaagattccggttatcacgcttgaccgccaggcaaccaaaggcgatgtcgtcagccatatcgcgtctgataacgtgctgggcggtaagatcgctggcgactatatcgcgaaaaaagctggcgaaggcgccaaagtgattgagttgcaaggcattgccggaacatctgcggcgcgtgagcgtggcgaaggtttccagcaggcggtagccgcccacaaatttaatgtcctggccagccagcctgccgatttcgaccgtactaagggtctgaacgtcatgcagaacctgctgaccgcgcatccggatgttcaggctgtcttcgcccagaacgatgaaatggcgctgggcgcactgcgcgcgctgcaaactgccggtaaagcagatgtgatggtggttggatttgacggtacgccggatggcgaaaaggccgtaaaagatggcaaactggcagcgactatcgctcagttaccggatcaaatcggcgccaaaggcgttgaagtggcggataaggtgctgaaaggcgaaaaagttcaggccaaatatccggttgacctgaaactggtcatcaagcagtaa

SEQ ID NO: 372060 - DNA, 966 bp, Salmonella enterica
atgacaacccaggctgtttctggtcgccgttatttcactaaagcgtggcttcttgagcagaagtcgctcattgccctgctggtgttgatcgcgattgtttcgacgttgagccccaacttttttaccgttaataatctgttcaatattcttcaacagacctccgtcaacgccattatggcggtggggatgacgttggtgattctgacatcggggatcgatctgtccgtcggttccctgctggcgctcaccggcgcggttgccgcttcaatcgtcggcgttgaagtgaatgcgctggtcgcggttgccgccgcgctggcgctgggcgctgcgattggcgccgtcactggcgttatcgtcgcgaaaggccgcgtacaggcgtttatcgctacgctggtgatgatgctgctactgcgcggtgtaacgatggtttacaccgacggtagcccggtcaacaccggctttaccgataacgccgatctgtttggctggttcggtatcggccgtccgctgggcgttcctacgccggtctggatcatggctatcgtctttatcgccgcctggtatatgctgcatcacacccgtctgggacgctatatctacgcgctgggcggtaacgaagcggcgacgcgcctgtctggcattagcgtgagcaaagtgaaaattatcgtctattcactttgcggcctgacagcgtcgctggcgggcatcattgaagtggcgcgcctctcttccgcgcagccgacggcgggtaccggctatgagctggatgctattgccgccgtggtgctgggcggcaccagccttgcaggcggtaaaggacgcattgttgggacattgatcggcgcattgattctcggcttccttaataatggtttgaatttgttaggtgtttcctcctattaccagatgatcgtcaaagcggtggtgattttgctggcggtactggtagacaacaaaaagcagtaa

SEQ ID NO: 372061 - DNA, 1551 bp, Salmonella enterica
atgcgaacgtcattctttgcgctggcgttacgttctgaggccgctatggacgcattactgcaactcaaagggatcgataaagcgttccccggcgtgaaggctctctccggcgccgcgttaaacgtttatcctggccgcgttatggcgctggtgggggaaaacggcgccggaaaatccaccatgatgaaagtattaaccggcatctatacgcgagatgcgggatcgttgttatggctgggtaaagagaccacctttaatgggcctaaatcgtctcaggaagccgggatcggcattattcatcaggaactgaacctgattccgcagttgaccattgcggaaaacatcttcctgggccgtgagtttgtgaatcgctttggcaaaatcgactggaaaaagatgtatgccgaagccgaccacctcttagccaaactcaatctgcgttttaagagcgataagctggtgggcgaactctctatcggcgatcagcaaatggtggaaatcgccaaagtgctgagcttcgaatccaaagtcatcattatggatgaaccgaccgatgcgctgaccgacactgaaaccgactctctgttccgcgttatccgcgaattaaaatcgcaggggcgcggcattgtctatatctcccaccgtatgaaagagatcttcgaaatttgcgatgacgtgacggtcttccgcgatgggcaatttatcgccgagcgtgaagtggccacgttgaccgaagattctcttatcgaaatgatggtgggacgtaagttggaagatcagtacccgcatctggataacgcgccgggtgagattcgcctgaaggtcgataatctgtgcggaccgggcgtgaatgatgtctcttttgtgctgcgaaaaggcgagatccttggcatctccggcctgatgggcgccggtcgcaccgagctgatgaaagtattgtacggcgcgatgccgcgaaccagcggttacgtgacgcttgatggacacgaagtggtgacgcgttctccgcaggacggactggccaatggcatcgtttatatctctgaagaccgtaagcgcgatggactggtgctcggcatgtcagttaaagagaatatgtcgctgacggcgctggactatttcagccgcgctggcggaagcctgaaacacaaagatgagcagcaggcggtgggggattttatccgtctgttcaacgtcaagacgccgtcaatggaacaggcgataggcctgctttctggcggtaatcagcaaaaagtggcgattgcccgcgggttgatgacgcgcccgaaagtgctcattctcgacgagccgacccgcggcgtggacgtcggcgccaagaaagagatttatcagcttatcaaccagtttaaggccgacggcctgagcatcattctggtctcatctgagatgccagaagtattaggcatgagcgatcgcatcatcgtcatgcatgaagggcatctcagcggtgaatttactcgcgagcaggccacccaggaagtgttaatggctgccgcagtgggcaagcttaatcgcgtgaatcaggagtaa

SEQ ID NO: 372062 - DNA, 420 bp, Salmonella enterica
atgaagaaaggcaccgtactcaactctgaaatctcgtcggtcatttcccgtctggggcatactgatactctggtggtctgtgatgcgggtttacccatcccgaatagcaccgcgcgtatcgatatggcactaacccagggcgtaccttcttttatgcaggtggtggatgtcgtgacccgggaaatgcaggttgaggcggcgattcttgcaacggaaatcaaacaacagaatccgcagctccacgaaacgttgctcactcaccttgagcaactgcagcaacaccagggaaacaccataaaaattagttatacgacacacgaacaattcaaaaaattgactgcagacagtcaggcggtgattcgcagcggggagtgttccccgtatgcgaacgtcattctttgcgctggcgttacgttctga

SEQ ID NO: 372063 - DNA, 1869 bp, Salmonella enterica
atgagcactgataataagcaatcgttgcctgcgattaccctcgcagctattggggttgtctacggtgatattggtaccagcccgctttatacgcttcgtgaatgtttgtccggtcagtttggttttggcgttgaacgagatgccgtgtttggttttctgtcgctgatcttctggctactcatctttgtggtttccatcaaatatctcaccttcgtgatgcgcgccgataacgcgggtgaaggtggaattttgacgctgatgtcgcttgccgggcgtaatacctcggcgcgcaccacatccatgttagttatcatgggactgataggcggcagctttttctatggcgaagtggtcattacgccggcgatttcggtgatgtcggcgattgaaggcctggagattgtcgcgccgcagctggacacctggattgtcccgctctccattattgtgctgactctgttgtttatgattcagaagcacggtacgggaatggtagggaaactctttgcgccgatcatgctgacctggtttttaatcctggcggtacttggcctgcgcagtattatcgccaatcccgaagtgttacatgcgctgaatcctgtctgggcggtacgttttttccttgaatataaaaccgtatcatttattgcgttgggcgcggtggtgctgtcgattaccggcgtagaggcgttgtacgccgatatgggacacttcggtaagttcccgattcgcctggcgtggtttaccgtggtattgccgtcgttagtactgaactactttggtcagggcgcattgctacttaagcatccggaagcgattaaaaaccccttcttcctgttggcgccggactgggcgttaattccgctgctgattctggccgcgctggcgacggtgatcgcctcccaggcggtcatttccggcgtcttttcgctgacgcgtcaggccgtgcgtcttggctatttgtcgccaatgcgcattatccatacctccgagatggagtccggtcagatctatatccctttcgttaactggctgctttatttcgcggtcgtggttgttattgttagctttgagcactccagcaacctggcggcggcctatggtatcgccgtgaccggcacgatggtgctgacgtctattctttctacgaccgtggcgcgtaagaactggcactggaacaaatattttgtcgcgctgatcctcatcgcattcctgtgcgtggatatcccgctgttctcggctaacctcgataaattgttgtccggcggttggctgccgctgagcctgggtctgatcatgttcacgatcatgaccacctggaagagcgagcgtttccgtctgttgcgtcgtatgcatgaacacggtaattcgctggaagcgatgattgcttcgctggagaagtcaccgccggttcgggtgccgggtactgccgtatacatgtcgcgcgcgctcagtgtgatcccttttgctttattgcataacctgaagcacaacaaagtgttgcatgagcgcgtaatcttactgacgttgcgtacagaagatgcgccatatgtgcataacgttcgccgggtgcagattgagcagttgtctccgacattctggcgcgtggtggctagctacggctggcgcgaaacgccaaacgttgaagaggtgttccaccgctgcggtctggaagggcttagctgtcggatgatggaaacgtcgttctttatgtcgcacgagtcgttgattgtcggcaaacgcccgtggtatttgcgtctgcgtggcaagctgtatttgttgttgcaacgcaacgccctgcgcgcgccggatcagttcgagatcccgcctaaccgcgtgattgagttaggtacgcaggtcgagatttaa

SEQ ID NO: 372064 - DNA, 1497 bp, Salmonella enterica
atggctcacccacatttattagcggaaagaatttcccgtctgagcagcgcccttgagaagggactgtatgaacgtagtcatgccatacgcctttgcctactggcggcgttaagcggtgagagcgtctttttgttgggcccgcccggtatcgccaagagtctgattgcccgccgcctgaagtttgctttccagcgcgcccgcgcttttgaatatctgatgacacgcttttccacgccggaagaggtttttggcccgctctctattcaggcgctgaaagatgaaggtcgctatgaacgcttaacgaccggctaccttcccgaagccgaaatcgtttttctggatgaaatctggaaagccgggcccgctatcctgaacacattgctgaccgccattaacgaacgccatttccgcaacggcgcatttgaggaaaaaattccgatgcggctgctggtggcggcctctaacgaactgcccgaagcggacagcagcctggaagccttgtacgaccgaatgttgattcgtctgtggctggataaagttcaggataaagccaatttccgctccatgctggttagtcagcaggatgagagtgataacccggtccccgcctcgttacaggtaagcgacgaagaatatcaacagtggcaaaaagatatcggcgcgatttcactgcctgatccggtctttgagctgatatttactctgcgccaacagctggataatttgccgaatgcgccttatgtctccgaccgtcgctggaagaaagccatccgcctgttacaggccagcgccttctttagcggacgtgacgcggttgcgccgattgaccttatcctgctaaaagattgcttgtggtatgacgcgcagagtctgaatctcatgcaacagcaactggaaatattgatgaccggacacgcctggcagcagcaggccatgctgactcgcctcggcggtattgtccagcgccgcctccagttgcagcaacagcaaagcgataaaaccgccttcaccgtcattaaagaaggcggtatgttcagccgccgcccgcattacactttaccgccggaagccagtgcgtcaacgttgacgttattgctacaaaaaccgctaaaactgcatgatatggaagtgatccatattacctttgaccgcagcgcgctggaactttggctgaccaaaggcggcgagatccgcggcaaactgaacgggatcggctttgcccaaacgctgaatatggaagtcgataacgctcaacatctggtggtgcgcgacatcagtctacaaggtacccgtctggcgttaccgggagcggctgaagacagtatgcctgcggagatcaaacagcagctggaaacgttagaaaacgactggcgccagcagcatactcgcttcagcgagcagcaacattgcctgtttattcacagcgactggttagggcgcattgaggccagcctgcaggatgtaggagaacagatccgccaggcgcaacaatgctga

SEQ ID NO: 372065 - DNA, 1452 bp, Salmonella enterica
atgctgacgctggatacgctaaataccatgctggccgtcagcgaagagggaatggtcgaagagatgatcctcgcgctactggcttccccacaactggtcattttctttgaaaagtttccgcgtttaaaaaacgccgtgaccgccgatctcccgcgctggcgggaagcgctacgcagccgtcttaaagacgcacgcgttccgccggaactcacggaagaggtcatgtgttatcagcaaagccaacttctctctaccccacagttcatcgtgcaactgccgcaaatactggcgttgcttcaccgcctgcattcaccgtatgccgcgcaggcgaagcagttgacggagagcaacagtacctttacccctgcgctacacacgctttttttgcaacgctggcggttaagtctggtcgtgcaggccaccacgttaaatcagcaactactggaagaagagcgcgagcagttgctgagtgacgttcaggaacggatgacgctgagcgggcaactggaaccgacgctggcggaaaatgataatgccgcaggccgcctgtgggatatgagcgcgggccagcttaaacgtggtgattatcaactgatcgtaaaatacggcgaatttctcgccgcccagccggagctaatgcaactggcggaacaactgggacgttcgcgggaagccaaatcggtaccgaaaaaagacgcgccgatggaaacctttcgtacactggtacgcgaacccgcaacggtgccggagcaggttgacggtatacagcaaggcgatgatattctgcgcctgttgccgccagagctggcgacgctcggcatcaccgagctggaatatgaattttaccgccggttagtggaaaaacagctcctcacctatcgcctgcatggcgaagcgtggcgtgagaaagtgaccgaacggccggtagtacaccaggatgtcgacgagcagccgcgcggaccgtttattgtctgcgtcgatacttcaggctcgatgggaggatttaacgagcagtgcgcaaaagcgttctgcctggcgttgatgcgcgttgcgctggcggataaccgccgctgctttattatgctgttttccactgacgttgtgcgttatgaactctccggcccggaaggtatcgagcaggctatccgctttttaagtcaacgttttcgcggcggcacggatatcgccagctgttttcgcgccattattgaaagaatgcagggacgggaatggtttgatgccgatgcggtggtcatttcggattttatcgcccagcgcttgccggatgacgtggtgagcaaagtgggagagttgcagcgtcttcaccagcatcgattccatgcggtggcgatgtcggcgcacggcaaacccggcatcatgcgcattttcgatcatatctggcgctttgacaccgggatgcgaagccgcctgctgagacgctggcggcgctaa

SEQ ID NO: 372066 - DNA, 993 bp, Salmonella enterica
atgaaaaccgcttacattgccaaacaacgtcaaattagcttcgtgaaatcacatttctctcgccagcttgaggagcgtctgggtctgattgaggtccaggcgccgatcctgagtcgcgtaggagatggtacgcaggataatttgtccggctgtgaaaaagcggtgcaggtaaaagtgaaagcgttgcctgacgcccagttcgaagtggtgcattcactggcgaagtggaaacgtcaaaccctggggcaacatgacttcagcgcgggcgaagggctgtacacgcacatgaaagcccttcgccccgatgaagaccgactctctccgctccactcggtctatgtggatcagtgggactgggagcgtgtcatgggcgatggcgagcgccaattttccaccctgaaaagcacagtagaggctatatgggctggaattaaggcgacggaagcagaagtgcataaacagtttggtctggcgccgttcctgccagagcaaattcagtttgttcacagccaggagctgttgtctcgctatccggatctggatgcgaaagggcgcgaacgcgcgatcgccaaagaacttggcgccgtttttctggtggggatcggcggtaaactgagcgatggccaccgccatgatgtacgcgcgccggattatgatgactggagctccgcatctgagctgggctacgccggtctgaacggcgatatcctggtgtggaacccggtgctggaagatgcgtttgagctttcctctatgggtattcgcgtagatgccgatacgctgatgcgccagctggcgttgaccggtgatgaagatcgtctgcaactggagtggcatcaggcgctgctgcgcggcgaaatgccgcagaccatcggcggcgggattgggcagtcgcgtctgacgatgttgctgctgcaattgccgcatattggtcaggtacagtgcggcgtatggcccgcgcaggttcgcgaaagcattcctgctattttataa

SEQ ID NO: 372067 - DNA, 459 bp, Salmonella enterica
atggaaaattatcagatcgacaatctggaccgcggcatacttgacgccttaatggaaaatgcccgcaccgcctacgccgaactggccaaacaatttggcgttagccctggaaccattcacgttcgcgtcgagaaaatgaagcaggccgggatcattacgggcgcacggattgacgtcagccctaaacagctgggctacgatgtgggctgctttattggcatcattctcaaaagcgccaaagactatccctccgcactggcccggctggaaagcctggatgaggtgacggaagcgtattacaccaccggtcactacagcatctttataaaagtgatgtgcaaatcaatcgacgcgcttcagcacgtacttatcaacaagatccaaacaattgatgaaattcagtccactgagacactgatcgtcttgcagaacccgatcatgcgcaccatcaagccatga

SEQ ID NO: 372068 - DNA, 444 bp, Salmonella enterica
atggcagacattactcttatcagcggcagcaccctgggcggcgccgaatacgtcgcggaacatctggcggaaaagctggaagctgccggtttttcaaccgaaacggtgcacggtccgttattagaggatctgtcagcttccgggatctggctgataatcagctcaacgcacggcgccggagacattccggacaacctgacccctttctatgaagaccttcagacgcagaaacccgatctttccgcggtacgtttcggcgcaattggcattggtagtcgagaatacgacacgttttgcggcgcgattgagaaaatagaagcggaactgaaagacgctggcgcaaaacaggttggggaaacactgaagatcaacatccttgaacatgagattccggaagatccagcggagatttggctcggatcctggattaatttactcaaataa

SEQ ID NO: 372069 - DNA, 1890 bp, Salmonella enterica
atgttttatcaggatccttttgacgtcattattattggcgggggtcatgcaggcactgaggccgcgatggccgcagcgcgtatgggtcaacagactctgcttttgacacacaatattgacacgttgggacagatgagctgcaacccggcgatcggcggtattggaaagggacatctggtaaaagaggtggatgcgctcggcggtctgatggcgaaagcgatcgatcaggcaggtattcagtttaggatactaaacgccagcaaaggtccggccgttcgcgctacccgggctcaggcggatcgagtcttataccgccaggcggtgcgtaccgcgctggagaatcagccgaatctgatgatcttccagcaagcggttgaagatctgattgtcgaaaacgatcgcgttgtcggcgccgtgacccaaatggggctcaaattccgcgcgaaagcggtggtactgaccgtcggaaccttcctggatggcaaaattcatattggtctggataactacagcggcggtcgtgctggcgatccgccatccatcccgctgtctcgccgtctgcgtgagcttccgctacgcgtcagccgcctgaaaaccggcacaccgccgcgtattgatgcgcgtactatcgatttcagcgtgttggctcaacagcatggcgataacccgatgccggttttctcgtttatggggaatgcttctcagcatccgcaacaggtgccgtgttacatcacgcataccaatgagaaaacccatgacgtgattcgtaataacctcgatcgtagcccaatgtacgctggcgtgatcgaagggatcggcccgcgctactgtccttcgatcgaagacaaggtgatgcgttttgccgatcgtaaccagcatcagatcttccttgagccggaaggactgacctctaacgagatttaccctaacggtatctccaccagcctgccgtttgacgtgcagatgcagattgtccgttccatgcagggcatggagaacgcgaagatcgttcgtcctggttatgcgattgagtacgatttcttcgacccgcgcgatctgaaaccgactctggaaagtaaatttattcacggcctgttctttgctggtcaaatcaacggtactaccggctatgaagaggctgcggcgcagggcttgctcgctggtctgaatgccgcgcgtctttccgccgacaaagagggctgggcgcctgcgcgttctcaggcttatctcggcgtgctggtggacgatctctgtacgctgggcaccaaagagccgtatcgcatgtttacctcccgcgccgaatatcgcctgatgctgcgtgaggacaacgccgatctgcgtctgaccgaaatgggccgcgagctgggtctggtggatgatgaacgctgggcgcgcttcaacgagaagctggaaagtatcgaacgcgaacgtcagcggctgaaatcgacatgggtaacgccgtctgcggaatccgccgatgaagtgaatgcgcatttgaccacgcctctctcccgtgaggccagcggcgaagatctgttgcgtcgtccggaaatgacctacgcgcagctcacttcgcttgccgcattcgcgcctgcgcttgaagatgagcaagccgctgagcaagtggaaatccaggtcaaatacgaaggctatatcgctcgccagcaggatgagattgaaaaacaactacgtaacgagaatacgttgctgcctgccacgctggattatcgtcaggtttccggtctgtcgaacgaagttatcgccaagctgaacgatcataaaccggcgtctatcggccaggcatcgcgtatctccggcgttacgccagcggcaatctccattctgctggtatggctgaaaaaacaaggtatgctgcgtcgtagcgcttga

SEQ ID NO: 372070 - DNA, 624 bp, Salmonella enterica
gtgctcaacaaactctctcgtctgctggctgatgccggtatttctcttaccgatcaccagaaaacgctgctggtcgcctacgttgatatgctgcacaaatggaacaaagcatacaacctgacgtcagtgcgggatcccaacgaaatgttggtacgccatattctcgacagcatagtcgttgcgccgtatcttcagggacagcgttttatcgacgtaggaacaggaccggggctgccgggcatcccgctggctattgttctccctgacgcgcatttcaccttactcgacagcctgggcaagcgggtacgttttctgcgtcaggtccagcacgaactgaaactggaaaacatcacgccggttcaaagccgcgttgaagcctatccctccgaaccgccgtttgatggcgttatcagccgcgctttcgcatcgttgaatgatatggtgagctggtgtcaccatctgccgggagagaaagggcgtttttatgccttaaaagggcaattgccaggggatgaaattgcctcactacctgacaattttagcgtcgaatctgttgaaaaattacgcgttccgcaactggaaggcgagcggcatctggtgattattaagtcaaacaaagtttaa

SEQ ID NO: 372071 - DNA, 381 bp, Salmonella enterica
atgtctgtgtcgctcgtgagtcgaaacgttgctcgtaagcttctgttcattcagtttctggcggtaatagcaagtggattgctgttttgcctcaaagaccccttctggggcatctccgcagtatgtgggggattggcagtggcactgcctaatatgttgtttatgatatttgcctggcgtcaccaggcgcatacacctgctaagggccgcgtgtcctggactttcgccttcggtgaagccttcaaggtgttagcgatgctggttttactggtggtggcgttggcggttttaaaggcggtgtttttgccgctgatcgttacgtgggttttggtgctggtggttcagatactggcgccggctgtaattaacaacaaagggtaa

SEQ ID NO: 372072 - DNA, 816 bp, Salmonella enterica
atggcttcagaaaatatgacgccgcaggaatacataggacaccatctgaataaccttcagttggacctgcgtactttctcgctggtggatccgcagaaccccccagccaccttctggacgctcaatattgactccatgttcttctcggtggtgctgggtctgttgtttctggtgatgttccgtagcgttgctaaaaaagcgaccagcggcgtgccaggcaagtttcagaccgcgattgagctgatagtcggctttgtgcatggcagcgtgaaagacatgtaccatggcaaaagcaagctgattgcgccgctggccctgacgattttcgtctgggtattccttatgaacctgatggacttactgcctatcgacctgctgccgtatatcgctgagcattggctgggtctgccggcaacgcgcgtggtgccgtctgctgacgtgaacatcaccctgtcgatggcgctgggcgtattcatccttattctgttctacagcatcaaaatgaaaggcatcggcggcttcgcaaaagagttgacgttgcagccgttcaatcactgggcgttcattcctgtcaacttaatccttgaaggggtaagtctgctgtccaaaccggtttctctgggtctgcgactgttcggcaacatgtatgccggtgagctgattttcattctgattgctggtctgttgccgtggtggtcacagtggattctgaatgtgccgtgggccattttccacatcctgattattacgctgcaagccttcattttcatggttctgacgattgtctatctgtcgatggcgtccgaagagcattaa

SEQ ID NO: 372073 - DNA, 240 bp, Salmonella enterica
atggaaaacctgaatatggatctgctgtacatggctgccgctgtgatgatgggtctggcggcaatcggtgctgcgatcggtatcggcatcctcgggggtaaattcctggaaggcgcggcgcgtcaacctgatctgattcctctgctgcgtactcagttctttatcgttatgggtctggtggatgctatcccgatgatcgctgtaggtctgggtctgtacgtgatgttcgctgtcgcgtag

SEQ ID NO: 372074 - DNA, 471 bp, Salmonella enterica
gtgaatcttaacgcaacaatcctcggccaggccatcgcgtttattctctttgtctggttttgcatgaagtacgtatggccgccgttaatggcagccatcgagaaacgtcagaaagaaattgctgacggtctcgcttctgctgaacgagcacataaggatcttgaccttgcaaaggccagcgcgaccgaccagctgaaaaaagcgaaagcggaagctcaggtaatcatcgagcaggcaaacaaacgccgcgctcagatcctggacgaagccaaaactgaagcagagcaggaacgtactaaaatcgtggcgcaggcgcaggcggaaattgaagccgagcgtaaacgcgcccgtgaagagctgcgtaagcaagttgctatcctggctgttgctggcgccgagaagatcatcgaacgttccgtggatgaagctgctaacagcgacatcgtggataaacttgtcgctgaactgtaa

SEQ ID NO: 372075 - DNA, 534 bp, Salmonella enterica
atgtctgaatttgttacggtagctcgcccctacgccaaagcagcttttgactttgccgttgaacaccaaagtgtagagcgctggcaggatatgctggcgtttgccgccgaggtaaccaagaacgaacaaatggcagagcttctctctggcgcgctggcgccggaaacgctcgctgagtcgtttatcgcagtctgcggtgagcagttagacgaaaacggtcagaacctgattcgggtgatggctgaaaataatcgtctgaacgcgctcccggatgttctggagcagtttattcatctgcgtgccgccagtgaagctacctccgaggtagaagttacgtcggcaaccgcattgagtgaagagcagctttcgaaaatcagcgccgcgatggaaaaacgtctgtcacgcaaagtgaagctgaattgcaaaatcgataagtctgtaatggcaggcgttatcatccgggcgggtgatatggtcattgatggcagcgtacgcggccgtcttgagcgccttgcagacgtcttgcagtcttaa

SEQ ID NO: 372076 - DNA, 1542 bp, Salmonella enterica
atgcaactgaattccaccgaaatcagcgaactgatcaagcagcgcattgctcagttcaatgtggtgagcgaagctcacaacgaaggtactattgtttctgtcagtgacggtgttatccgcattcacggcctggccgattgtatgcagggtgaaatgatctccctgccgggtaaccgttacgctatcgcactgaacctggagcgcgactccgtgggtgcggtagtcatgggtccatacgctgaccttgccgaaggcatgaaggttaaatgtacgggtcgtatcctggaagttccggttggccgcggtctgctgggacgtgtggtgaacaccctgggtgcgccaattgacggtaaaggtccggttgataatgacggcttctctgccgttgaagcgattgcgccgggcgttatcgatcgtcagtctgtcgatcagccggtgcagaccggctataaagccgttgactccatgatcccaatcggtcgtggtcagcgtgaactgatcatcggtgaccgtcagaccggtaaaaccgcgctggctatcgacgccatcatcaaccagcgcgattccggtatcaaatgtatctatgtcgctatcggccagaaagcgtccaccatctctaacgtggtgcgtaaactggaagaacacggcgcgctggctaacaccatcgttgtggtggcgaccgcgtccgaatccgctgctctgcaatatctggcgccgtatgccggttgcgcaatgggcgaatacttccgtgaccgcggtgaagatgcgctgatcatttacgatgacctgtctaaacaggctgttgcttaccgtcagatctccctgctgctccgtcgtccgccaggacgtgaagcattcccgggcgacgtattctacctccactctcgtctgctggagcgtgctgcgcgtgttaacgccgactacgtcgaagccttcaccaaaggtgaagtgaaagggaaaaccggctctctgaccgcgctgccgattatcgaaacgcaggcaggtgacgtttccgcgttcgttccgaccaacgtaatttccattaccgatggtcagatcttcctagaatctaacctgtttaacgccggtattcgtcctgcggttaacccgggtatctcggtatcccgtgtaggtggcgcagcccagaccaagatcatgaaaaaactgtccggtggtattcgtaccgcgctggcgcagtatcgtgaactggcggcgttctctcagtttgcatccgaccttgacgatgccacccgtaaacagcttgaccacggtcagaaagtgaccgaactgctgaaacagaaacagtatgcgccgatgtccgtcgcgcagcagtctctggttctgttcgcagcagaacgtggttatctggcggatgtcgaactggcgaaaatcggtagcttcgaagccgcactgctggcttacgtcgaccgtgatcacgctccgctgatgcaagagatcaaccagtccggtggctataacgacgaaatcgaaggcaagctgaaaggcatcctcgattccttcaaagcaacccagtcctggtaa

SEQ ID NO: 372077 - DNA, 864 bp, Salmonella enterica
atggccggcgcaaaagagatacgtagtaagatcgcaagcgtccagaacacgcaaaagatcactaaagcgatggagatggtcgccgcttccaaaatgcgtaaatcgcaggatcgcatggcggccagccgtccttatgcagagaccatgcgcaaagtgattggtcaccttgcgaacggtaatctggaatataagcacccctacctggaagagcgcgacgttaaacgcgtgggctacctggtagtgtcgaccgaccgtggtttgtgcggtggcttgaacattaacctgttcaaaaagctgctggcggatatgaaggcatggtccgataaaggcgttcagtgcgaactcgcaatgatcggctctaagggcgtgtcattctttaattccgtaggcggcaacgttgtcgctcaggtgacaggtatgggggataacccttctctgtccgaactgatcggtccggttaaagtgatgttgcaggcctacgacgaaggccgtctggacaagctttacattgtcagcaacaaatttattaacaccatgtctcaggtgccgacgatcactcaactgctgccgctgccggcgtcagaagatgatgatctgaagcgtaaagcctgggattacctgtatgaaccagacccgaaagcgctgctggatactctcctgcgtcgttatgtggagtctcaggtttatcagggcgtggtagaaaacctggccagcgagcaggccgcacgaatggtggcgatgaaagccgcaaccgataatggcggcagcctgattaaagagctgcagttggtatacaacaaagctcgtcaggccagcattactcaggaactcaccgagatcgtctcgggggccgccgcggtttaa

SEQ ID NO: 372078 - DNA, 1383 bp, Salmonella enterica
atggctactggaaagattgtccaggtaatcggcgccgtggtcgacgtcgagttccctcaggatgccgtaccacgcgtgtacgatgcccttgaggtgcagaatggtaatgagaagctggtgctggaagttcagcagcagcttggcggcggtatcgtgcgtaccatcgcgatggggtcttctgacggtctgcgtcgcggtctggatgtaaaagatctcgaacacccgatcgaagtcccggtaggtaaagccacgctgggtcgtatcatgaacgtcctgggcgaaccggtcgacatgaaaggcgagatcggcgaagaagagcgttgggcgattcaccgcgcagcaccttcctacgaagagttgtcaaactctcaggaactgctggaaaccggtatcaaagttatcgacctgatgtgtccgttcgcgaagggcggtaaagtcggtctgttcggtggtgcgggtgtaggtaaaaccgtaaacatgatggagcttattcgtaacatcgcgatcgagcactccggttactcagtgtttgcgggcgtaggggaacgtactcgtgagggtaacgacttctaccacgaaatgaccgactccaacgttatcgataaagtatccctggtgtatggccagatgaacgagccgccgggaaaccgtctgcgcgttgcactgaccggcctgaccatggcggagaaattccgtgacgaaggtcgtgacgtactgctgttcgtcgataacatctatcgttacaccctggccggtacggaagtatccgcactgctgggccgtatgccttccgcagtaggttaccagccgactctggcggaagagatgggcgttctgcaggaacgtatcacctccaccaaaaccggttctatcacctccgtacaggcggtatacgtaccggcggatgacttgactgacccgtctccagccaccacctttgcgcacttagatgcaaccgtggtactgagccgtcagatcgcatccctgggtatctacccggccgttgacccgctggactccaccagccgtcagctggatccgctggttgttggtcaggaacactacgacaccgcgcgtggcgttcagtccatcctgcagcgttatcaggaactgaaagacatcatcgccatcctcggtatggatgaactgtctgaagaagataaactggtggtagctcgcgcgcgtaaaattcagcgcttcctgtcccagccgttcttcgtggcggaagtatttaccggttctccgggcaaatacgtctccctgaaagacaccatccgtggctttaaaggcatcatggaaggcgaatacgatcacctgccggagcaggcgttctacatggtcggttccatcgacgaagccgtggaaaaagccaaaaaactttaa

SEQ ID NO: 372079 - DNA, 420 bp, Salmonella enterica
atggcaatgacttaccacctggatgtcgtcagcgcggagcaacaaatgttctccggtctggtcgagaaaatccaggttacgggtagcgaaggcgaactggggatttacccggggcacgcgccgctactcaccgccattaagcctggtatgattcgcatcgttaagcagcacggtcatgaagagtttatctatctgtccggcggcattctggaagtgcagcctggcagcgtgaccgttctggcggataccgcgattcgcggtcaggatctcgacgaagcgcgagccctggaagcgaagcgtaaagccgaagagcacattaagagctcgcacggtgacgtggattacgctcaggcgtctgcggaactggccaaagcgatcgctaaactgcgcgttatcgagttgaccaaaaaagcgatgtaa

SEQ ID NO: 372080 - DNA, 699 bp, Salmonella enterica
atgtcatttcagccatcctttgcgggtccacaacccgactcaaggattgatcgtactacctttattcgtcgcgcttatcttcatctcgccgtcgccatcgtcggttttatcgtattgagcgcggcgtggagttttataggggtcggggagtatgcgcttgatgtgctgctggctggtggaagatatagctggttggttgttctcggcgcttttatgctggtgggaatgctggcaacccgtctggcggataatgcggggactaatcaaacgcaacttatcgggctggggatttatgtgttggcagaatccctgatttttgcccccctgttaacggtggcggcgtatattaacccgtcgagcattggcgcggcggcaataacgactctgttgctggttggcggtctgacgtttaccgctttttccataaaaaaagacttttcttttctgcgctcgtttctgactatggctgggttcattgcttttggcgcgattattgccagcgtcatctgcggcttctcgctgggcgtctggttttctgcgctaatggtactgctgtgcgccgggtttatactttacgatacttctaacattattcaccattaccctaccgatcgcccagctggcgcggcattacatctgtttgcttctatcgcgaccatgttctggtatattttgcggatttttatgtcgcgtaattaa

SEQ ID NO: 372081 - DNA, 1371 bp, Salmonella enterica
atgttaaatagtgctatgagcgtagtgatccttgccgcaggtaaaggcacacgcatgtattccgatattcctaaagtgctgcacacgctggcgggtaaacccatggtgcagcatgtcattgatgcagctactaaattaggggccgcacaggttcatctggtctatggccacggtggcgagttgttaaaacagaccctgaaagatgacaagctgaactgggtgcttcaggcggaacagttgggaacaggtcacgcaatgcagcaggccgcgcccttttttagcgacgatgaagatattttaatgctttacggcgacgtgccgctgatttcggttgaaaccttacagcgcctgcgcgatgccaaaccgcagggtggtattgggttattaaccgtgaagctggacgatccgagcggctatggccgtattacgcgtgaaaacggtaaagtgaccggcatcgttgaacataaagacgccactgatgaacagcgtcagatccaggaaattaacactggtattctgatcgccaacggcgcggacctgaaacgctggttgtctaagctgactaacaataatgcgcagggtgaatattacatcacagatatcatcgcgctggcttatcaggaaggacgggagatcgccgcggtgcatccggctcgcatcagcgaaacggacggcgtgaataaccgtctacagctttctcgtctggagcgtatttaccaggccgaacaggcggagaaactgctgttatccggtgttatgttgcgcgatccggcacgttttgatctccgcggcacccttcattgtggaatggatgtcgaaattgacgctaacgttatcatcgaaggttatgtaacgctcggtcaccgcgtgaagatcggcgcgggctgcattattaaaaacagcgttattggcgatgactgcgaaattagcccatacagcgtggtggaagatgcgcatctggaagcggcctgcaccatcggcccgtttgctcgcctgcgtcccggcgcggagctgttagcgggcgctcacgtcggcaatttcgttgaaatgaaaaaagcgcgtctcggtaaaggttctaaagccggccatctgacctacctgggagatgcggaaattggcgacaacgtgaatatcggcgcggggaccatcacctgtaactatgatggcgcgaacaaattcaaaacggttattggcgacgatgtgtttgtcggctccgatacccaactggtggcgccggttactgttggtaaaggggccaccatcgccgcagggactaccgtcacccgtaatgtagccgacaatgaactggtattaagccgcgtgccgcaggtgcataagcaaggctggcagcgtccggtgaagaaaaagtga

SEQ ID NO: 372082 - DNA, 1830 bp, Salmonella enterica
atgtgtggaattgttggcgctatcgcgcagcgtgatgtagctgaaatccttctcgaaggtttacgtcgtctggaataccgcggatatgactctgccggtctggccgtggtggatgcagaaggtcatatgacccgcctgcgtcgcctcggtaaagtccagatgctggctcaggcagcggaagaacatcctctgcatggcggcactggtattgctcacactcgctgggcgacgcacggtgaaccttcagaagctaacgcgcatccgcatgtttctgaacacattgtggtggtgcataacggcatcatcgaaaaccatgaaccgctgcgtgaagcgttaaaagcgcgtggctataccttcgtttctgaaaccgacaccgaagtgattgcacacctggtaaactgggaactgaaacagggcggtactctgcgtgaggctgttctgcgtgctatcccgcaactgcgtggtgcgtacggtacagtgatcatggatacccgtcacccggataccctactggcggcacgttctggtagcccgctggtgattggcctgggtatgggcgaaaactttatcgcttctgaccagctggcgctgttgccagtgactcgtcgctttatcttccttgaagagggcgatatcgctgaaatcactcgccgttcggtaaatatcttcgataacaccggcgcggaagtaaaacgtcaggatatcgaatctaatctgcaatatgacgcgggcgataaaggtatttaccgccactacatgcagaaagagatctacgaacagccgaacgcgatcaaaaacacccttaccgggcgcatcagccacggtgaggtggatttaagcgagctgggaccgaacgccgatgatctgttgtcgaaggttgagcatattcagatcctcgcctgcggtacgtcttacaactccggtatggtttcccgttactggtttgaatcgctggcaggtattccgtgcgacgttgaaatcgcctctgaattccgctatcgcaaatctgccgtgcgccgtaacagcctgatgatcacgctctcccagtctggcgaaacggcagataccctggctggcctgcgtctgtcgaaagagctgggatatttgggctctctggccatttgtaacgtgccgggatcttcgctggtgcgtgaatccgatctggcgctgatgaccaacgcgggtacggaaattggcgtagcatctaccaaagccttcaccacccagttaaccgtgctgttgatgctggtggcgaaactggcgcgtctgaaaggtctggatacgtccattgagcatgatatcgttcatggcctacaggtgctgccgagccgtattgagcagatgctgtcgcaggacaaacgtatcgaagccctggcggaagatttctctgacaaacaccatgcgctgttcctggggcgtggcgatcaatatccgattgcgctcgaaggcgcgctgaagctgaaagagatctcttacattcacgcggaagcctatgctgcaggcgagctgaaacacgggccgttggcgctgattgacgccgatatgccggtgattgtggtggcgccgaacaacgaactgctggagaaactgaaatccaacatcgaagaagttcgcgcacgtggcggtcagttgtacgtcttcgccgatcaggatgcgggtttcgtcagcaacgacaacatgcacatcatcgagatgccgcatgtggaagaggtcattgcgcctatcttctacaccgttccgctgcaactgctggcgtatcacgtggcgctgattaaaggcaccgacgttgaccagccgcgtaacctggcgaaatcggttaccgtagagtaa

SEQ ID NO: 372083 - DNA, 822 bp, Salmonella enterica; identical to SEQ ID NO: 16544

SEQ ID NO: 372084 - DNA, 2109 bp, Salmonella enterica; identical to SEQ ID NO: 16545

SEQ ID NO: 372085 - DNA, 1668 bp, Salmonella enterica; identical to SEQ ID NO: 16546

SEQ ID NO: 372086 - DNA, 1527 bp, Salmonella enterica; identical to SEQ ID NO: 16547

SEQ ID NO: 372087 - DNA, 1137 bp, Salmonella enterica
gtggttaggctagctacatttaatgacaatgtgcaggttgtacatattggtcatttattccgtaactcgggtcataaggagtggcgtatttttgtttggtttaatccaatgcaagaacggaaatggactcgatttactcatttgcctttattaagtcgagctaaggtggttaacagtacaacaaagcaaataaataaggcggatcgtgtgattgagtttgaagcatcggatcttcaacgagccaaaataatcgattttcctaatctctcgtcctttgcttccgtacgcaacaaggatggagcgcagagttcatttatttacgaagctgaaacaccatatagcaagactcgttatcacatcccacagttagagctagctcggtcattatttttaattaactcctatttctgtcgaagctgtttgagcagtaccgctttacagcaagagttcgacgttcagtatgaggttgagcgagatcatttagagataaggatcttacccagttcatcgtttcctaaaggggcgttagagcagtcggccgtagtgcagcttttggtttggttgttttcggatcaagatgttatggattcgtatgaaagtatttttaggcactatcaacaaaatagagaaattaagaacggcgttgaaagctggtgctttagctttgaccctccgcccatgcagggttggaaattacatgtaaaaggacgttcttctaacgaggataaggattatttagttgaggaaatagtaggtttagaaatcaacgctatgcttcctagcacaacagctattagccatgcctcttttcaggaaaaggaggcaggtgatggtagtacgcagcacatagcggtttcaacagagtcagttgttgatgatgagcatctacagttggacgatgaggaaacagccaatatagacacagacacacgagtcatagaggctgagccgacatggataagttttagtagacctagtcgaattgaaaaatctcgcagggcaagaaaaagtagccaaactattttagaaaaagaagaagcaacaacaagtgaaaatagtaatttggttagtactgatgagccacacttaggtctgagagatcccctcataatttccccaaagcgtaaccatgtgtga

SEQ ID NO: 372088 - DNA, 1659 bp, Salmonella enterica
atgcaagaaaataccgtaattaaatatttaaataccaatatgtttatacgggaaattacacgctggtttgccagacactcgtttcaaaaccggatatttctactgctcctgtttacatccaccatcgtgatgctggcaatcacctggtatctgaccgatatcacgaaagaacgcctgcattatcaggtgggccaacgtgcgcttattcaggcaatgcaaatatccgctatgccagaattagttgaagccgtagaggcgcatgatttgtcacgcatcaaagcgttgattgacccaatgcgctcgttttcggatgcgacttacattaccgttggcaacgaaaaaggtcagcgactgtatcacgtcaacccggatgagatcggcaaatatatggagggcggcgatagcgacgacgcgctgtataatgctaaaagctacgtatcggtgcgcaaaggttcattaggctcttccttgcgtggtaaatccccgattcaggacagtaccggtaaagtcatcggtattgtttccgtcggctatactctggaacagctggagagctggcttaacttacaaatcagctcgttgctgttcccgatggcgttactgctgctggtgctgttgtactgtgcccgccgcttctcgctgcatattaaaaagcagatgcttaacatggagccacagcagctttcacaactattaattcagcaaagcgtgttgtttgagtcggtatttgaagggttgatcgccattgactcccatcaccgtattaccgccattaaccaaacggctcgccgcttactgaatctgagccaaccggagtctgaactcattggctatgcaatccaccatgtcgtgttgccggaggccttcttttacgatgcgccgcaaaaaaacaaaaaagatgagatcgtcacctttaaccaaatgaaagtcatcgccagtcgcatggcggtcattattgacaaccagcctcagggctgggttattagctttcgcaacaaagacgatatcaatacactcagcctgcagttaagtcaggtgcggcaatacgccgataacctgcgcgccgtgcagcatgagcatcgcaaccttatttccaccattgccggactgctgttcctgaagcgctacgataatgcgctggcgctgattcagcagcagtcggaaagccaccagaaagtactcgattttatttcccataatttccgcgaccaccaccttgcggggctattaatcggtaaatattatcgggcaaaagagctgggactggagctgattttcgatccttcaagctttgttgaacacctgccgtcatcgctctcgcataatgaatggatttcgattgttggcaatttattggacaacgcctataacgccaccctgctcaatcgcgaaggctcgcgacagattgagtgcctgatcaacagcgaaggtaatgaagtcattattgaagttgccgatcagggatgtggtattgacgaaaatatccgccagcatattttcgagcgtggagtgaccacccacaataacggcgatcacggaattggattatggttggtgcacagctacgtcaagcaggccaatggcgacattatcgtcgataacaataatccttttggcaccatttttaccctctatatcccttttaccagagaagaataa

SEQ ID NO: 372089 - DNA, 687 bp, Salmonella enterica
atggatagcattacgacactcatcgttgaagacgaaccgatgctagcggaaatcctggtggacaccatcaagatttttccccagttttcaatcgtcggcatcgcagacaaactggaaagtgcgaagaagcaaatacgcctctatcaaccacagttaattctattggataattttttacccgatggcaaagggatcgatttaattcgtcataccatcagcaccaactacacggggcgaattattttcattaccgccgacaatcatatggataccatcagcgatgccttacgcatgggcgtattcgattacctgattaagccggtacattatcagcgcctgcagcataccctggagcggttcacccgttaccgcagttcgttacgttccagtgagcaggcaaaccagacgcacgttgatgccttatttaatatccaggccaaagaacaaaccgcagaaccgaatagcggactgcggggaattgatgaaaacaccttcaaccgggtacgacaaatattcgccgacccgcaggcagtacatacagcagacactctggcgcaaattctgggcagcagtaaaaccactgcccgacgctatctggaacaaggcgtgaaaaataactttctcgaagcggagatcagctacgggaaagtgggcaggccggagagactctatcgcggcaaagtatga

SEQ ID NO: 372090 - DNA, 921 bp, Salmonella enterica
atgacagcatccctacacattattcttgataccgatccgggcattgatgacgcggctgcgattgccgctgcgctgttcgccccccagcttgatctgcaactaataaccaccgtcgcaggcaatgtttccgttgaaaaaacgacccgtaatgcgttgcagcttctgcatttctgggacgccgatgtgccacttgcgcaaggggccgcgacgccgctgctgcgtccgctacgtgatgcggcatacgtccacggcgaatccggtatggaaggctatgattttgtcgaccatcagcgccaaccgttggcgaagcctgcgtttatcgctatccgggatgtgctgatgaacgccccggagcccatgacattagtggcgattgggccattgaccaatattgcgttgctactgatgcactatccggagtgtgcgtgtaacattcgccgtctggtgttgatgggcggttccgcagggcgcggcaattttacgcctaatgctgaatttaacattgctgtcgatccggaggccgcggcgctggtgttccgcagcggtctggagattgtgatgtgtgggctggacgttacaaatcaggcaatgctctcgccagattttctgaataaactgcccgcgctgaatcgcaccggtaagatgttgcacagcctgttcaaccattatcgcagcggtagtatgcgcactggcgtccggatgcacgatctctgcgctatcgcctggctggtgcgtccggagctttttaccctgcaatcctgttttgtggccgtagaaacgcagggggaatataccgcaggcacgacggtcgttgatattgaagggcgtctggggcagcccgccaacgcgcaggtggcgctggcgctggatgtggacggttttcgtcagtgggtggctgaggtgtttgcctatgcgccgtaa

SEQ ID NO: 372091 - DNA, 243 bp, Salmonella enterica
atgggacgtgtcaatcttttttggctaaccggtaatgttcgtaccgtgattcaggcagaaaaacccggcgctgagcccgaatcgcttgagattcagtggcaggaaaacaaagcatcgccagggcgtttttgcccattagttccgtttgtcgaaggtgataagctaagtccgcgtctggtgacggatgacgatgtgcctgatacctgtatcagtcgcgctgagtatgaagatataaaacaatag

SEQ ID NO: 372092 - DNA, 996 bp, Salmonella enterica
atgggcaaaataaaatatggattgccaacgttactcgccatcggcttttggatggacgcaacaagcgccacggtgctggagctacctgcctgggagcgaaactataccgggactatcgcggggaaaccggtaaacgttaatatcacgcgatttggtaactctcttaatgggtattactgctatgaaccttgcaatcagcacaaggcagtgattgttctacgcggctcactccaggataaagaggtgcatcttgaagaacgcgtaaaggcgctttcgggttactggaatgcggaaatctccagcagtgagattaaaggcgaatggacgtccgcagataaaaaacgacattttcctgttgcccttatctattacaaacctaaaaactcccctgatattgtgctggtcacgaacacgaatgatgcagggggttacgacccttccaaagagattgattgcggcaatacgccggccatttcggcgataaaattataccgtgatggtaaactcatacagaccttagataccgcctcggtgggcacttgtagcccgtttatgcctcaatggggggatgtcaattttgatggctacccggatctatcgattgtaacagagttacttgctgggccggatgctccagtacaaacatggctctatgaccccgccaaacagcgttatgttgatgcgccagcgtcttatcaggaaatcacttcaccagagatcgatgctgaacataaacagattgtcagctattggcgcggcggttgctgcagccatggcgtcaatgtgtatcgctggaaaggaaaaacgattgaactgatcgatcgcggtgaaagctactttcagcctgtgataagtaaaggcaaaatgtataactgctacatgacaccttcctacgctgatgggcgtattatttatccgctagtacgtaaaaatggtcatttgacgccgcctcttagccttgatgggacgtgtcaatcttttttggctaaccggtaa

SEQ ID NO: 372093 - DNA, 951 bp, Salmonella enterica
atgcagatcctgttggccaacccacgcggtttttgcgccggggtagaccgcgctatcagcattgttgaaaatgcgctcgctatttacggcgcgccaatttacgttcggcacgaagtcgtgcataaccgctatgtagtggacagcctgcgccagcgcggggcgatctttatagagcaaattagcgaagtgccggatggcgccattctgatcttctccgctcatggggtttcacaggcggtgcgtaacgaggcgaaaagccgcgatcttaccgtttttgacgccacctgcccgctggtgacgaaagtccatatggaagtggcgcgcgccagccgtcgcggtgaagaatctattctcatcggccacgccgggcacccggaagtggaaggcaccatgggtcagtacagcaacccggaaggggggatgtacctggtggagtcgccagaggacgtctggacgctgaatgtcaaaaatgaaggcaagctctccttcatgacgcaaaccacgctttccgtggacgatacgtccgatgtgattgatgcgctgcgtaaacgctttccgaaaatcgtcggcccgcgcaaagacgatatttgctatgccactactaatcgtcaggaagcggtgcgggcgctggcggagcaggctgacgtggtgctggtggttggctcgaaaaactcttctaactctaaccgattggcggaactggcccaacggatgggaagaaccgcgtttcttatcgacgatgcggcggatatccaggaggcgtgggtgaaagaagccgcctgcgtcggcgtcactgctggcgcttccgcgccggatattctggtgcagaatgttattgcgcgtctgcgcgagtttggcggcggcgaagccgtcacgcttgaggggcgcgaagaaaatattgttttcgaagtgccgaaagagctgcgtgtggatgttcgtgaggtcgaataa

SEQ ID NO: 372094 - DNA, 450 bp, Salmonella enterica
atgtctaaatccgtacagagcaacagcgcgatcctcgttcacttcaccctgaaactggatgatggctcaacggcggaatctacccgcaataacggcaagccagccctgttccgtcttggcgatacctcgctttccgaaggtctggagcagcagcttctggggttgaaagaaggggaaaagaaagcgttttcgctggagcctgacgccgcgtttggcgtccccagtccggacttgatccagtatttctcgcgccgtgagtttatggcggcgggcgaaccggaagtcggggcgattatgctttttaccgcaatggatggcagcgaaatgcctggcgtgattcgcgaaatcaacggcgactcgattaccgttgattttaaccatccgctggccgggcataccgttcactttgatattgaagtgctggaaatcgatccggcgctggaggcataa

SEQ ID NO: 372095 - DNA, 501 bp, Salmonella enterica
atgagtaaaccactctgttcaacaggactacgctggctatggctggtagtagtcgtgctgattatcgatttgggcagcaaatacctgatcctccagaatttcgctctgggggatacggtagggctgttcccgtcgcttaatctgcattatgcgcgtaactacggcgcggcttttagcttcctggcggatagcggcggctggcagcgctggttctttgccgggattgcgatagggatctgcgtaattcttttggtgatgatgtatcgctcgaaagcgacgcagaagctgaataacatcgcttatgcgttaatcatcggcggcgcgctgggtaacctgttcgaccgcctgtggcacggctttgttgtcgatatgatcgatttttacgtcggcaactggcatttcgcgacgttcaaccttgccgatagcgcgatctgtatcggcgcggcgctgatagtactggaaggctttttgccgaagccgacagcgaaagaacaggcataa

SEQ ID NO: 372096 - DNA, 2835 bp, Salmonella enterica
atgagtgactataaatcgaccctgaatttgccggaaacagggttcccgatgcgcggcgacctcgccaagcgtgaaccgggaatgctggcgcgttggaccgatgatgatctgtacggcatcattcgtgcggccaaaaaaggcaaaaaaaccttcattctgcatgatggccctccatatgcgaatggcagcattcatattggtcactcagttaacaagattctgaaagacattatcgtgaagtccaaaggactgtcgggatttgactcgccttacgtgccgggctgggactgtcacggtctgcctatcgagctgaaagtcgagcaggagttcgggaagccgggcgagaaattcactgccgctgaattccgcgccaagtgccgcgaatatgctgctacgcaggttgacggccagcgtaaagacttcattcgtctgggcgtgttgggcgactggtcgcatccgtacctgaccatggacttcaaaaccgaagccaacatcatccgcgcgctgggcagaattatcaaaaacggtcatctgcacaaaggcgctaagccggtgcactggtgcgttgactgccgttccgcgctggcggaagcggaagttgaatattacgacaaaacgtcaccgtctatcgacgtggcgttccgcgccgtcgatcaggatgcggtgaaagcgaagtttggtctgccgggcgtgagcggccctgtgtcgctggttatctggaccaccacgccgtggactctgccggctaaccgcgccatctccctggcgccggactttgattatgcgctggtgcagattgacggccaggcggtgattctggcgaaagatctggttgaaagcgtcatgcagcgtattggcgcggctgaatacaccattctcggcaccgttaaaggcgcggagctggaactgctgcgctttacccatccgtttatgggctttgacgtgccggcgatcctcggcgatcacgtcaccctggacgccggtaccggcgcggtacataccgcccctggtcacggcccggatgactacgtgatcggccaaaagtatggcctggaaacggctaacccggttgggccggacggcgcttacctgccaggcacatatccaacgcttgacggtgttaacgtcttcaaggcgaacgatatcgttattgaactgctgaaagaaaaaggcgcgctactgcatgtcgaaaaaatgcagcacagctatccgtgctgttggcgtcacaaaacgccgatcattttccgcgcgaccccgcagtggttcgtcagcatggataaagaagggcttcgtcaacagtccctgaaagagatcaaaggcgttcagtggatcccggactggggtcaggcgcgtattgaatcaatggtcgctaaccgtcctgactggtgtatctcacgtcagcgtacctggggcgtaccgatgtcgctgttcgtgcataaagaaacgcaggagctgctgccgattgagcgtactctggcggcgatggaagaggtggcgaaacgcgtcgaagttgacggtatccaggcgtggtgggatctcgacccgaaagagatcctcggcgaagatgccgatcaatacgagaaagttccggatacgttggacgtttggtttgattccggttccaccagttactccgtggttgatgcacgtccggaattcgccggtcatgcggccgatatgtatctggaaggctctgaccagcatcgcggctggtttatgtcctccctgatgattagcgtggcgatgaaaggcaaagcgccataccgccaggtactgactcacggcttcaccgtcgatggtcaggggcgcaagatgtccaaatccatcggtaacaccgtgtcgccgcaggatgtgatgaataaactgggcgcggatatcctgcgtctgtgggtggcgtctactgactataccggcgaaatggcggtctctgacgaaatcctgaaacgcgctgccgacagctatcgtcgtatccgtaataccgcgcgcttcctgctggcgaacctcaatggcttcaatccggccaccgatatggtcaaaccggaagagatggtggtgctggacaggtgggcggtgggctgcgcgaaaacggcgcagcaagagattctgaaggcatacgaagcttacgacttccatgaagtggtacagcgcctgatgcgcttctgctccgttgaaatggggtcgttctacctcgacatcattaaagaccgccagtacaccgcgaaggccgatagcgtcgcgcgtcgtagctgccagactgcgctgtatcatatcgcagaggcgctggttcgctggatggcgccgatcatgtccttcacggctgatgaaatctggggctacctgccgggcgagcgtgaaaaatatgtcttcaccggcgaatggtacgacgggttgtttggcctggaagagaatgaagaatttaatgacgcattctgggacgatgtccgctatatcaaggaccaggtcaacaaagagctggaaaatcagaaagccaatggcatcaaatcgaacctggaagcaaaagtgacgctgaaatatgctgacgatgctaacggtacgatcaagaagctgaaactgttgggcgaagaggtcagatttatcttcattacttcccagttcgtgatttctgagcaagcggggggtattgatgatgaaaatattcagtacaatgctggtaatacgacagttcaggcagtggtaacgcgtgccgagggtgataagtgtccgcgctgctggcactacactactgatgtcggcaaggtggcggaacatgcagatatctgcggacgctgtgtcagcaacatcgccggtaatggcgaacaacgtaaatttgcctga

SEQ ID NO: 372097 - DNA, 939 bp, Salmonella enterica
atgaagctgatacgcggcatacataatctcagtcaggccccgcatgggtgtgtgctgaccattggtaatttcgacggcgtacatcgggggcatcgcgctctactgcagggtttgcaggaagaaggacgcagacgcggtctgccggtggtggtcatgattttcgaaccgcagccgctggagctgttcgcgacggataaagcgcccgcccgcctgacgcgcctgcgtgaaaaactgcattaccttgcgcagtgcggcgtggactatgtgctgtgcgtgaaattcgatcgccgctttgccgctttgacggcgcaaacgtttatcagcgaactgctggtggagcgacttggcgtgcaatttcttgccgtcggcgatgatttccgctttggtgctagccgcgcgggcgatttcttgttattacagaaggcgggggcggagtatggttttgcggtttccagcacccaaaccttttgtgaaggcggcgtgcgtatcagtagtaccgcagtgagacaggcgctggcggaagataacctggcgcttgccgaaagtctgctgggacatccctttactatttccgggcgtgtcgttcatggcgacgagctgggacgtaccattggcttcccgacggcgaacttaccgctgcgccgtcaggtctccccggtcaaaggggtctatgcggtggaagtcaccgggcttggcgataagccgttacccggcgtagcgaacattggcactcgtccaacggtggctggcgtgcgtcaacaactggaagtgcatctgctggacgttgtaatggacctctacggtcgccatatagatgtaatactgcgtaaaaagatacgtaatgagcagcgatttgcgtcgcttgatgagctaaaagcgcaaatcgcacgcgatgagttaacggcccgcaagttttttgggctagccgggcaggtgtaa

SEQ ID NO: 372098 - DNA, 210 bp, Salmonella enterica; identical to SEQ ID NO: 73776

SEQ ID NO: 372099 - DNA, 1374 bp, Salmonella enterica
atgagttctgtcattgaggatacccagccttccgggtcagcatcattgtctttactacagcgtattagctacggctctttggatgtggcgggtaatctgctgtactgcttcggttcaacgtacattttatatttctacacagacgttgcgggcattagccttgccgtagcaggcgttatcctgctgctggcgcgtattatcgatggcatagacgcccccatatgggggatcatcatcgataaaacacgttcacgctacggtaaatgtcgtccctggtttttatggttaccgctgccttttgcggtattcagcgcactgtcattttggtctcctgatatcagtatgacaggaaaagccatctatgcagcaatatcttatatgattgccagcattctatttaccggacttaatacaccactcagtgcaatattacccctgatgaccttatctcccaaggaaagactggttttaaattcctggcgaatgaccggtggacaaattggggttttattaatgaacgcgaccgccttgccgttagtcgcttttttaggtaacggtgatgatcacgctggttttatttatacggcaattacgtttgccattatatcctgcgcgctaacgctctttgcgtttaaaaacattcgtgaaatggatacggataaaatacagcatgaacctaagttgccgatgaaaaaaagtttcgcggcgatgaaaggtaactggccgtggatcctgatggtgctggctaatctgatcttctggattgccctacagcagcgcaacacgaccattgtctattatctgacctacaacctcgaccgtaaagatctggtaccgctgattaacagcctggcgacgattcagatcctgtttatcatcgctatccccttctttagcaaatacctggctaaaacctggatatgggtaggcggtctgctggtcgccacgtttggcggcgtcatgatgtggctggcagcggacaacattactttcctcatcgccgcctggatactcggcaatatcggcagcggtatcgcctgctcaatgccgtttgccatgctggggttcgccgtcgatttcggcgcctggaagaccggtattaaggctaccggcattcttatcgccttcggcagcaccttctgcatcaagatgggtagtggcctcggcaccgctttcgccgcctggatcatgaacagttttggctatgtccccaaccatgcccagagtgctgcgggtctggagggcattatctgggcctttatctgggcacccgccctactcttcgcgctcgcagcgatcccactacttttctttcgcaaatacgaagcgatggaagagaagattcgccacgatctggaaaccgtcaactcataa

SEQ ID NO: 372100 - DNA, 2040 bp, Salmonella enterica
atgccatttatgcaacaagacccgcgtcgtctggtctggcagcaaaacgatcgctatttatggattgaaccctggggcgagaacagcctgcgcgtacgcagcggccgtcatctgccggtaatgagaaatgaagactgggcattgactgagccagtcgcagaaagtcagtgccacattgattatgagcaccaccaggcaacgctgaccaacggcaaaattatcgctatcgtcaatcaaaaaggacaagttaccttttaccgccatccacacaaacccctgttgcaggagttctggcgcctgcggggcgaaattggcgaggatgaatcatctcacggccagtacgttagcgcactcaaccttgagggacgcgagttccgccctattcagggtgggaaatattcactgaaagcccgcttcgaagccaccgaaggggaaaaaatttatggcatggggcagtatcaacaggccaacctggatctcaaaggatgcgtgcttgagctggcgcaacgtaactcccaggcctcagtaccgtttatgctctccagtctgggctacggatttttatggaacaacccggcagtcggacgcgtaacctttgcccaaaacgttaccgaatgggaagcgcaggtcagcgaacagttagactactggatcacggctggcgataccccggcagaaattagccgggcttacgcgctggctaccggcacgccgccgatgatgccggactacgctatgggcttctggcagtgcaaactccgttatcgtacgcaggaagagctgctggaggtcgcccgcgaatataagcgccgcaatctgcctatctcagtgatcgttatcgacttctttcactggccgaatcagggtgactggatgttcgatgcgcgcgactggcccgatcctgatgccatgattgccgagctgaaatcgctgggaattgagctgatggtctccgtctggccgacggtggataaccgtaccgaaagctatcgggagatgcgcgaaaacggctggctggtacaaacggaacgtggcttgccgatcaatatggatttcctcggcaataccacttactttgatgcgactcatccgggcgcgcgcgactacgtctggggcaaagccaaacgcaactattacgataaaggcgtgaagttattctggttagatgaagccgaacctgagttcagcgtttacgactacgacaactatcgctaccatgccgggccggtactggaagtgggcaatatctacccacgcatgtacgccaaaaccttttttgatggcatgaaagccgatggcgaagaccaggttatcaacctgctacgctgcgcctgggccggcagtcagaagtacggcgctctggtctggtcaggggatattcactcctcgtttagatcgctgcgcaaccagtttgccgccggactcaatatgggaatagcagggataccgtggtggacgacggatatcggcggtttccatggcggtaatattcacgacccgaaattccatgaattgctaattcgctggttccagtggggcgtctttagtccggtgatgcgtctgcacggcaaccgcgatccgcagattttacccgcgcaaccgtaccgggatggcattgctcaatgccctacaggtgcgccgaacgaggtctggagctacggtgaggaagtatgcgacgtactgacaggttgcctggcgttgcgagaaaaactcaagccctatatcaaagcgctgatggaggaaacccataagcacaatacgccagtgatgcgccccctgttctttgaattccccgaacaggaaacaagttggacaatcaccgaccagtattgttttggtcctgacctgctgatcgcccccgtcatgcatgaaggtatgcgcgagcgtgatgtctggctaccagaaggggaaacatggacggatcttgcgaccggtgaaagctattcaggagggcagacgctgcattacgctacgccactgaacagaattccggtgtttatccgcgaaggtgggcagtaccgtagcctgctgaacttgtag

SEQ ID NO: 372101 - DNA, 894 bp, Salmonella enterica
atgtctcatattaactacaaccatctttattatttctggcatgtctataaagaaggttctgtcgtgggtgccgcagaggcgctttttctgacgccgcaaaccattactggtcaaattaaagccctggaagagcgtttacaggggaagctatttaaacgtaagggacgcggtcttgaacccagcgaactgggcgagctggtttttcgctatgcggacaaaatgtttacgctaagccaggagatgctggatatcgtcaattaccgcaaagaatcaaacctgttgtttgatgtcggcgtcgccgatgctttatccaagcgtctggtcagcagcgttctggatgcggcggtggtggtggacgaacccatacatctgcgttgcttcgagtccacgcacgaaatgttgctcgaacagctcagccagcacaagctggatatgattatctccgactgcccgatagattccacgcagcaggaggggctattctcagtcaaaatcggcgaatgcagcgtcagtttctggtgtacgaatccgcttcctgaaaaagcgttccctgcctgcctggaagagcgacggttgctggtgccgggacggcgctcaatgctggggcgtaagttgttgaactggtttaattcacaggggttgcaggttgagatcctcggtgaatttgatgatgcggccttaatgaaggcgtttggcgcgacgcacgatgcgatttttgtggcgccgagcctttattcgctggatttttatgccgatgagtcggtaatagagattgggcgcgtggagaatgtcatggaagaatatcatgcgatttttgccgagagaatgatccagcatccggcggtgcagcgtatttgcaatgcggactactcggcattgtttaaactacagtag

SEQ ID NO: 372102 - DNA, 1167 bp, Salmonella enterica
gtgaaacatctgcaccgattttttagcagcgatgcctctgggggcatcattctcatcatcgccgctgcgctggctatgctgatggccaatatgggcgcgaccagtggatggtatcatgattttctggagacgccggttcagctacgggttggggcgcttgagatcaacaaaaacatgctgttgtggatcaacgatgcgctgatggccgtgtttttcctgttgattggcctggaagttaagcgcgaactgatgcaaggctcgttagccagtctgcgccaggccgcttttccggtgattgccgccatcggcgggatgattgtaccggcattgctctatctggcctttaactactccgatccggtcactcgcgagggctgggctattcctgccgcgacggatatcgcctttgcgctgggcgtgttggcgctgttgggcagccgggttccgctggcgctgaaaattttcctgatggcgctggcgatcatcgatgatctcggcgccatcgttattatcgcactgttttataccagcgatctttctatcgtctcgctgggcgtggcggcgttcgcgattgccgtgctggcgctgctgaacctgtgcggcgtcagacggactggggtatatattctggtcggggcagtgctgtggacggcggtactgaagtccggcgttcacgcgacgctggcaggcgttattgtcggtttctttattccgctgaaagaaaaacacggtcgctcgccggccaagcgtctggagcatgttctgcacccgtgggtcgcgtacctgatcctgccgcttttcgcttttgcgaatgccggcgtttctcttcagggcgtcacgattgacggtctgacctccatgctgccgttgggaattattgccggtctgctgattggtaagccgctggggattagcctgttttgctggctggcgctgcgtttcaagctggcgcatctgccgcaggggaccacttatcagcaaatcatggcggtcggcattttgtgtggcattggctttacgatgtccatctttatcgccagcctggcatttggcaatgtcgatccggaacttattaactgggcgaaattgggcattttgattggttcattgctctccgcagtggtggggtatagctggttgcgcgcgcgtttgaacgcgccggcataa

SEQ ID NO: 372103 - DNA, 1716 bp, Salmonella enterica
atgaatacgttaactacaacgtctgttgtccttcctgcgccgcgtccggcgattaatcagggtatcgatatcaataatgaaatggtgcttaaccataccgctatttatgaaaattgccttgcgcaggtcacgcaagagaatacggtagaaaatgcgctcatgttgttagacccttacggcacggcgcctttaagcgcttatgccggggtctggagtctggaaccggctgagatcatagtcacggtccaggatgcggcaaaaacggcgatgccggtagaacatctttacacccttacggcaggcgcaaatctgttgccggttctggggctggtagcggatactgaaaaccgtattgtcttttctcaggcagatacgccgcttgccgtctatacgctcatcacacagccattaccgccggtagattccgcggaggtcgtattaggttttccgattatcaacgtgacgcaacctgctaccgatgcggacaagatggcgccagggttttattttattacgcatttcgatcgctataattacgcattagatcagaatggtctggtgcgctggtacgttactcaggattatccgtcttataattttgttcgaattgataatggccatttcctcactacttcagaagcgaaaaatacctatctggatatgtatgagttcgacatgatggggcgtcttcacacattctataatctcgataatcaatttcaccattctatctggccgtgggatagcaataccattgttgcgccctctgaatatacctcgggtcggcccgacgatttgaaaaccaatgaagacggcgtatcggttgtcgatctgactaccggactggagacggcttactacgatatggcgaaggtgctggatacgacgcgggtttcccgtccttcaggtacggcgccgggagaagacccgacggttaaagactggctgcatataaaccagagctacgtgaatgagacgaatcagttgttaattgcgtccgggcgtcatcagagcgcggtgtttggcgtcgatctgcaaacgcaagcgctacgctttattttgtcaacgcatgaagactgggacgacgcttatcagccttatcttttaaccccggtcgacagtgaaggtgtggcgctttatgactttagcaaacaggaggatatcgacgcggccgaccgtgacttttggacttggggccagcataacgtcgttgaaatcgccaataatacgccgggtatagtggagtttatggtatttgataacggtaactaccgttcgcgtgatgacagcaaaagcctgttaccgccggataactacagccgcattgtccatttcgtggtgaatatgaatgagatgaccgttatgcggccatttgaatacggcaaggagctgggcgcgcgtggctacagtagctgcgttagcgcgaaagcgatccagcagaatggcaatattgtggtgcattttgccgactgcacgtttgatgaaaatggccgcgccatctcttgccagcctggcgagagcgatattatcgatccgcaggcgggcagcgaggcgatggggctgctaattttacaggagattgcgcctacggagaaaaccgtgctttttgaagcgaccatgacgtcaggttactacaaaaacgcggaaacgaacggggaaggctatcgctacgatattaccagtttccgggtgtataaaatggatctgtacgcgtag

SEQ ID NO: 372104 - DNA, 1248 bp, Salmonella enterica
atgttttctcacattaatgtcgatgcttgcaaaacgccaggctgcaaaaatctggggattctggggagcccagactatctaccgcaagggaaaaatgttctctgtcgagcgtgcggttttttgttccccattatctcagccagatcgcttaatctttttcgccaggcggcgaatcaaccctggaaaggtctggtgaagtcctgtccgcattgtggcgggacgtcgctgaaaaaatatggattttccactaaaggtgaacggcgtatgtattgccgccagtgtaataaaacgttcatctcctataccgctgtcaggagcgacgccagacaagagaaccttgccacgttgattggcgaaggagcgtcgctagttgaaatacgcgcggcgctggcgatagacagcacgggttttagccgcgaattacaaaaactgtcccgtcgcgctaatcaagcggaacgcgattttgtgtttcccgcgtttgatatcgctatgagcacgcgggcgtttcgtgtgaaatttaacggcggcgacagcagcttatacgtgctggtgacggcggaagaggagagcggtaaggtcgtcgcgatctcaacgaattactccgcccaaccggtggaagcggattatcaatatcattctgattacgaagaacgacttccgtccggcacgctggcgcatctggtgcagcgaaaagaggcgctgaccatgcgccgcaatgtattatttgatgtggattacggccccgccgttttatataaaaacgatccggggatgttagtaaaacccgtattacctgcttatcgacattttgagttggttcaggcgttgacggatgagcgttccctgaatgtccaacattatctcgatcacgaatgcttcattctgggcggctgtatgatggcgaattttagctatcttcgtcaggggcgctgccatatttcgtttgtgcgtgaaagaggcgttacgccgcccaaacgcgatctccctccgcggttgtttttgagcggcggaattcgcaacaacgtctggcgtacattttccacacgggattatgcgatggcggtatgcaatctcacaggaaataaaaaggtgagtttgttacgccatgcgacgttaaatagcgcgacggcgtttattcgctatgttcacaaccatcccttcctgccgcatcttaaccggatgtctcctggcaatgttgttgccgtactggattacctaaaatttgaatataacgcttcacgtaactga

SEQ ID NO: 372105 - DNA, 1191 bp, Salmonella enterica
atgatgtttgggaaaagttgtcaggtcatggttaaaccaaccggatcggtgtgtaaccttgactgtaagtactgtttttatctggagaaagaaaagctctatccggatcgaaaaaaccattacaaaatgtcggaagagaccctcgaactcttcatcaggcagcagattgccgcacaggatattgatgaggtcatttttgcgtggcagggcggggaacccacattaatgggcatcccgttttatcgtaaagccgttgaatttcagcagcgctattgtggcggcaaaaccatcgtcaataccttccagaccaacggcatcctgatcaacgatgactgggcgaccttcttccgggagcatgattttctggttggcgtctctattgatggcgatgccgcgttacacgatgaatggcgagtgacgcgctccggaaagccgacgcatgaaaaagtagaaaatgcggtgcgttgtctggcgcagcacgacgtagaatttaataccctcacggtggttaaccgtaccaatatgcatcatcctgttcaggtctatcgctacctgaaaagcattggtagccgctatatgcaatttatccctttagttgaacgctgcggggaaaatggactggcgcagccgcaggataaacatatcgcgatgacgccgtggtcggtcgatagcctgcaatttggtcagtttctgaatgcggtatttgatatctggatccgtgaggatatcggcgatatcggcattcagctatttgaacagacgctggcggcctggtgcggcctgccgccgcaggtttgcgtttttgcgcccacctgcggcagcgcgtttgcgatggaaatgaacggcgatgtttataactgcgatcacttcgtatatccgcaatttaaactggggaatatccaccagaagacgctgcgtcaaatgaatcagggcgaacaaaatcgccagttcggcagcgataaacagcgttcaatggcgcaggagtgtcatcgctgtcaatggaagttcgcctgctatggcggctgtccgaaacatcgttttttaccctctgcgtcaggcgcaaccaatcataactatctgtgtgcaggttatcaggcttttttctcgcataccgcgacggcgatgagtgccatgcgaaccctgtatgaaaaaggcatctcacctgcagaaataaagtcaatatttgtttga

SEQ ID NO: 372106 - DNA, 1494 bp, Salmonella enterica
atgaaaagaacagtcgttgccagtatgatagggttggcgctatgcgctggatgcgtattatcaaccgcgcaagcggcaaccgcaaagcgtcctaacttagtcattattctggcggatgatttagggtatggcgatctcgccacctacgggcaccgcatcgttaaaacacctaacatagacaaattggcgcaggagggggtgaagtttaccgactattatgcgccagcgcctctgtgttctccttcccgcgcgggcctgttaaccggtcgtatgccgttccgtaccggaatccgttcctggataccggaaggcaaagatgttgcgctggggcgtaatgaactgactatcgccaatctgctaaaacagcagggctacgatacagcgatgatggggaaattacacctgaatgcgggcggcgatcgcaccgatcagccgcaggcgaaagacatgggctttgactatacgttggttaatccggcgggatttgtcaccgatgctacgctggataacgccaaggagcgcccgcgctatggcgtggtgcatcctacggggtggattcgtaatggccaacatattggccgcgcagataagatgagcggcgagtttgtgagctctgaagtggtgaactggctggataataagaaagacgataatccgttcttcttatatgtcgcctttaccgaagtccatagcccgctggcgtcgccgaaaaaataccttgatatgtattcgcagtacatgaccgactaccagaagcagcatccggatctgttctacggcgactgggcagacaaaccgtggcgcggcaccggcgaatattacgccaatatcagctacatggatgagcaggtcggtaaagtgctggataaaattaaggcgatgggcgaggaagataacaccatcgtcatctttaccagcgacaacggccctgtcacgcgcgaagcgcgtaaggtatacgagctgaacctggccggggaaaccgacggtctgcgcgggcgtaaagacaacctgtgggaaggcggcattcgcgtaccggcaatcatcaaatacggcaagcacattccacaggggatggtaacggacacgccggtatatggtcttgactggttgccgacgctggccaacatgatggactttaaactcccgaccgatcgtacctacgacggtcagtctttagttccgctcctgaaggacaagacgttaaaacgccagaaaccgctgatcttcggtatcgatatgccgttccaggacgatccgacggatgagtgggcgatccgcgacggcgactggaagatgatcatcgatcgccagaataaacctaaatatctctataacctgaaaaccgatcgtttcgagacgctcaatcaaattggtaaacagccgcagattgagaaacagctttacggtaagttcctgaagtataaaaaggatattgataacgattcgctgatgaaagcccgtggcgataagccgacgcctgtcacctggggctaa

SEQ ID NO: 372107 - DNA, 762 bp, Salmonella enterica
atgaaaaataagaaatatattaatagtctactcgccgcatgtgttcttttctcttgctttaatggccaggcagcggagttgaaacgcgtatacggtaaacttagcttcggatatggcgactggaataaaggctttgtcaatgtcgatcgcggcgaagtgtggaaagcggtagccgatttcggcgccgtgtttgacaggggcgaatttgcatcattttatgaaatgaacgtgctcaaccatccggtagaaggccgtaaccatgttacccaatttctgggacattatagggtagtagaaggctctaactttaccgcaatgatgaaactctatatgtcgatggagaataaattcggtgatgaattaaacatgatgtacggggtaggttatctgggtttaaccagcccatcaggctttattaagccctatttcgctgttcataacttatcgaacgattatacctctaaaaagtatggacaggcgacaggctttaacggttatgttctcggttgggtcgcggcttataacttcgatatgtttaatgaaaagttcgtcatttcaaactggaacgaagttgaaatggatcgtaatgatgcctacgccgaacaacagggtgggacgaccggcctgaacggcgcggtaacgtttacatggaaatttatgccgcgatggaccgcctccgtctcttaccgttacttcaataataaattggggtatgacggctacggcgaccgtatgaattacctgatcggcttcgagttttaa

SEQ ID NO: 372108 - DNA, 1563 bp, Salmonella enterica
atgaacaaaaagttttcgatatccctactgtcgctgtgcattggtttgtcttcagccatttccttttcagccgatgcgcgtgacatcacaatttattatacaaacgatttacatgcccatgtaaccccagaaattatcccctatgtatccaagacacgtccggtaggcggctttgcgcccatctcgaaaattgtcaaagatgcaaaagcgaaagagaaagatgtctttttctttgatgctggcgactatttcaccggaccttttatcagtacgctgaccaaaggcgaggctattattgatattttaaataccatgccttacgacgccgtctctgtcggtaaccatgaatttgaccatggccatgagaatctggttaaacaactcagcaaattgcaattcccggtattgttggataatgttttttacagcggcacagatacgccattaattaaagaaccgtataccatcgtggaaaaagatggattcaagatcggcgtcatcggtatgcacggcgtttccgcattctatgaagcgattgccgcaggcgtgcgtgaaggcgttgactgccgcgatccgattccttatgtgaaaaaacagctggaagagttaaaagggaaagttgacctgaccgtgctgctcgcccacgaaggcgtgccgggtatgcagtccagcgcaggcgaggctgatgtcgcacgcgcgctgaaaaccgacgttgatatggcgaaatcgctggaaggctatggacttaacgtcctgattaccggccatgcgcataaaggtacgccagaaccgattaaagtgggcgatacccttgtcgtttccacggatgcgtacaccatcgaattaggtaaactggtgcttgactggaacccggaaaccaaaaaagtggacagctacaatggtaagttgatcaccatgtatgcggatacttataagccagatccggtcacgcaggccaaaattgacgaatgggataacaaggttaagaaaattaccgatgaggtggtcgcgcactctccggaagtgctgacccgttcttacggtgaatccgcgccaaccggcaacttaatcaccgatgccctgatggctaccgttcctggcgccgacgcttccttctataatgctggcggcatccgtaccgaattgccaaaaggcaatatcacctatggtgatgtgctgagtatgtatccgttcaccaacgatgtcatgagcatggaaatcagcggtaaagacctgaaatccatcatgtcacacgctgccgatctgaaaaacggtatgctgcacgtatctaaaaccgtccagtttaaatatgacagcaccaaaccgctgggccagcgtattgttgaatttgatatcaaaggcaaaccggtagaagacaataaactctataccgtcgcgctggactcctttatcggtaaaggtggtggcggatttaccttcactaaaggtaaaaatatcaaatatataggggtacaaaccgcaccggcgttggttaactatatgaagcaggttaacaatattcaacctgaccacaccatgcgcgtggatgatattagcaaataa

SEQ ID NO: 372109 - DNA, 1719 bp, Salmonella enterica
atgaataagaaaagttcgtcaatggttaacatgcccgcaccgcgtgagccgattaaccagaaaatcgataccaataacgcactggttttaaaccataacgccatatatgaacaacgattagcggagatcacgcaatctaatacctgtgacaaggccattgtcaccgtaaatccctacgggaccgccccgttgagtctctatctgggggtttggatggatgaagctgccgcgcttgagatcaatgttgttgatagcgaagcgacgacagaggcagtgcgttatcaatatgatgtacatccgggcgctaaccttattcctgtgtgtgggatggtatccgcggtgaataatcagattaccctacgccttgcctcgcaaattgtcgggcaatatacagtaatgacagacgcattaccgcccacggattcggctaacgtgagcctcggcttccctattattagcgtctcctgtcctgcgcagcaggcctcgctgatggaggaaggactttatttctccacttattttgatcggtataatctggcttttgatcataacgggattgtccggtggtatgtaagtcaggaaatcccttcttataattttgtcagaatggataacggccatttcctggcgacgtcacagggaataaaccattgtctgaatatgtatgaatttgacattatgggacgggtttatacggtttatcttctcgacaatgagttccatcactccattcttcccattgagaacaatctggcgattgcgccttcagaatatagcaatggacggccagacggttactcaaccgggaaagatggcgtttctattattaacttatctaccggacttgaagtcgcctattacgatatgctgtatgtgatggattattccagatcgccgcgtccttccggaagcgcgccaggtcaggacgtatcaatggatgactggctgcatatcaaccaaagctatattaatgaacccaacaatttgctgatctgttccggtcgacatcagagcgcgatttttggcgtaaatgtggattccggcgaactgcgctttattatggcgaaccatgaggattggtctgacgaattcaagcaatacttattaacccctgtcgatgatgatggtgtcccgctgtacgatcttacctcgccgggagggattgatgcggcagataagaatttctggacctgggggcagcataacattgttgaaattccaaacgatgagcctggtatcctggagtttatggtctttgataatggtaactatcgttcacgcgaagatgcgaaaagtctgttgccgctcgataacttcagccgggtggtgcagtttaaaataaacctaaacacgatgaccgtaacgcgtccgtatgaatatggtaaaacggaagtcgggaaccggggctatagcagttttgtgagcgctaagcatttattgactaatggtcacctggttattcacttcggcgcgacgacggttgatgagtttgaacataccattaccgcgcaaccaggttccagcgatcttgtcgatccggatgaagggcaacaggcgttaggtcgactggtattacaagaaatcaataaagagacgaaagaggtcttattcgaagcgatggtgacgtcgggctatttcaagaacgaagagacgaatggcacgaattatcgttatgatatttctgcatttcgggtatacaaaatgccgctgtttgcataa

SEQ ID NO: 372110 - DNA, 441 bp, Salmonella enterica
atgactatttatttaattaacagcacgcacacttacaatgataagaccaatgagctaaaaaacataaaaacgggaaagatgataaaaattgccgcaatgcgcataaagtgtctggaatatatgctgaatcatgcacaacaagagattatttataaaaaacaactcactaatgaactttggggggaaagaagtcaatttatcagcgacgccaacctgacccagattttatatctactgcggcgcgaccttaaaggctttggcctgagccagtttttttccacggtgcctcgaacgggtattaaagtagatgctaacattattatcagcaatgaaaacaaaagctgcctcccctcttctttaaaaaaagaagcgtataaatatatggcattatttttcgctttactgaccatggtcataacggttattcatttaatacgataa

SEQ ID NO: 372111 - DNA, 1005 bp, Salmonella enterica
atgcggccaataaaaaatgctaaaaaaattgactacaatctgatcaaagtgttcgatacggttattactgaaggaaatgcaaccagggcggcgaggaaactggatgtcacgcctgcggcgatctctcaggctcttcttcgtttacaaaatctttatggcgaagagttatttatcagaacccgcaaaggattagttccgtccagcaaaggtaaatcgcttcaccaggtatttcgccaggcaattgaatctatagaaagcacactgtgcgataaaacagatgctcaggagagtaatgaactcattgttctgggaggtgatatcactgaaaattactattttccagcattgctggatactgtgttgatgaatcgatatattattaaacactatgcgattaaaaaaacaggggaatactcaccagcctccatgctgacgcatggctatgcggatgtcatcatgggaattctggaaattaagaatgagatgattgaaagttatcttattgataatttatctgattttgtttgtgtttgtggtgaaaaaagtccattggttgggcttgaaaaaatttctttatataatttttatgctgccagacatgctgtctatcattcagatatgttctcttctttcaccgctgatagcattgatttattcaagagtagtacgccttatgcggggcgcagagaaataggttattatagtgattcactatttggagttatcggtgttgttgaaaaaagcgatatggttgcgattttgccaggaaagattgctacttattttagagatgtgcggcgttataatataaaaatactacgtatgcctgatgaaataatttttcgtatgttacccgtttatgcttatctggctacaaacagcacccattataaaaatgccaaaaaactgatatcaacatttcagtcgacctttctttttagccaggaaaagcagcctgacgctttggttgaaggaagcacatccttatgcgatttgtcggtttaa

SEQ ID NO: 372112 - DNA, 450 bp, Salmonella enterica
atgagacaatatactattaataacgaatttatttataatgagtcgttaagagaaataatatcattacatgataaaaaagtgctaaaggtgacgctaatgcgtgcgcgttgtttaagctatctttttgaaaatgcctacaagaaactgattacgcgggagatgatttcacacgcagtttggggagagcgaagtcaatttgttagcgatgctaatttgacgcaacttctttatctgctgcgacgagatttacaacaaatcgggcttttcgaactgtttgttacgctccccaggcaggggataaaaatcgatgaaagatttatcattgacgctgctgacataccgccacaagctattcaatatcatactcaccgatgtaataaaattatatccattggtattcccactctttttttattgatcgtgcttttctttttagcgccgtttatctga

SEQ ID NO: 372113 - DNA, 288 bp, Salmonella enterica
atgaagtctatgcgttgcgtcataccggtgattttactttcctttatcgttcatgaagggacagcgaaaccgaccgctcagattcattttatgggatcggttgttgaggcaggctgctggaatgacgtaggaaccttagaaattcaatgccataataaagagggagttgaacgttatattattgtcgagaatattatcacgccgatatcgtctcctcatgcaacggtaaaacgagattatttggatgaagataagcaattaacagtgctacgcattgtctatgactga

SEQ ID NO: 372114 - DNA, 846 bp, Salmonella enterica
atgtattatcacgcgttaaaactttcccgactggcgatgttgacgttggcaggcgttgccgtatccgcctcggcaatcgccgccgattctgccccgacgtcgcaaattggcccgacggcggaagcctacatcgtcagtcatccggataaagtgggagaggtggtggcaacgtatttggccgaacatccggaatttttggtcgccgccagcgagacgttgcatcagcgtcagcagattgcgcaacaacaggcgtatgttcaactggcattacagtatcgtgctgagttgctcagtagcagcagtccttccgttgggcccaacgaggcaaaagcggcggtggtgatgttctttgattaccagtgctcgtggtgcagcaaaatggcgcctgtggtcgaaaacctgattaaggcgaacccggatacccggtttattttcaaagagtttcctattttttcctcccgctggccggtatccggactggcggccagagtcggcgaacaggtatggcttacacagggcggggcgaaatatctcgactggcataatgcgctttatgccacagggaaggtggaaggcgcgttaacggaacacgatgtctacaccctggcgcaacattatctaacgccgacgcagctggccgccgtaaaagaagcgcaaagcagcggtgcagtacatgatgcgctcctcactaaccaggcactggcgcagcatatggactttagcggcacgcctgcttttgtcgtcatgcctcagacgcaagacggtgatgtaaaacgggtgaccgtgatcccgggaagcacgactcaggatatgttgcaaatggcgattcagaaagcgaaggggtga

SEQ ID NO: 372115 - DNA, 732 bp, Salmonella enterica
atgcctccgcaaccttcattcttgcctatgaataagttctttttacgctgcgcgatatattggtgcttgcttcccatatcatgggcgcaggctggcgtggtaattggcggtactcgctttatctatcatgcgggcgccccggcattaagcgtaccggtaagtaaccattcagaagcgtcctggttaattgatacgcatattttacctggtggccgctggccaggaaccaaaaacgaagggaatatcatgcccttcgtggtcacgccgccattatttatgctttcagcgcgccaggaaaactcaatgcgggtggtttataccggcgcaccgctacccgccgacagggaaagtctgtttaccttgagtatcgccgctattccctccggtaaaccggaagcgaaccgtgtacaaatggcgtttcgttcggctttaaaattgctctatcgccctgagggactcgccggcaatccgcagcaggcctaccggcatctgatctggtcgcttacccccgatggcgcgacggtacgcaatccgacaccctattacgttacgctctttttattacgcgctaacgagcgcgcccaggacaacgccggggtcgtggctccctttgcaacgcgtcaaacggactggtgccggcacacggttcgctgcactgtgcgctggcaaagtattaatgactatgggcgggtaatgacagcgcaaaccgtggatctgacgcgtattcattaa

SEQ ID NO: 372116 - DNA, 519 bp, Salmonella enterica
atgcgtaacgatatcctgtacggcatcgggatgctgctggcggcatccggcgtccaggcgcacgatggccgggtctatgtttccggaaccatcacggacaatacgtgttcgctctctcctggctcggaaaatattaacgtggcgatgggcgcggtttctcaacggcagttttatcgcgcgggcgacggttccgcatggcaaccttttgctatcgatttacaaaactgcggcagcactgccagcggcgtaacggtcagttttagcggtgcggcggacagccgtaatacggatttattggcgcttaccgcaggggaaagcgacgcttcaggcattgggattgcgctttatgatcaaaataaaactttaatcccactggggcaagagagtgatgtggtgacgctcagtccgggtcaggcgtcggcgcatctgcaattttacgcgcgttatcttgccgatggcggcgcggtaacgcccggggacgccaatgcctccgcaaccttcattcttgcctatgaataa

SEQ ID NO: 372117 - DNA, 546 bp, Salmonella enterica
atgaacagatcacactgcgctctttttgccatgggactaatgctgtgtccgcaaatcaatgccagcgctgacgacctcgcttataacctcgaatttaccggcactattgtggcgcaaacctgcgacatagatatttccagtctcagtcaaagtattgatttaggacagtttgcggttggcgactttccttcgacaggaacaacgacaaaatttaagccctttaatatcaacctcaaaaattgttcccgaggaattgccggggcgaagatctggtttaccggcgaacccgatccggacaatcccgcgctactggcgataaccgacaccgggatgggaagcggaaacatgttagcaagcggggttggggtggaaattctgaatgatgatcaggataccatcagtatcaataatgccgactcggtggtctatccgttgaaagccggacgcaacacgctgtctttttatattcgctataaatcgacccggccgacggtcacgtccgggaacgcgacggcggtcatgtatttcgatatgcagtatgaatga

SEQ ID NO: 372118 - DNA, 1008 bp, Salmonella enterica
atgaaaatacctcttttatttgctctgctggcgggaagtgtcgtatcgcagtacgccttcgcagacgtgtgtaaaaacgttaacggcgtgccttccagtattaattacgatttaacgaccactctgacggcagaacaaaaccaggtgggaaagacggttcaactggaaaaaagccaggaagttaatgtacaggcggtgtgtcccgccggcgcgtcgacctatagccagacttatcgctcctatgtgtcgccatatccggtcgtagaaacgagcggtaactggaaatatttaaagctggacccggactaccttgaaggcggaatgcgaattgaggattcttcggcgggcgatatctatccgccaatgaacaacgttctgatgggatatgatgaaaatgtgaaagcgggtcaaccgttttacgttcgtgactcaaatctggagtttcagctcaaaattgttaaaccgttcgtcggcacggtgaatattagtcctaagactatgttcaatgtttatgtcatgaccgccgcaggcgatccgctgacagatgtcgtatacagcattctttatagtggaacggtgaccgtaccgcaaagctgtgaaatcaacgccggacaaacgattctggtaaatttcggcgcattatacagtggcaatttcaaccatgcaggccaaaagccggagggggtacgagcgaaaaaattcagcgtaccggtaaagtgcagcggtctggattcgcaggtcaatttaacaatgcgtcttatcgctacgccggatagccacgttccccaggctatcgcttcggataatgccgatgtcggcgtagtggtcgaaaccgatgaaggaaacgcgcttatccccaatgatgcacagagcgtcgcgccttttatcaccgatagcgccggacgcgctaacatcacattgcaagcctacccggtaagtacaacaggcgaaacgcctgcggaaggggcgtttaccgcactggccagcctgcgagtggactttgactaa

SEQ ID NO: 372119 - DNA, 2622 bp, Salmonella enterica
atgcgtaatcagcttttcatgacgcgatattactccagcgtaactaaacccgtattaaccccgctggcgttggctatcgcattggcgcctgcgccggggtgggcggaaaactatttcaacccggcatttctgtctgacgacccgtctgcggtggccgacctatcgaccttttcccgtaatgcccaggcggcagggatgtatcgcgttgacgtttacctgaacaatacgtttctcgcgaccagagacattgccttccaggcggtgaaaacgacgggaaaaagcgcgcccaccgatgacagcggattacgcgcctgcctgacgcctgaaatgcttaaaaatatgggggtaaacaccggggcgtttccactgttggcgaaggcggcggcgggaagttgccctgatctcgccagtgcgataccggccgcccggacccgctttgattttgcgcagcaacgtctcgacattagcatcccgcaggcggcgatggttgccagcgccagaggctatatcccaccgaaatactgggatgaaggtattaatgcgttgctattgaattacacctttaccggcgcgaatagtcaggatcggagcccaggcggcagtgcggagaacagctattttcttggattgaatagcggccttaatctgggggcctggcggttacgcgactactccacatggaacgcgaatagcggcgatcagaatagcgacagcgactggcagcacatcagtacttatctggaacgtgatgtggtctttttgcagggagaactgacggcaggcgatagttataccccctccgcattattcgacagccttccttttcgtgggctacaactggcgtctgacgacaatatgttgccagacagcatgaagggcttcgcaccgaccattcacggcattgccagaagcaacgcgcaagtgaccattcggcaaaacggctacatcattaatcagcgctatgtgccgcccggggcatttactattaatgatctctatcctaccgccgccagcggcgatttgactgtggaagtcaaagagtccgacggttctattaatcgctataacgtgccctattccgccgtgccgattctacaacgagaagggcggctgaagtatgcggcgacggtggcggagtatcgtagcgagagtagtcaaaaagagaaggtgaaattcagtcaggcgaccttgatatgggggttaccgcatggttttacgctgtatggcggaacacaactttccagtcattatcacgcgctggcgatcggcagcggcgcaaatctgggcgactggggcgcggtgtcgctggatgtcacccaggctaccagtacgctggcggataataacacctaccaggggcaatcgctgcgtttcctgtatgccaaatcgcttgcacagtcaggaaccaatttacagcttatgggctatcgctattcaacctcgggcttttacacgttggatgataccacgtggaaacggatgagcggctatgacgatgacagtcggactgacagcgataaaagcaggccggaatgggcggattattacaacctttattacaccaggagggggaaagtacaactcgatatcaatcaacagctaggcgggttgggatcgctttttattaccggcagccagcaaagttactggcacactgatgaaaaggattctttgttgcaggtgggatacagcgatacgctggcgggtattgcatggagcgtttcttacaacaataacaaatccgcaggcgatgcggagcgcgatcaaattttcgcgctgaatatctcggtgccgctaagtcaatggctgcaacacgatgatgaggtcacgcgccatcacaatgtttacgctacctttagcaccagtacggacaaacagcataacgttacgcagaatgcgggccttagcggcacactgctggacgaaaacaatcttagttacaacatacagcaaggttatcagaatcacggtattggcgaaagcggcgccgccaggctggaatacgatggcgcgaaaggcaacgccaacattggctataacgttagcgataacggcgattaccagcaggtgaattatggcctgagcggcggcctggtggcgcacgcgcatggagtgacactaagccagccgctgggcaataccaatattttgattgccgcgccgggcgcagccaacgtcggcgttgtcgaccagccgggtattcatacggacgcgcgtggctatgcggtggtgccgtatgcgacaacatatcgccaaaaccgtatggcgctggacgttaacgccatggctgatgatgtcgatattgatgacgcggtgactcgcgttgtgccgaccgaaggcgcgctggttctggcccgctttaaagcgcgggtcggcgcgcgtgccctggtaacgctgaatcataacggtaagcctgtaccctttggcgcaacggtgacggtgaatgatcgccatgcggaggcgattgttgacgaggccggggaagtctatctttccgggttgtcagcgcaaggcgttctgcacgttcgctgggggaacctgccggatcaacagtgtgtcgcgtcctatcatctctcttcctcccgtcagattctgagtcgacaacatgcggagtgtcattaa

SEQ ID NO: 372120 - DNA, 558 bp, Salmonella enterica
atgaaaaaaatcgttctgtcctcactgctgctgtccgctgccgggctggctaccgtaccggtggcacaggctgacacccattccgtgtcggtgggatatgcccagagccggatagagcattttaaggatatccgtggggtgaacctgaaataccgctatgaggctcagacgccgctgggactgatggcgtcgttcagctggcagtcaggtaagcgcggagagtcaggtggcattcctggcggaatgagctggcgcgatgatgtgaaggcaacgtactggtcgctgatggcgggtcccgctgtccgtgtgaacgagctggtatctctgtatgtcctggccggtgccggtaccggcagggctgaagtgaaggagcatatcagcatgccgggatacaacggacggttcacgggttcggagcgcagaacggggtttgcctggggagccggcgtgcagtttaatccggtggaaaatgtggtcatcgacctgggctatgagggaagtaaagttggcgcagcgaaactgaacggcgttaacgttggtgtcggttaccggttctga

SEQ ID NO: 372121 - DNA, 747 bp, Salmonella enterica
atggagctggataaatatcttctttttttcctggcaggaggatcaaccttcaaccagggaaaggcattttcatttcgttgcgctcaggacagtattgtcctgacgaaagtgcatcagacagagatgcatttttaccggcggtaccatcatgtggtgataacaagggaaacgctgtgccggtttgcccggcagctggatgtggatgttcttaaattttatatcccgaaagacatcccccggtaccttgtgcagccttgcccggaggactctgtgttccgtccgttgatggtgagactctgtgccggaacggataacggtcacggagagaccggaccagagaatccgttcctgacgtttgcactggtatcggccttttgtgagcaggatatttttttccctttcctgaagacatgcctgaaacaaagtatggcagaccaggtggctacggtgataaaccggaatgtgagtgaaaactggaccatacaccgggttgccagcgaactgtatgtcagtgtcagcctgttaaagaaaaaactgaaagaggagaatacatcctacacacgtattctgttggaatgcaggatgaaaaaagcatcggagttaattgttatgcaggagggggcggtcaagaaagtggcatatcagtgcgggtacagtagcgtgccgtattttatcagccagttcaggaaatattacggatacacgccttcaagatgcaggcctgacggaaatttatttaaaaaataa

SEQ ID NO: 372122 - DNA, 870 bp, Salmonella enterica
gtgactgacacccgaacactgttcactcattaccgacaggtcaaaaatccgaatccggaattcacgccgagagaagggaaaaagaccctgccgttctgtcgtaagctgatggcgaaagccgaagggttcacgtcccgttttgatttttccgtccatgtggcgttcgttcgttcgctgggaaagcgtcaccggatgccgcctttgctgcgccgtcgtgccatcgatgcgctgcttcaggggttgtgcttccattatgatccactggccaaccgtgtacagagatccatcaccaatctggctatagagtgcggtctggccactgagtcaaaaagtggtaatctgtccatcacccgcgccacacgggcgctgaagtttatggcagagctggggctgattacctaccagaccgagtacgatccgcagattggctgcaacatcccgaccgatatcaccttcacgccggcactgttctccgcgctcgacgtttctgacgtggctgttatggccgcccgctgcagtcgtgtcgaatgggaaaatcagcagcgcaaaaagcagaatctggagccactggagatggacgaactgatagcgaaagcctggcgatttgtgcgcgaacggttccgcagctaccagtctgaacgtaaactgcacggactgaaacgcgcccgggcgcggcgtgacgcggacagaacccgtaaggacatcgaaacactggtgaaacagcagctgacgcgggaatacgccagcggacgctttaccggcgggcttgatgccatgaagcgggagctgcagcggcgcgtgaaagagcgcatgatgatgtcgcggggcaaaaactacacgcgactgaccatggccaccgtccccatataa

SEQ ID NO: 372123 - DNA, 246 bp, Salmonella enterica
atgtcgcagattgaaaatgcagtaacttcctcatcgaaacgcatttacagaaagggtaatcccttatcttccgctgagaagaagagattatctatttcacgaaaaaagacgacgcataaagagctcaatgttttcatacaaaacatacataaagaaagcttgcagcagctttgtgaagagactggaactactcaggctcaaatgattgagctactaattgaacgggaaatggctaaaagagcctga

SEQ ID NO: 372124 - DNA, 180 bp, Salmonella enterica
atgaacctgctgaccagtgccggcattccggttcgtaccgtcagtgtgtacaaaattcttcatgacaaagtgatcgtcagcgacggtcgccacaccgaagtgggatcgtttaactattcccgtgcagcagaccgttcgaattcggagaacgtgctgtcgtctgggatgactcagtcctag

SEQ ID NO: 372125 - DNA, 285 bp, Salmonella enterica
atgagactcaggaaaggtcatggattgacgttggtcacacttgcgtgtttatccctgctgggctccctgccagctattgcggcaccgtccgttcaggccggtttttcaccggagggcagcgcagagcagctggttcttaagactattgaggctgcgcaacataatatccggctgatggggtattccttcacctctccggaggtggctggcgctcttattagtgcaaaacgtcggggagtggatgtcagggggggactggaaagccaataccgggaaaaacaataa

SEQ ID NO: 372126 - DNA, 453 bp, Salmonella enterica
gtgtttaagtactggcccacatttgtacagcagtgggaaaactcgctgaaagccgcacagaaggggctggaaatctggaaatcagcgagggcggatgcctggcttgcgtatcacaacggtatttttgccaccagtcattatgaaggcgcgctcaccagtgaagatatcagtagtgcggcggccgccgccctgaaagggcataaaatcaggggtggaaacgtgaacacgaaaagcatactggatgccagtaaccgactggcacatacgcttgcgctgcagggctcgccggtgatgataatgatgccggttaagaaggccacggagaagaacgtgacagtgataccgggcggcgcgggacaggaaactctggaaaacgcggccgtgctgattctggccgggatggagcgtaatgatcgtgccaccactagggaaggcaataacaatttatcctga

SEQ ID NO: 372127 - DNA, 423 bp, Salmonella enterica
gtgcgtgaagcgtcactggcagaaaaaaaagcccgggcaagaaaagatctgtccatctacctgcgatttcagtcagtggaggaagcggtcagcacgctgaaaccctggtggccggggctgtttgacggcgacacgccccgtcttttcgcctgtggcgtgcgtgaggcgctgtttgaggacgcctccaggcgtggtatcccgctgtcacacaaaaagataatccgtgcgctgaaagcgattgcccgttctgaagcatatctcagcgcgatgaaagccggggcctgccgatatgacacggaagggtatgtgacggagcatattaccgtggaggaagaacagtacgcgctggcgcgactggcaaaggcccgggcgcagaacgccagaaaagcggaactccgcgcggtgctggcgcagacggtctga

SEQ ID NO: 372128 - DNA, 333 bp, Salmonella enterica
atgaaccggatttcatgcctgatccctttctgcggcgtgcttctgctgtccggatgcgccggaacgaattccgactttgaatgtaccgccaccacgtcagacacctgtatgacgatggagcaggccaatgaaaaagcgaaaaggcaggagcaacctgagacggtaaagccgggtgcggtatcactgccgcacctggctgagggtaactttcgcacgacgccggtacagaccgtcagtaccgtcacaccgaccgtcggaaagaccgtggccgccccgcgttccgggcagaaccgccggcaccacacccgctgtttacggctgtccgggaggtga

SEQ ID NO: 372129 - DNA, 216 bp, Salmonella enterica
atgaacatacgtaatgttatttcagttcctgatgaacccgtgcaggatgattttgtgaaatctgttatcagtaactgtactacaaaaataatactctccggtctccgggaatataatttttcagttcccggaatgcctggcgcagggaaaacatgtgttctgtctgaattaatcaaaaagctgctgcgtgagaataagaaaggggcaaaatcatga

SEQ ID NO: 372130 - DNA, 597 bp, Salmonella enterica
atgggaaataaccggctgaacagcctgaaggggcgtgccgttttatatcgtattgccggtcttctgcgctggctgatatggggcgtgaaatatgccattatctggccgctggccacaacagccattgttgtcattctgctcttccggacgggggataccacgccgggacaacagatggcgcaggaaatcggacgggtgagggcaatggccccgtccgggatgtttccggtccgggactgccctgacccggttttcacggtgtcgtcacctgtaccgctgaatctgacggaaaactgtccgctaaaaataaccggcgcggaagaatacgcggcagatatcgaccagtccctgtcgcaaacgggatggctgttatgggggatgctggcgctgttgtataccgcggtggcagtaatgatcggagaccggccgtaccgtcacaatccactgacatatgcgtatgacacagcgacaaacaacctgaagtatattgataaagaaaacgaaatccggactttaaaagaaaatacaaacgggcaggtttattattccggtaataaagaggctgaaaaagagggtgataaaaatgaacatacgtaa

SEQ ID NO: 372131 - DNA, 1422 bp, Salmonella enterica
atggcgagcatcaatactgttgtaaagcgtaaacagtacatctggctggggattgttgcggtgggtgctgccgctgccattggcggaggcctttacctgtctgacgtcgacatgagtggcaacgggacggccgcagagcaggagccggtaccggatatgaccggggtggtggacacgacctttgatgacaaagttcgtcagcatgccaccacggaaatgcaggtgacggcggcgcagatgcagaaacagtacgacgaaatccgccatgagctggatgttctgaataagcagcgcggtgacgaccagcgtcgtattgagaagctggggcaggacaacgccgcgctggccgaacaggtgaaggccctgggagcgaacccggtgacgaccacaggagagcccgtgccgcatacacctgcctcaccgcccggtccggaaggagaacctcagccgggtaatatgccggtgaccttcccgccacagggtgccgttcctccgccaaccgctttttatccggggaatggcgttacgccaccgccacaggtgacataccagcccgtgccggtgccgaaccgtatagagcgtaaaacgttcagctatgacgccgccgtgaaaaaaggcccctccctgccgtatatcccgtccgggagctttgcaaaaaccatgctgatcgaaggggcggatgccaatgcttccgtcaccggtaatgaatcgacggttcccatgcaactgcgcattaccggcccggtggaaatgccgaacagtaaaacatatgacctgacagggtgctttgtgggcctggaagcctggggggatgtgtccagtgaacgcgcgatagtacgtacccgtaatatcagctgcctgaaggacggcaaaaccatcgacatgccggttaagggacatgtcagcttccgtggaaagaatggcatcaaaggtgaagtggtgatgcgtaacggcaaaatcctcggctgggcgtggggcgccggttttgtggacggtatcggccaggggatggaacgggcatcccagccggcggtggggctgggggccactgcgacttacggcgcgggcgatgtgttcagaatggggattggtggtggtgcatcgaaagcggcacagacactcagtgattattacatcaaacgtgccgagcagtatcacccggtgatcccgattggtgccggtaatgaagtgaccgtggtgtttcaggacggttttcagctgaaaaccgtggaagaaatggcacaggagcaggcccgtcaccggaaggaggatgaaaatgcggaaagcccggtgcctgtacctccgtcagtcgacagccatatgaacggctttaacaccgaccagatgctgaagcaactgggtgacctgaatccacagcagtttatgtccggcagccagggaggacatgcaaatgggaaataa

SEQ ID NO: 372132 - DNA, 741 bp, Salmonella enterica
atgcgaaaaaataagccgtataagccatttttactggcggccggatggttattttccggtctggtgatggcgtcgggttccggtacgctggccccggtggtggtgtccctggctaacggcggtcaggcgaacattgctgtcagcaacaccgacccgaacctgtttacggtgccgggtgaccgtatcactgcggtcagcggtctggacggcatgctgacaaacagtgagcagacaggcgcgggcggcgtggtggtggccacggtcagtaaaaagccgttcaccttcattctggagacggagcgcgggctgaacttttccgtccgggccgtcccccgggccggtgccgggcgcaccgtacaactggtcagcgatctgcgcggaaccggggaggaggctggcgcatgggaaacggccaccccatatgaatccctgctggttgccgtcagccaggcagtacgtggaggtacgctgcctgccggctggtatcagatccccgtcacgaaagaagcgctgcaggccccggccggtctgtctgcccgggctgacgctgtgtggaccggcaatcacctgaaactggtacggtttgctgtggaaaataaaacgccgtctgccctgaacatcagggaaagtgatttctggcagccaggaatccgcgccgtgatgttcagccagcccgtcagccagctactggccggtacacgaatggacgtgtacgtcatccgtgacggggagggcagctga

SEQ ID NO: 372133 - DNA, 567 bp, Salmonella enterica
atggaacacggcgcccgtttaagtaccagccgcgtactggcgataagttttatttttatggccctgctgattgtgctcagtctggccgtgaatgtcattcagggtattaataactaccggctgcagaatgagcaacgcacggcagtcacccctatgggatttaacgcgccctttgcggtgtcacagaacagtgccgatgcctcttatttacagcagatggcactgtcgtttattgccctgcgtctgaatgtgtcgtcagaaaccgtcgacgcgtcacaccaggcacttctgcaatatattcgtccgggtgcacagaaccaaatgaaagtcattctggcagaagaagcgagacgaattaaggccgacaacgttaactccgcttttttccagaccagtgtcagggtctggccacagtatggccgcgtggaaattcgcggtgtgctgaaaacctggattggagattcaaaaccgtttaccgacatcagacattacattcttattctgaaacgggaaaacggcgtgacctggctggatattttcggggaaacagacgatgcgaaaaaataa

SEQ ID NO: 372134 - DNA, 312 bp, Salmonella enterica
atgtcgggagacgagaataaactcaggaaatatcgtttcccggaaacactgaccaaccagagccgctggtttggcctgccggtggatgaattaattcctgctgctgtctgtattggctggggattaatgacatcaaaacaacttttcggcatcagcgctgcggttctggtttatttcgggataagaaaagtgaaaaaaggacggggaagctcctggctgcgtgacctgatttactggtatatgccgacagccctccttcgcggtatttttcataacgttcccgattcgtgtttccggcagtggattaagtaa

SEQ ID NO: 372135 - DNA, 363 bp, Salmonella enterica
atgagcgctattttaagtgttcagggtgcttctgcgcccgttaaaaagaaatcgtttttttctgagttcacacgtctgaacctgctgaaacttgcccgcgcagtgatcccggcggcagtgctgatgttctttttcccgcaactggcaatggctgccggcggttcgcaggacctgatggccagcggtaacggtacggttaaggcgacatttggtaaggattccagcgccgtcaagtgggttattctcgcggaagtgctggtcggtgccgtgatgtacatgatgaccaagaacgtcaagttcctggcgggttttgccatcatctcggtctttattgccgttggtatggctgtcgtcggcctctga

SEQ ID NO: 372136 - DNA, 228 bp, Salmonella enterica
gtgaggaggagaaacgcaagagaggggataagtcgaactgtctcagtgtatctcgatgaagatacgaataaccgtcttatcagggctaaagatcggagtggaagaagtaaaacaatagaagttcagattcgtctgagggaccatctgaagcgatatccggatttctataatgaagaaattttcagggaggtaattgaagaaacagagtccacatttaaagagatttaa

SEQ ID NO: 372137 - DNA, 312 bp, Salmonella enterica
atgtgtccgacggatcgtagagaaagaacactcgccagtcaatctgtaaataaatacattctgagtattcaggagatctataaaaactcaccagttcctgtttgcgtccgtaatcaaagccggaaaatcctttacgcaaatggggcctttattgaactcttctctaaagaggatcagcctctttccggagaaagttataatcgttatcaggttgaagttttctgtcatccctggaacttgaatgtcagtcgcttggacatggagctgctttttgccggcgttttaattttcatggggaaatttatcagataa

SEQ ID NO: 372138 - DNA, 381 bp, Salmonella enterica
atggctaaagtcaatgtatatataagtaatgaggtacacaataaaataactgctattgtggaaaaacgacgccaagaaggggcgagagataaagatatcagtttttctggtacatcttcgatgttgctggaattagggcttcgtgtctatgaggcacaaatggagcgtaaggagtcgccatttaatcagacagaattcaataaagtattacttgaaaatgtacttaaaacacagtcatccgtagccaaaattttaggtataggatctctcagccctcatgtcgccggaaatccaaaatttgaatatgcaaatatggttgaagatatcaaagaaaaagtatcttcagagatggaaagatttttccatgaaaatgaagaataa

SEQ ID NO: 372139 - DNA, 471 bp, Salmonella enterica
atgtataaatggctcctgtctgtcctcctggtattaatgagcacggtagtccatgccgctgactgttttgatctggccgggagagactataaaatagatccggatttactgcgggcgatttcatggaaggaatcccgtaaccgggttaatgccgtcggtattaacccggttacgggatatggctcgggattaatgcaggttgactctcagcactttaaagaactggctcgttatggaataaaaccggaacaacttgtctccgatccctgcctgaatatttacaccggagcttattatctggcaatcgcattcagaaagtggggggtatcctggacagcagtcggagcgtacaacgccggatttaaaaagactccccttcaggatgcgcgtcgtctggactatgcgactgatgtacaccgaatctggatcgcgataaaacaaagtaaaaccaggcagactcccgcccgatga

SEQ ID NO: 372140 - DNA, 291 bp, Salmonella enterica
atgacggttcgtcaagttatcagatggttcccgggctgttcagatttatctgtacaaatggactggtatgcggatcattttggtgaaatacgtgtgccacacaagggagatattgttgggcaggtgattgagggggattatgaggttatggggatcttcgataaagccaccgaaaatatggagtcaatgaagtcagtgatacttaatcaggatgagcaatatctgtttggtaaagcggcactgactgtcagatatgaggacgaaaataaaatccctgtttctcctgaataa

SEQ ID NO: 372141 - DNA, 270 bp, Salmonella enterica
atgagactcgcttcccgttttggtagacagaattccattcgtcgtgagagtcctttggctgacgctgaattaatgcagactgtgccttcagttttttccggagacaaacatgaatcccggagcgaacgttatacttatattccaaccattaatatcatcaacaggttacgtgaggaaggttttcagtcgttctttgcctgccagagtcgtgtacgtgatttaagtcgccgggaatacagtaaacatatgctgcgttttcgtcgtgaatga

SEQ ID NO: 372142 - DNA, 159 bp, Salmonella enterica
atgaaaagccagctggtagccgctgctgatcgtgcggccatgagtgtcgcgtatggtcaggaagccgcagatcattacggtattcagtatggttttatccggtctgtacgtgactggatcaccggcttcaccgaggggattaaaggggagcgttgttga

SEQ ID NO: 372143 - DNA, 660 bp, Salmonella enterica
atgtcccgccgccgtggagcacgtctgcccgccctgccacatgcgcgtacttttttgcgcgtgctgagcggcagcagccggattaacacgacagtggcacagcgtattcccggcctgaactgggagccgaagaaccggctgaccagcctgaaacaggtggaagaggcgctggaccgcctcatctccagccacggggagtattgcccgctaccactctccgtggatgtgcaggccgaactgttcccggaggtgatacacgcgcgcacagatcgccggatgcagcgtgagaaaatcgcctttaaccgcaaaatgcgccgggaggaaaaagcgctggaacatgcctggctgctgcgccagaacctgctggggcaggccatgacggagcttaactttcagtcgccggaaaccgtcaatgcctggtatacgcgctgggctgacgagtttgacgcgcgggagctggcgcaggggttctggcagtggcggacgcggtttacctcgctgacgtcgctggactggctgcgcgacagtgatgagccgctgtacaacgtgatgtatgaaatctggttcatcgtccgggaaaacccggtatatgtgcgcgaggccgaacgttggcaggtacccaacaagctgacgaaccggaggcccgggcgacttccctga

SEQ ID NO: 372144 - DNA, 1752 bp, Salmonella enterica
gtgccgcgtccggcctgtcacgggacgggcgctggcggtcgccgtctggcggcgatgaatctgttggccactgagaacacgatccacccggactggcctgtccgcgtgaaggttgtgccggataatctggcgaccgccgcttcactgaccgagaacgggcagcatctggaaatgcaccctgccgaacaaattgcgggattccgcgcgatggcagcggaaggcaaaactcctgcacagactggcgatctgctgggctattcgccccgtcacgtacagcggatgctgaaactcgcggggctggctccggttatcctggaagcgctggctgcggacaaaatcaccacggagcactgtcaggcgctggcgctggaggacaatcccgaccgtcaggtgcaggtgtacgaggcggcgtgtcgagagggctggaacaataaaccggaagtgcgcgtgatccgtaatttgatcaccgacagtcaggtttccaccctcaacaacagcaaatatacgtttgtcggtgaaaaagctttctccggcgatgaaatccgcgcagacctgttcagcgacgaacagggcggttttgtggacaaactggcgctggatacggccctgctggaaaaacttcagtgggtggcggagtgcctgaaagaggccgagggctgggcatggtgcgcgggacggatggagcctgtcagccgctatggtgaggataccgaagtgtaccgtattcaggatgagcctgacgcggtttacacggagcaggaacagcagcgcctggacgagttgcaggaactgtacgacgaaaaccagaccgccagcgatgaaaccgacacgatggagtcagagatagaggccatcgaatgcgcggcacaactccgggcatggacgctggaaatgcgcgcacagtccggcgtggtggtgtcatggcgtcacggtgaaatctgtgtccagcgcggggtgagcctgcgtgagcagtctgaaacggaagatgaacccgctcaggttccggtatatgagcgccagccggagcctgtggacgaaatcagtgttcccctgctgaccagaatgtgtgcagaacggacattgtcggtccaggcggcattgatgcagcagccggaaaaatccctggcgcttctggcatggacgctgtgtctgaacgtgttcagcagcggcgcgtataaccgacccgctcaaatcagcctgaactgtaagcattactccctgacaaaggatgcgccgtccggcgagagcggtgttgcgtttgtgacgctgtcgcaggagggaaaacgtcttgaaacgttgctaccggagggctggacacaggacttcaccacctttttcaccctcagcgccaaagaccttaccgccctgctcagtttctgcaccgcatgcagtcttgacggtatgcagatgcgcggcgccggaggcaccacccgcagtccgctcgataagctggaaatcgcgctcgctttccatctgcgcgactggtggcaaccgacgaaggccgatttcttcactggccttaaaaaaccgcaaatcatcgccgcgctgaatgaggccggactgacaggcgcggcgcgggatgcggagaagatgaagaagggtgatgcggctgaactggcagaggacaaaatgcgtgacaaccgttgggtgcctgtctggatgcgcgcccctgatgcagaaaacgacgtatctgataccgaaaacggcagtgctgatgcagacagccaccacaccctgcccgatgcagcctga

SEQ ID NO: 372145 - DNA, 423 bp, Salmonella enterica
atgttactgcttgtagcacccgaacaggagccggtacagtccactgccccgctgttcaccgaacgttgcccggcggggtttccgtcgccggccgccgattacacggaggaggaactggatctgaatgcctactgtatacggcgtccggctgcaacattcttcgtcagggctatcggggattcgatgaaagaaatgggtctgcattccggcgatttaatggttgtcgacaaagctgagaaccccatgcagggggatattgtcatcgcggaaacagatggcgagttcaccgttaagcgcctgcagttgaagccccgtatcgccctgctgccgatgaatccggcctaccccacgctttatccggaagaactgcagattttcggggtggtgacggcttttatacacaaaacccggagcacagactga

SEQ ID NO: 372146 - DNA, 1275 bp, Salmonella enterica
atgttcgctttggctgacgtcaactcgttctatgccagttgcgaaaaggtctttcgccccgatttgcgtgacaggtctgtggtggtcctgagtaacaacgatggttgtgtaatcgcgcgcagcgctgaagcaaaaaaactgggcataaaaatgggggtgccgtggtttcaactgaggtcggcgaaatttccggagccggttatcgcgttctccagtaattacgccctctacgcatcaatgtcgaacagggtcatggttcacctggaagagctggcgccacgcgttgagcagtactccattgacgagatgtttctggatattcgcggtatagacagttgcatcgatttcgaggatttcggccgacagctgcgtgagcacgttcgttccggcacagggctgaccatcggcgtcggaatgggaccgaccaaaacgctggctaaaagcgcgcaatgggcatcgaaagaatggtcacagttcggaggcgtgcttgccctgacgttacacaatcagaaacgaacggagaaactgctgtcactgcaaccggtggaggaaatctggggtgtgggccgcaggatctcaaagaagctgaacacaatggggatcaccacagcactgcagctggcccgcgcgaatccaacgttcatcaggaaaaactttaatgtggttctggagagaacggtccgggaactcaatggagaaagctgtatttccctggaggaagcaccgccccccaaacagcagatagtctgcagcagaagctttggagaacgagtcacgacttatgaagcgatgcggcaggcagtctgtcagcacgctgaacgtgccgccgaaaagctgcgtggggaacggcagttctgcaggcatattgccgtgtttgtgaaaacatcgccgttcgccgtaactgagccctactacggtaatctggccagtgaaaaactgctcatccccacgcaggatacacgggacatcattgccgctgccgtcagagctctggacaggatctgggtggatggtcaccgttacgcaaaggcaggctgtatgctgaacgatttcacgcaaaccggggtatcgcagcttaatttatttgatgaagtacagccgcgggaacggagcgagcagctgatgcaagtcctggatgggattaaccatccgggcaaggggaaaatatggttcgccggtcgggggattgcccccgagtggcagatgaaaagggaactactttcgccagcttatacgacacgttgggcagatattcctgcagcgaaattgacttga

SEQ ID NO: 372147 - DNA, 975 bp, Salmonella enterica
atgtcgaatgagagaagaaaaactattggcagacagttaaatacccaggcgtcaatggttgagatgactgacacccaaagaagtcaggtatttaccctaaaaaccggcaggaagataacgttcaggtttgttcgggtacctgcatcggacgttgaaagtaagacattcgtaaaccaggaaaccaacggaagagatcaacttgctctgaccagggagtccctgaaatctattatccagacgattaagtttcagcagttcttcccctgtattggcattcagcaaggtgaaaggattgagatactggatggttcaagacggcgagcctcagcgatttatatccgtacaggccttgatgtaatggttaccaatgaacgtttatcagctgatgaagctcgccatctggctaaagatgtccagacagctaaagagcataaccttcgggagatcggcttaagattgatggctctgaaagagtctggattcaatcaaaaggaaattgctgaactggaggggttatcccaggctaaggtcaccagggcactgcaggcggcagcagtaccgcaagaattgatttctctgttcccggttcagtctgagctgtcgtttagtgactataaaattctgttagaggttaatgaaaaactcagtgaaaagggtttaacgtctgaagggctcattcagtctgtctcagatcagcatgatgcaattttgagtgactacgagcgaccagacgacgaacagaaagccagtatactgaaattgatttctcaggcctctcaggcattgatagctccgcctcctaaggaaaagtcagtaatttccgcactctggacctttgaagaaaaggacaagttcgcgcgcaagcgtgtgaaagggcgtacgctgacttatgagtttagccgtatgtcaaaagtggttcaggatgaactggacaaagctatcaacgaggtccttgagagaaatttgagtcaataa

SEQ ID NO: 372148 - DNA, 1206 bp, Salmonella enterica
atggaaaatattgagcagttacggaaagtcgccacacgtgcaggtaaacttctgacatccttgagcgaaagtatccgccagcaaaaagaggaattgaagcttaccgagttctatcaggaatacagcaaagccgccctatataagctgcctaagctaagcaaagggagtgttgagtatgctgtggccgaaatggaagccagtggctatatttttaaaaagaaaccttccggcaatacgatgaagtacgcgatgacgattcagaacgtcatcgatctgtatttccatcgtaaagtgcccaagtacagagatcgcttcgataaagcgttcactatatttgtatgtaaccttaaaggtggcggttccaagacagtttctaccgcttcattatcccatgcctttcgggctcatcctcagcttctgttcgaagacctgcgtatcctggccatcgatttcgatccgcaggcatctctgacaatgttcctgagccatgagaattcagtgggcctggttgaaaatacggctgctcaggccatgctccagaacgtgtctcgtgaagaattactttccgatttcatcgtgtcgtcaattatcccgggcgttgatgttattcccgcttccattgacgatgcattccttgctgaaggctggaagggattgtgtgaggaacatctgcctgggcaaaatattcatgcagtgcttaaagagaacattatcgacaagctccggtatgactacgactttatcttccttgatagtggtcctcacctcgatgcgttcctgaaaaactgcatcggagcggcagacctgatgttgactccacttcctccggcaacggttgattttcattcttccctgaagtttgtagccagccttcctgcgcttattgattcgatcgaacaggatggacacacctgcaatctcatcggaaatgtaggttttatgtccaaaatcctgaacaagtctgatcacaaaatttgccatagtcaggccaaagaagtattcggtgccgatatgctcgacatggttctgccgaggctggatggcttcgagcgatgcggggagacttttgacacagttatttccgcaaatccagcaacctatgatggaagcaccgaggcgcttaaaagcgcaaaatcagcagcggaagactttgcgaaggccgtatttgatcgcattgagttcattcgtactaacggaggtatgtga

SEQ ID NO: 372149 - DNA, 942 bp, Salmonella enterica
atgaaaaagaaaaacactacgccgactccccacgacgcgacattccggcagtttctgacacaacctgacattgcccgggattttatggagctgcatctgccggcagagctgcgtgccatctgcgatctcagtacactgaaactggaatcaggctcgtttgttgaggatgacctccgccagtatttcagcgacgtcctctacagcctgaaaaccacagccggcgacggatatattcatgtcctggttgaacaccagtcaacacctgacaaacatatggctttccgcctgatacgctatgcggtggccgccatgcagcgccacctggaggcagggcataaaaaattgccactggtgataccagtgctgttctatacggggaaacgcagcccgtatccgtactccacccgctggctggacgaatttgacgatacggcgctggcaggcaaactctacagcagcgctttcccgctggtagacgttacggtcattccggatgatgaaatcgccggccaccgtagcatggccgccctgactttattgcagaaacatattcatcagcgggacctggcagaactggttgaccggctggcgcccattttgctggccggatatctgtcttcatcgcaggtaatatcgctggtacactatatagtgcaggcaggcgaaacatccgacgccgaagcctttgtacgcgaactggcacagcgtgtgccgcaacacggagacgcacttatgaccatcgcacaacagctcgaacagaagggcatcgagaaggggattcagctcggtgaacaacgtggtattgaaaaaggccgttcagaaggggagcgcgaagcgactctgaaaatagcccgtaccatgctccagaacggcattgaccgcaataccgtcatgaaaatgaccggtctgactgaagacgacctggcgcagatccgccactaa

SEQ ID NO: 372150 - DNA, 606 bp, Salmonella enterica
gtgacattgacagaaaaatcaggtcatctggcgtggtgtgccctggtggcgcttgcgctggccaggcaggatggtggcgttctctcgccggcacaggaaaacctctttctcacccgctggctggcgactgcgctgaagcaacggcgtttttctcgtgatgtgacgcccgatatcgagtggcttttgaaacagggacgtcagatgggcgtcagcgccaagctggccagcaagctgaattacctctggcgttcatgcaccggtgagttgtccgagcagaacgacctgttccggctgacgtatgctctggaaacagcgaaagatatgcactggaactaccgtctgctgagcgatcgggaatggtccggccggaatgctgtggcgctcagtgcaggcgtgaacggcatttatctctcacaggccaaactcgatgtcggttttaacgacagcggccgacagataaattcgctgacagcacgtttgacagggaacgtagcgggggtaatgaagctgtttgatcgctgtggctggctggcagagcctgatgcctccctgccccaccagtattcgctgatggccgggcagggagtgccagaaaagggggattag

SEQ ID NO: 372151 - DNA, 336 bp, Salmonella enterica
atggagaatatgttgaaaactatgcgtgagcatttccccgttcgaacagtggtgatcgaacagtctctggatatgtttggtgtcaaacgaaatgaggacgggacgttactcttcccccgtcactccgataaacgttttcccgttgcacgtatccgtaagcgactggcggcttatggctggcgaggagaacgcctgaataaggaggtggcgcgaatcgtcgcgggccctgatatcctccctgagaggagggactacagcattattttcccttacggatgggagaagaagcagctgacgcgtgagatgcggcgaatgtttctccgtaagacgggctga

SEQ ID NO: 372152 - DNA, 510 bp, Salmonella enterica
atgcgtgatgatgacaattcagactcctgtgatgaagcgccccgggcggaggataaatgctacaccaaagggcggcttcgggatgagttcaggatgaagccagcccctggtgcggaaccggtcagaatgtacaaaagtccttacggcgggaaatacggcgtatggcggctggctgactgcgtcccgatgcgggcgaaacgccctcagacagaaaaacagcggctggccagcacacgtctgggcctgcaggcccggatgaagagtgagcgtggcaggttcgccatgctggcacatacctggttagcactgggccccgtcttcctcgataccgaaacgaccggacttgatgccggcgcgcaggcgctggaaatcggtctggtgaatgcccgcggtgagaggatatttgagacccgcctgaaacccacagtcggcatcgatccggcagcagctgcagtacaaatcgttacggaaccatatcgctttccggtgctgtcagtcaggctggcctga

SEQ ID NO: 372153 - DNA, 1116 bp, Salmonella enterica
atgcgtccggcgacatacgaaccagaacagattattgaagcagggctggccctgcaggctgaaggacggaatatcaccgggttcgcactacgtaaccaggtgggtggcggcaatccgacacgtctccgccagatatgggacgaataccaggcttcacagagcacggtcgtcactgaacccgttgccgagctgccagtggaagtggctgaagaagtgaaggccgtctccgccgcgctgtccgaacgcatcacccagctggcgacagaactgaatgacaaggcggtccgggctgcagaacgccgggttgcggaagtcacgcgtgctgccggtgaacagaccgcacaggcagagcgggagctggccgacgccgcgcagacagtcgacgacctggaagaaaaactggatgaactgcaggacagatatgacagtttgacgctggcgctggagtcagaacgttcactgcgtcagcagcatgatgtggagatggcccagctgaaagagcgtcttgcggccgctgaagagaatacccgtcagcgagaggaacggtatcaggagcagaagacagtgctgcaggatgcgcttaatgcggagcaggcacagcacaaaaacacgcgggaagacctgcagaaacgactggagcaaatttctgccgaagctaatgcgcgtacagaagaactgaagtctgaacgcgataaagtcaatactctccttgcccgccttgaatcgcaggaaaatgcgctggcctcagaacgtcagcagcatctggccacccgcgaaacgctgcagcaacgcctcgagcaggccatcgctgacacgcaggcgcgcgccggtgagattgcacttgaacgtgacagagtcagcagcctcaccgcaaggctggaatcgcaggaaaaggcctcctcggagcaactggtgcgtatgggcagtgaaatagccagtctgacagatcgttgcacacagctggaaaaccagcgtgatgatgcccgtctggagacgatgggggagaaagaaacggtcgcggcactgcgtggtgaggctgaagccctgaagcgtcagaaccagtcactgatggcggcgctttcaggcaataaacagaccggtggccagaatgcgtga

SEQ ID NO: 372154 - DNA, 489 bp, Salmonella enterica
atgccgcaggatgaatcagtcgtcaaacgggccagggaatactttttccgccaccaccggtatacagaggaagacctggaatccgactaccaggcagaactgcgtaactacagggatgacacctgggaagcaccacaacgggcagccagactcagtgcggccgtcaagcgctacaaaacgtatgagatgctgtacttcttcttccagatcgctgatgaggccgggctggactatactccgctggttgtaaagcgcctgtgcgctcatcttttcgacaggcagggcagccagaatattattgttgatatctttggccagaagggacgcatgcaccgcagccatgacagtgatcctgacattattgctgccgttgccgaacgctaccggcagcaggcagaggaccactggcagacagttctgaagaatatcgggagagtgaagcaggactaccagaaaaatcagaacagacagaaaggcgcaggggattaa

SEQ ID NO: 372155 - DNA, 741 bp, Salmonella enterica
atggaacaaaaccaaccagcacaaccttcacgacgtgcaatcctgaaacaaactcttgcagtatctgctttgtctgtcaccgggctggcggccttatcggtaccaactatctctttcgccgcatcactgagcaaagaggaacgtgacggtatgactccagatgcagtcattgaacattttaaacagggtaacctgcgcttccgggaaaatcgcccggctaaacatgattacctggcacagaagcgcaacagtattgcgggtcagtatcctgctgcggtgatccttagctgcattgactcacgtgcgccggcggaaattgtgctggatgcggggatcggtgagacgtttaattcccgcgtagcgggtaatatcagtaatcgcgatatgctgggcagcatggagtttgcctgtgcagttgccggcgcgaaagtagtgctggttataggacacacccgctgtggcgcagtacgctgtgctattgataatgctgaactgggtaacctgacggggctgctggatgaaattaaacccgcgattgcaaaaacggagtatagcggtgagcgtaaaggtagcaattatgattttgtcgatgcggtggcacgaaaaaatgtcgagctgactatcgaaaacatccgcaaaaacagcccggtgctgaaacaactggaagatgagaagaaaattaaaatcgttggcagtatgtatcaccttactggcggtaaggttgagtttttcgaagtataa

SEQ ID NO: 372156 - DNA, 561 bp, Salmonella enterica
atggcactttacggctatgcccgcgtttcaaccagcgatcaggatcttactctgcagacacaaattctccgcgctgctggttgtgaaattattcgtgcagaaaaagccagcggaagcggccggaccggaaggagcgagttgcagctgctgctggagttcctgcgccctggtgatacgttgatggtgacacgcgtggatcgcctggcccgcagcattaaggacctgcaggacattgtgtatgccctgaatcaacagggcgtaacgctcagggcaacagaacagccagtggacacgcgttcagctgcaggcaaagccttcctcgatatgctgggtgttttcgctgagtttgaaaccaatctgagacgtgaacgccagatggaaggcattgccgcggcgaaagccaggggcgtataccggggaaggaaaccgtccatagatcctgctgaggtatatcgtctgtataccattgagaagatgggagccacagccatcgcccgccagctcgggattgggagggcgtcagtctaccgggcgctggaaaattatgagcagccggcgtag

SEQ ID NO: 372157 - DNA, 1665 bp, Salmonella enterica
atgagcagccggcgtagcgcgattccgtctgactccctgttgcaactacggcaacggctcgatcgcctgccgccaaaaagccctgaacgtgccaatcagattgccgctaccgcccagctgtatggtatttcagtcacgacggtttatcgcgctcttcaccttgttttgaaaccgcgaacggcccaccgcagtgatcatggtcaaccccggatactgccaccgtccgagctggagcattactgcgaactgattgctgcactgaaattacgaaccacaaataaatccggccgccatctgtcgaccggacgggcaatacagctgctggaagagcatggcgtggagacggtccagggattgattaaaagtcccaaaggcttacttcgtaagcagaccgtcaatcgctggctttcccgctggcgtctcgaccagccccgcctgttacgggagcctccggcggtaagatttcaggctgaaaacagcaatgactgttggcagtttgatatgtcgccatccgatctcaaacatattgagcggcctgactgggtagatcctgcccggggcgaacccacgctgatgctcttcagcgtagtggatgaccggagcggtgtcgcataccaggaataccggtgtgtgtacggtgaggatgcggaatctgcgctgcgttttctctttaacgccatggccccaaaaaccaggtctgattttccttttcagggccgcccgaaattgctgtacctcgataatggaccggtggccaaaaaccatgtattccagaatgtgatgcagtccctgaaggttgactggctgacgcatacgccggcaggcaaggacggcccccggacgacggcacggtccaaaggtaaagttgaacgtcctttccggaccgtcaaggaggcacatgaaactctgtaccatttccataaaccggaaacggagctgcaggccaacgaatggctctggaactatctgagccgttataacgcgcagcgtcaccgcagcgagaaacactcccgactggaggactggctggcaaatatcggccaggaaggtgtgagggatatgtgcagctgggaacaatactgtcggttcgcccgggagccggaatcccgcaaggtgggtgttgatgcgcggataacgatagacggcaccgcatgggaagttgaaccggatatggcgggtgaaaccgtcattctgctgtgggggctgtttgacgaagagatgtatgtggagtttaccggtgaaacatgggggccttattatccggtgtcggggcctgtgccgctgcaccgttaccggacgttcagacgcggtaaagcggctgaacgggccgatcgtatccatgctctggccaggcagctgaacatccccatcagcgcattgtccggcagcgatctccgcgtggtcagtgatgacactcagcagcgcattgatgcgttgccacatcagccctttgatacccgaaaatttgaataccactttcccaccgttattgcggcaaaactggcaattgccgacgatctggccataccgctggccagaatgtcggatgaagaccgggcgtttatcgacagtattctgactgagacgcttaaccgtagtgaagtacttgcccgcatcagagactattttcgtagcagacaatcaggagaggaccatgcgggttga

SEQ ID NO: 372158 - DNA, 969 bp, Salmonella enterica
atgcgggttgaagtgatggagcattatggactgacgcagtctattgaacaggccgggtattatgaaactgcccaccataagcagctgatgaaagacattaagggtgcgatacgcgaaggacgactgatagcggtctgtggcgtggtgggaagcggtaaaaccgtcactctgcgacgcctgcagcagcaactgctggatgaaaataaaatcattgtcgcccgctccctgtcggtggacaaacagagtgtccggctcgccacgctgattaatgccctgttttatgacctggcacaggataaacaggtgcagatccacaaacaaggtgaacgccgcgagcgtgagctgcaggaactggtcaaaaaaggcaaacgcccggtggcgctgtttgttgatgaagcccatgacctgaacggtaatacactaacggggctcaaacggctgatggaagtggttgaagacggcggtggtaggctgtccgtcgttctggccggtcacccaaaactgcgtaatgacctgcgtcgtccgacgatggaggaaattggctatcgtaccgatatttttacactggacgggatcaccggcagtcagcgtgaatatatccagtggctgctgaagaccagcaccggtaagggtaagccggaagatattctaacgaccgaagccgttgacctgctggcgatgaaactgcgaacaccgctgcaggtccagttgcacctgacgctggcgatggaagcaggataccagacgggcgaaaaaccgattactgccactctggttgaatccgtgctgtcacgtcagctggatgacctggagccgacgctcacgcgacatggttaccggctgaaggatatggtggagcagttcgatgcaaaaccagctgaaatcagggcattatttaataatcagttagaccctgcccgcacggccgaactacgcgacagaatgctggcggtcggtctgccaatatga

SEQ ID NO: 372159 - DNA, 1038 bp, Salmonella enterica
atgccgatcatagcagcaattcctgatgaagaacgacaactgatgcgcaaagaggcccaacaaacctacgataaaaaccatgcgcgacggcttatcgccatgctgatgctgcatcagggaatgaccgtcactgacgttgccagattactctgtgccgcccgttcatccgttggtcgatggataaactggtttactttacatggtgttgaaggactaaaaagcctcagacccggacgtgctccacgctggccggtcgctgatatccttcagctcttgccactattggtacagcgttccccgaaggattttggctggctgcgctcacgctggagcacggagcttctggtactcgtcatcaaccgactttttgatgtgacgctgcaccgctccaccctgcaccgatatctgaggcaggcagatatggtctggcgcagggcagcgccaacgctgaaaatcaaagatccgcactatgaagaaaaacggcttgtcattgatcaggcgctggctcaggagcagactgcacatcctgtgttttatcaggatgaagtcgacatcgacctgaacccaaaaattggcgctgactggatgcccaaagggcaacagaaacgcatcgccacgccgggacagaaccagaagcattatctggcaggcgcactgcattcaggtacgggacgggttcactacgtcagtggcagcagcaagagttctgatttatttatcagtctgttagaaacgttacgccgtacatacaggcgggcgaaaaccatcacactggtggcggataactacatcatccataaaagccgcaaagtggaacgctggctggaagaaaacccgaagttccggttgctgttcctgccgatgtattcgccgtggctgaatccgatagagcgacagtggttgtcgttacacgaaaccataacgagaaatcatcagtgtcggtacatgtggcagttactgaaacaggtagcacaatttatgaatgccgcttcactgtttcccggcaatcaacagggtctggctaaagtggagcggtaa

SEQ ID NO: 372160 - DNA, 804 bp, Salmonella enterica
atgactatccctgcattcggtttaggtacttttcgcctgaaagacgacgtggttatcgcttctgtgaaaacggcgcttgaactgggctaccgtgctgtcgacactgcgcaaatctatgataatgaagcggctgttggacaggcgattgctgagagcggcgtaccgcgtaatgagctgtacatcaccaccaagatctggattgaaaaccttagcaaagacaagctaatcccaagcctgaaagagagcctgaaaaaactgcgtaccgattatgtcgatctgacgctgatccactggccatctccgggtgatgccgtgtctgtcgaagaatttatgcaggcattgctggaagctaaaaaacaagggctgactcgcgaaattggcatttcaaacttcaccattccgttgatggaaaaggctattgccgcggtgggcgcagaccatatagccaccaaccagattgagctatctccgtatctgcagaatcgtaaggtggttgactgggcgaaagcgcacggtatccacatcacctcttacatgacgctggcatacggtaaagcgctgaaagatgaagtgattgcgcgcattgcggctaaacataatgcgaccccggcgcaggttattctggcatgggcaatgggtgaaggttactccgtgatcccttcatccaccaggcgtgaaaatctggcaagcaacctgctggcgcaggatctgcatctggatgccgaagataaaaatgcgatcgcggcactggattgcaacgatcgtctggttagcccggaaggactggctcctgcctgggattaa

SEQ ID NO: 372161 - DNA, 915 bp, Salmonella enterica
atgaaagccacctccgaagaactcgcaatttttgtcgctgtcgtggaaagcggcagcttcagccgggcggcagagcagcttggacaggccaattccgctgtcagccgggcagttaaaaagctggagatgaagctcggcgtcagtctgcttaatcgtacgacccgacagctgagcctgactgaagaaggagagcgatacttcaggcgcgtgcagcagatactgcaagaaatggccgccgcagaaacggaaatcatggagtcgcgtaataccccgcgcggcttactgcgtatcgatgcggcaacgccggtaatgctgcatttcctgatgccgctgattaaaccttttcgtgaacggtatccggaaataacgttgtctcttgtctcctcagaaacgttcatcaatcttattgaacgaaaagtggatgttgcgatacgcgcaggcacgttgacagattcaagtctgcgcgcgcgtccgttatttaccagctatcgtaagattatcgcctcaccggattatattgcccgttttggcaagcctgagagcgttgaagagttaaaacagcatctgtgcctggggttctcagaacccatctcgctcaatacctggccgatagcctgtagtgacggacagctccatgagatcgaatgtgggatttcgtccaacagcggggaaacgttaaaacaactttgcctgagcggtaacggcattgcatgtctttcagattatatgattgataaagagatcgcccggggagaactggtggaactgctggccgataaacgtctgccggtagaaatgcctttcagcgccgtttactacagcgatcgcgccgtcagcacacgtattcgggcatttatcgactttttgagcgaatatataagaacagctcccgcaggagctgtgaaagaggggtaa

SEQ ID NO: 372162 - DNA, 1176 bp, Salmonella enterica
atgcctctcgctttatttgcactgacaataagtgctttcgctatcggtacgactgagtttgtgattgtcggcctggtgccgaccattgctcaacaactggctatctcgttaccttccgccggaatgctggtttcaatctatgcgctgggtgtggctattggcgcgccggtgctaaccgcgctgaccggacgcctgccgcgtaaacagttactggtcgcgctgatggtcttgtttacggcggggaatttgctggcatggcaggcaccgggctatatgacattaatcgccgcccgtctgctgacgggcctggcgcacggcgtgttcttctcgattggctctaccatcgcgacaagtctggtgccaaaagagaaagcggcttctgctatcgctattatgtttggtggtttaacggtagctctggtcacgggcgtgccgctgggcacatttatcggtcagcattttggctggcgtgagaccttccttgcggtatcactgttaggcgtgattgcgctgatgagcagtcaactgctgatccctgccaatattcccggtcgggcggccgccagcattcgtgaccaggtgaaagtactgactcatcctcgtctgttgctgatttacgccgttacggcgctgggctacggcggggtattcacggcattcaccttcctggcgccgatgatgcaggatctggcgggattctccccggcagcagtaagctggatcctactgggttatggcgtatctgtggctatcggcaatatctggggcggtaaactggcagataagcatggtgccgttcctgcgctgaaattcattttcgccgcgctgtttgttctgctgatggtcttccaggtgacggcctccacgcagtatgccgcgctggctaccattctggtgatgggggtctttgccttcggtaacgtaccgggtttgcaggtctacgtggtacagaaagcggaacaattcacgcctaatgcggtagatgtggcgtcaggtctgaacattgcggcgtttaacattggtattgcgctgggctccgtgattggcgggcaaacggtggcgcattacggtttggcgcagacgccgtggattggcgccctcattgttctggtggctttcctgctgatgggggtcagcggacgtcttgataaaactgtacgcattgctttggagtaa

SEQ ID NO: 372163 - DNA, 801 bp, Salmonella enterica
gtgcgaaaaaacacctatgcgatgcgctatgttgccggacagcccgccgagcggattttgccgccagggtcgtttgcgagcattggccaggcattgcccgccggggaaccgctaagcagtgaagagcggatccgtatcctcgtgtggaatatattcaagcagcagcgagccgaatggttatcggtgctgaagaactacggcaaagatgcgcatctggtcctgttgcaggaggcgcagacgacgcctgagctggtacagtttgccaccgctaactatcttgccgccgaccaggttcccgcttttgtattacctcagcatccgtctggcgtcatgacgctgtctgccgcccatcctgtttactgctgccctttacgggaaagagaaccaattttacgtttggcgaaatcagccctggtgacggtatatcccttgccggatacccgtttattaatggtagtaaatgttcatgcggtaaattttagtctgggcgtggacgtatacagtaagcagttacttccgatcggcgaccagattgcgcaccatagcggccctgtcattatggcgggggattttaatgcctggagccgcccacgtatgaatgcgttgtaccgctttgcacgtgagatgtcgctgcgccaggtgcgtttcactgacgatcagcgccgtcgtgcgtttggacgaccgctggattttgttttttatcgtgggttaaacgtgaatgaagcctccgtactggtgacgcgcgcttccgatcacaatccgctactcgttgaattcagtcccggcaaacctgagcaataa

SEQ ID NO: 372164 - DNA, 771 bp, Salmonella enterica
atgacaacgcattcccatcatgacaatgttgaaaagcagtttggttcacaggcgaacgcctatttacatagcgccgttcacgcatcgggtcgtgacttagcgcggctggcgcaaaggctgtctgatttttcccacgcgaacgtactggatatgggatgtggagctggacacgcgagttttgtcgctgcgcaacatgccaactcggtcgtggcatacgatttatccgccagcatgcttgaggttgtcgctggagcggcggaagaaagacatttaagtaatattactctccggcaaggctatgccgaaaaactgccctttgaagatgcatcgtttgaggtggtgattagccgctattccgcgcatcactggcacgacgttggtcaggcattgcgtgaggtttatcgtgtattaaaacccggcggcgtgctgattatcatggatgtcatgtcgcctggacatcctgtaagcgatatctggctgcaaacggtggaggcgttacgcgacacgtcgcatgtccgtaactattccagtggcgaatggctgacgatggtcaataacgcgatgctggtaacgaataccgtgataaccgatcgtttatcgctggagtttcgctcatgggtaacgcggatgcgtacgccagcgccgttggttgaggcgattcgattatatcaggcgagtgccccggtagaggtgaagcgttattttgagttgcaggatgacggctcgtttagcagcgatactatcatgctggaagcgcataaagcggtatag

SEQ ID NO: 372165 - DNA, 1221 bp, Salmonella enterica
atggacgacggaacgtctatcgcgccagatcaggacttgtgggctttcattggcgacgagctaaagatgggaattccggaaaacagccggattcgcgaacagaaacagaagtatttacgcaataagagctatctccacgatgtaactttacgggcagagccgtatatgtactggatagcggggcaggttaagaaacgtaacatgcctatggagctggtactactacccatagtggagagcgcttttgatcctcacgcaacgtctggcgccaatgccgcaggcatctggcagatcataccgagcacagggcgcaattatggtttaaagcagacccgtaattatgacgcgcgtcgcgatgttgtagcctctacgaccgccgcgttagacatgatgcagcgtctgaacaaaatgtttgacggcgactggctgttaaccgttgcagcgtataacagcggcgaaggccgtgttatgcgggcaattaaagcaaacaaagcgcgtggaaaaccgacggatttctggtcgctttctttgcccagagaaacaaaactctacgtacctaagatgctggcattgagtgaaattctcaaaaacagcaaacgctacggcgtacgtctgccaacaacagatgaaagccgagcgctggcacgagttcgtttaaacagtccagttgaaatggcccaggttgcggatatggcgggcatgtctatcagcaagctgaagacgtttaatgccggtgtaaaagggtctaccttaggcgtaagcggtccgcaatatgttatggtgcccaaaaagcatgccgagcagttgcgtgagtcgctggcttccggtgagattgacgccgttcagtcccaactgatcgccgacaatacgccgttgaatagccgtagctataaggtgcgctctggcgatacgctttccggtattgcttcgcggcttggcgtaagcacgaaggacttgcagcagtggaacaacctgcgtggttcgcgcctgaaaatcgggcaaagcctgaccgtaggcgctggcagcagcgcacaacgactggcaaacaatagcgatagcattatctatcgtgtccgtaaaggcgattcgctttccagtatcgccagacgtcacggggtaaatatcaaagatgtgatgcgctggaaccatgatacggataatctacaaccgggcgatcagcttacgttgtttgtgaaggacaatagcacgccagactcctga

SEQ ID NO: 372166 - DNA, 756 bp, Salmonella enterica
atgaatcttaacagtattcccgcgtttcaggacaattacatctgggtgctgaccaatgatgaaggccgctgtgtgattgttgatcccggcgaagcggcccccgtcttaaaggccattgctgaacataagtggatgccggaggcgatttttctgacgcatcaccatcacgaccatgttggcggagtcaaagagctgttgcaacacttcccgcaaatgacggtttatggaccggcggaaacgcaagacaagggagcaacccatcttgttggcgatggcgatactattcgcgttttaggcgagaaatttactctttttgccacgccgggccacacgttaggacacgtctgttactttagccatccttacttattctgcggcgacacgctgttctctggcggctgtggtcgactgtttgaaggcacgccatcacagatgtatcagtcacttatgaagattaactctctgcctgatgacacactcatttgcagcgctcacgaatacactttagctaacattaagttcgcattgagcatacttccgcacgattcgttcataaatgaatattatcgtaaagttaaagagttacgtgtaaaaaaacaaatgacactacccgttattcttaaaaatgagcgtaagattaatctttttttaagaactgaagatattgatttaattaatgaaataaacaaagaaacaatattgcaacaaccagaagcgcgttttgcatggttaaggtcaaagaaagacacgttctga

SEQ ID NO: 372167 - DNA, 723 bp, Salmonella enterica
atgaaaccggcaaggctctctcaaactgtcgttgcgcccggatgttggggtgagttgccctggggcaattactaccgtgaggcgctggaacagcagctaaatccgtggtttgcaaaaatgtatggtttccatttgcttaaaatcggtaatttaagcgcagaaatcaattccgaagcgtgcgcggtctcccatcaggtgaatgtttcgtcgcaggggtcgccgatgcaggttctggccgatccgctacaccttccttttgcggataaatccgtcgatgtttgtctgctggcgcatactttgccgtggtgtaccgacccgcaccgtttattgcgggaagccgaccgcgtattgattgatgacggttggctggtcatcagtggatttaacccgctgagtttgatggggttacgtaaactggtacccgttttacgtaaaacaccgccctataatagtcggatgtttacccttatgcggcaactggactggctgtctttactcaatttcgaagtgctacattatagccgttttcatgtcttaccctggaaaaagcagggggggcggcttttaaatacgcatatcccggcgctgggctgtttacagcttattgtggcccgtaagcggaccatcccgcttacgcttaatccgctgcgacataataaaagtaaaacccctatccgccagaccgttggcgccacccggcaatatcgcaaaccggatggctaa

SEQ ID NO: 372168 - DNA, 468 bp, Salmonella enterica
atgcttaaacaggtagaaattttcaccgatggctcttgcctggggaatccagggcctggtggttatggcgctatcttacgctatcgcggtcatgaaaaaacgtttagtgaaggttacacgctgaccaccaataaccgtatggaactgatggcggcgatcgtcgcgcttgaagcgttaaaagaacattgcgaagtgacattgagcaccgacagccaatatgtgcggcaaggaattacccaatggattcataactggaagaaacgcggctggaaaacagcggaaaagaaacccgtaaaaaatgtcgatctgtggaaacgtctcgatgctgcgttaggtcagcatcagatcaaatgggtatgggtcaaaggccatgcaggccatcccgaaaacgagcgttgtgatgaactggcgcgcgccgcggcaatgaatcccacgcaggaagatagtggctaccaggcggaagcttag

SEQ ID NO: 372169 - DNA, 741 bp, Salmonella enterica
atgaccgatatgagcactgcaattacacgacagattgtcctcgataccgaaaccaccggtatgaaccagataggcgcgcactatgaaggtcacaagattattgagatcggtgcggttgaggtgataaaccgtcgtctgaccggcaacaattttcatgtttacctgaagcccgatcgccttgtcgatccagaggcttttggcgtacacggtattgccgatgagtttctgctggataagccggtttttgctgatgtggtcgatgagtttcttgattatatccgcggcgcggagctggtcatccataacgcatcgttcgatatcggctttatggattatgagtttggtctgcttaaacgcgatattcctaaaaccaatactttctgcaaagttaccgatagcctggcgttggcgcggaaaatgttccccggcaagcgtaacagccttgatgcgctgtgttcgcgttatgagatagataatagcaaacgtactttgcacggcgcattgctcgatgcccagatccttgccgaagtgtatctggcgatgacgggcggacaaacgtccatgacgtttgcgatggaaggagagacgcaacggcagcaaggtgaagcgaccattcagcgaatcgttcgccaggccagccggttacgggtcgtttttgcctctgaggaagagctggctgcgcatgaatcgcgacttgatctggtgcagaaaaagggcggaagttgcctttggcgggcgtaa

SEQ ID NO: 372170 - DNA, 1056 bp, Salmonella enterica
atggacatgtccctgactaaaccggtaagcgcggaacaaccctgcggccccgatccggagtacgacccggaatacctgctgctgttcagccgcgccgccccccaggcggaggcgcaatatggtgattttgtcagtacgccggaagccgtgaactggccggaaattgaacgtgatacgcgccgtctgctcacgcgcagtaaggatatccgggtgttgatcctgctgctgcgcagtcgcatccagcaggctggcgcacagggactggcggaaatgctcacgcaactggcagaactgagcgtaatctggtccgatgcactccatccacagctgcttaccggcgaaggcgcacccgcagaatctattgaagatgcggcgctggcgcgcagtaatgccctggcggcgctgctggatcacgaaggcgtgatggcagacattcgcggtatcacgctgtcaaacagtgccgtcctgcgcctgcaggtacgggatgtcgagcgcgcgttatccgcccctcgcccggctgatgcgctggcccccgaatccgtccgccagcaactggccgacctcgaagcccgtggggcattaccgctggcggcgtttcgcgaagcgcaggaaagcgcagaacgcctgcaagtgtgggcgcgtgagacattaggcgatctggctccagatttttcacgcctgcggcagttgttagcgctgctgcctgacgtggtacagacaaccacaccggaaatccctccgtcgccagcgccagtgccagaccccgcaggcacggttatggataatgccgttccggcacgggcagaggatgtgccgcctgtcaacgcgccacccggtatatccctcccacacaatgctgaaccggggccaattcgcgatcgtaatgatgcgctggagcgcctgcggtgcattcgtcgctggtttgagagcagtgaacccagtagcccgaccatcccactgttacgccaggctgaaagactggtgggaaaacggttctcggaggtgatcaatgagatcccggtggagttgctggagaagtgggatgccctggagtga

SEQ ID NO: 372171 - DNA, 744 bp, Salmonella enterica
ttgccgctgcactataccgagctggcgctaaaccgctcagagagtcgtcacgatccgacgctggttcatttttccaatatttttcaccaccgctggctgacgcagttctggcaggcatggcgcagcgcccagtccgctggtggcgggctggacaaaccggaacacgaccgttttgcgttttatatcgccagtctcagcgggcaggatctacgggaaagcgccgaaagcccgctgtcagatcatgttcgcctggcagcctccgcccatctggtacgcgaatcgcgcaatcctgacgggctggccgccacgctggcgcactatttcagcgtaccttttgcggtgaaagagttcgccctgcactggataacggtggcgaacgatgaaatcacccgtctgggcacgcccgcgcagtcttcggtgctgggcaacggggcgcttatcggccaggccgtaccggatatgcagtacaaattccggctaattatcggcccgctcacgctggaggattacctgcgttttctgcccggtggcaacaatctgcccgtgctgacagaactggtgcgtacgttcattggttttgaatattgctgggaaattgagctgcagttgaagcctcatgccgcaccgcctgcggtgatcggcggtgcgcagcggcttggctggacggcctgggcaggtaaagccatgcatgaccgtccggtgaccggcatgatttttgaacctgaacacggcttaaccaactga

SEQ ID NO: 372172 - DNA, 273 bp, Salmonella enterica
atggataaccttaccattctgaaaacaacggtcacactgaaaaaaagtaccggtgaatgtggctgtttctcaacattaatcaactataccagcttactggcgcaggatgttgagggttacgaacgcggaagtgcatattcccttcaggaggggaatatctcactggcgaagatgcagggacgttatcctttcagctttgtattatcggtggataaccagtctgtacgggatcagaagctggcgctaatgatacgttgtacaccaccgctgtaa

SEQ ID NO: 372173 - DNA, 519 bp, Salmonella enterica
atggcagtaagactgacttttgacgggcaaaagctgacatggcctggtatcgggatatttaaggcgaccacggggttaccggatttacagtggccagataaacagtgtgtgccggatgcggcgataccggaagggaattataaattgtttattcagtttcagggggaggcaccgataagaaatgctgcggattgtgatctgggaccatcatggggctggagtaccattccgcgaggccaggctgccggaacatgtgagatatactgggcgaactggggatataaccgtatccggctggaatcagcggatgagaagacccgaaaagcctgtgggggcaagcggggtggtttttatatccatgattccaccaaaggttacagccatggttgtattgaagtggaaccggtgtttttccgtattctgaaacaggagacggaaaaagaaaatggtgaaaagacatttacggttaatgttaagtatgtttctggtcagcaaacgaatggtggaacaaaacaataa

SEQ ID NO: 372174 - DNA, 642 bp, Salmonella enterica
atgagttttgtatccacaaataataaatccggtataggagggctgacgacaaccacgccgccgataaccggagaaagtggcggtgtcaccgcagattcagtcgccggaagcgtggcagatgcggcggaagccgccgtggaacaggctgcgggatcgctgtttggcgcattgccggagccatcaggactggtgaaagccgcggtggcagcggcgcaggccgccgccgcaggtatggcgcaggatgcggtatcggccatcgtctccgctgttgcaggcgggccgggggcgcataatgtgacggtcagcggcagcgccgtaccgccgggcgcattactgttcgccagcctggacggcggcgaaacattaagtgaactgttcagctatgtggtacagctaaaaacgcccgacaccctgaatctgggctatgtctccccggcggccaacctgccgctcaaaccgatggtgggcaaagatctgtgcgtcaacatcgaactggatggtggcggcacttcccgctggagtggcagcggacctacagcagccgtgatgaacggacggaggggatgttcgggcggggctggagcgtgctgtatgaagtgtgcctggagcgtacgccggacaacccggatgaaaactgcatga

SEQ ID NO: 372175 - DNA, 3297 bp, Salmonella enterica
gtgctgtatgaagtgtgcctggagcgtacgccggacaacccggatgaaaactgcatgacgtatgtggccccgatgggacggcaaattgacctgcaggcggtggagccggggagtggtttttacagccccggcgaggggctggcagtgcggcgcagcgaacagggccactggcttatcagcagtgatgacggcgtgtacaggctgtttgaagcggacccgttcagcccacagcgtcggcggctgaaaatgctgggcgaccgcaacagtaactgccagcacctgacctacgacaaccacgggcgtctggtggaaatcagcggcgatcggcagcgcccctgcatccggctgcactatgagctggcagcgcacccgcagcgcgtgacgcgcatcttccgccattacccggaaggggagccggagctgctgcggcgttaccgctacgatgaggcggggcggctgaacggggtagtggacaacgcaggtcagtatcagcgcgagtttgcgtacgacgacaacgactgcatgacgatgcaccgggagccgggcggcgaacggtattactacacctgggcgtggtttgaaggcccggacgatgcggcgtggcgggtgacgggccatcatacggacagcggcgagcagtaccgtctggactggaatctggcagaacgttcgctgtgcgtgacggatagtctggggcgtacgcgctgccactggtgggatgcgcagggcctggtgacggcgtaccgggacgaggccgggcagatgaccactttccgctggagcgatgaagagcggttactgctggggatgacggacgcgcagggcggcaaatggcgttatgtctatgaccgtctcggccacctgacggagacgcatgacccgctgggccgggttgagcagacgcagtggcatccggtgtggcaccagccggaaacggaggtggatgccgcgggggcggcgtggcgttatgagtatgatgagcggggcaacctgcaggcggtcagcgacccgctgcaccagcgcacggtatacgggtacgaccggcacggtcaggtggtgcggataaccgacgcgcggggcggagataaatacctgcagtggaacgaagacgggcagcttatgcgccacacggactgttctggctcgcagacggcatggttttatgatgaacgcacgcggctggaaagggtgacggacgcggagagtaacagtacgcgttacagctatgacggcaacggacatctgacggaggtcatgttcgcggacgggcgtacggagcgttaccagccggatgcggcgggacggctggtgaaatacaccagcccggcggggcagataacacgctggcagcgggacggccaggggcgggtgcgcaggcagacggatgcgacgggtcgcaggacggcgtatgagtacgacgcttacgggcggctgaccacgctcacgaacgagaacggggaaagctaccggttccggtacgatgttctggaccgggtgacggaacagacggaccccggcggcagccgccgggcatacgggtataacgcgctgaatgcggtgacggcggtgatatacggcggggagcgcgggggagaaatccgtcacggtctggagcgtgatgcggcggggaggctgacggcgaaaatcacgccggagacgcgcacggaataccggtacgacgcggcggaccgtctgctggaaatccgccgcaggcggcatgatgcggcggaaggcggagagccggaagttatccggttcagctacgacagtgcgggtaacctgctgagcgaggagacggcgcagggcgtgctgcagaaccggtacgatgttcagggcaaccgcacagaaacgcagatgccggatgggcggacgctgcggtacctgtactacgggagcggccatctccagcaaatcaacctggggcgtgatgtcatcagcgagttcacgcgtgaccacctgcaccgtgaggtgcagcggagccaggggcggctggacacgcggcggatgtacgaccggacgggccggttaacgcggaaactgacctgtaaaggaatgcgcggtgtggtgccggagacgtttattgaccgggaatatgcgtacagcggccaggatgagctgctgaaaaagcggcacagccggcagggggtgacggattatttttacgacacgacggggcgtatcacggcgtgccggaatgaggcatacctggacagctggcagtacgacgcggcggcgaacctgctggacaggcggcagggagagaccgcgcaggcgggtgcaggcagcgtggtgccgttcaaccggataacgtcataccgtgggctgcattaccgttacgatgaatatggccgggtggtggaaaagcggggccgcaacggtacgcagcactatcgctgggatgcggagcaccggctgacggaagtggcggtcatccgggggagcaccgtacggcgttacgggtacgtgtacgacgcgccgggcaggcgggtggagaagcacgaactggacgcggaaggaaagccgtataaccggacgacgtttttatgggacggaatgcggctggcgcaggagtgcaggccgggaagaagcagcagcctgtatatctacagcgaccaggggagccacgagccgctggcgcgggtggacagggcggcgccgggcgaagcggatgaggtgctgtattaccatacggacgtaaacggcgcgccggaggagatgacggacggcaggggcaatattgtctgggaagcgggctatcaggtatgggggaacctgacgcatgaaaaagaaacccggcccgtacagcagaacctgcgtttccaggggcagtatctggacagggaaacggggctgcattacaatttgtacagattttatgatccggatatcgggaagtttatatcgggcgatccaatctcgctgaagggtggaataaacttatatgcgtatgcaccgaatcctctgtcatggatcgatcctttaggtcttaaatgtggatcttcgtatgagcaggccagaaataaagccctcaaatggttagaagaacgtggatttaaagcggagagagttaatataggtaagttcggttcgacaagaggaaaacctgtaggaatgacaaccgccgatggcaaaacaggatttaggatcgaatatgatgaacgaagtggtgcccatattaatgtcttcagtggaaaggataaaggcgaacatttcttatctgatgcaagtgaatctatcgtaacaaaactccaaaaattatttgatcttccatccaaacctcaaaggccaatatcatga

SEQ ID NO: 372176 - DNA, 447 bp, Salmonella enterica
atgactcttgatgatgaaataaaagagaaaatattacagctatctgattcactcttaatcattgatagctggaattctatcgctgatgagttatcagactcttttgagtggataggttcaaaaattaactggtcaaagaccagtaagcatgaaagtctgaatttaaaaggtaattatttcgattggattgatcaaataaataactttatccatgccaataacattgatagtgaaattttacatagcgataatatttattatataaatgattcatcattggatttctcagtttctattaaaccaaaacaattttatcaatttttaaagatggctattaacaatatccctcagcatcattatttcttcaatagagaaaaaaaatggtgtattgtaataagctctgagggctatatcgattttggtttttcagtatcagataagatataa

SEQ ID NO: 372177 - DNA, 258 bp, Salmonella enterica
atgaatgcctccggcgtcagcgtccgccacatcaacagcaaaacccacatgaccacctattactcacaaatccccagcctgcatcttaagggcgactggctggaagaagcgggatttaagaccgggcgcggcgtcaccgtgaagatttcacaggggtgtattgtgctgatggcggacagtaacgaggagcagaagctgcgcgagcagctttatcaggctaaacaggtggttaagggaattaaggacgtgctggtttag

SEQ ID NO: 372178 - DNA, 249 bp, Salmonella enterica
atggcgggacaactggagccggagtacacaccccaaaggaaagagaggtttgtgtgtattattcattgtgtgatcatagcggtacaggtacttctgctggtttgttattcacactatcagcccctgatgctgatttatcaccaggaatatcagagtctggaggggattcttatggggcacttcttgcgggagtggcttatacagatgctcgtaataaaaatgatagttataaatatacaaaaggtgtga

SEQ ID NO: 372179 - DNA, 432 bp, Salmonella enterica
atggtgttgattgtgttgttcgttattctattttttacatggttaggtagagagaatattaaaaatgatagcgctattcgagaagttgcgaaagaagaagttgataagcttttttctctttataataaaggggagtatgctgagatatatgatttgtcatgtgactctttcaaaaatgccactgcgagaaaagattttttaacagttatgggaactaaaatgaaaatactcggtgaatttaaagggcgaaaacttcaatatagtaatgtcattaattcaaaatccgtggagttatattatagagtggactatattaactattctttaattgaagaatttaactatattaaaaatgatggacaaaaaatatgcttgcaagcaatgtttacggatgatgcggggaaacatggggaggtaattaaattacattaa

SEQ ID NO: 372180 - DNA, 222 bp, Salmonella enterica
atggttaacgataaggatacagctatattaattagtgatttaatgttgagattcggtaaggaacttgatgaatctgttgctgttgttcagtcccgttgtgatgaggatgaatttaaggtatatcgagaagcggttggtttgatcatgggtgaaatgcttattaaaataatgaatccattatatgaaaaacatcccgaaataaaaccaaaaggattgaaataa

SEQ ID NO: 372181 - DNA, 243 bp, Salmonella enterica
atgccgcaggcggggtttattaacgggatgcccgtcaaggtgcgggtaatgagggattgcatcgtgatcacgccgcagcatacccacggactctttgtctgtattgaagggatgggcgtaacccgcattaataaacggagtgcagaacagtggttaaaaaaatttctgggggcgctgaacaataccggagatattccggtgattaaacgcaaaagaacggaacaggagttaatgagtaattga

SEQ ID NO: 372182 - DNA, 279 bp, Salmonella enterica
atgctgcgtatggataagggaccggaatttatctcgctggcactggctgaatgggcaaagaaacatgcagtaaagctggcgtttatccagccgggtaagccgaagaaaaacgttttcatcacgcgctttaaccggacataccgtacagaaatactcaattcttatctgttcagaacgctgaatgaggtgcgggaaattacggataaagggttatcagaatataactgcgaacgtccatatgaatcgcggaacaatatgataccgaaggaataccgctaa

SEQ ID NO: 372183 - DNA, 498 bp, Salmonella enterica
atgaaaagcataaaaaaattgattatcgcaagtgcgttgagcatgatggctgctagttgttatgctagctcatttttgccgaacacagagcaagagaaatcagtgaatgttagctttgccgctcccgaaaatttaaccatatcgtttgatcaagtgccgggcttaatggctgggcagaagcctgcaggtatgaatattgcgaagcttacagttgattctgcttctattaaagaatacggggctaggggggttgctaacacgacactggacgctgctggtagtgcatggaaaataactggtaaaaatagtggcacgatactcactgtgggcttctcaaataataatatgagcagaggtcatggcgcgcaaatgtggaatgggaggagctggttcacctttgataccaatgccccacttgatattgttacaataggggctcagaatatcccacctgatacgtacccaataactgtagacgtagtgggatatcagccttaa

SEQ ID NO: 372184 - DNA, 738 bp, Salmonella enterica
atgaaaacaattaattttgttttaatggcggtagctttgtttgcctctaattctatggtttcagtatatgccgccaggcagcaattaaattcagccactaaatcattcagcgtgaagctgggagctacacgtgtgatttatcacgctggtacaccaggcgcgacgctctcggtgagcaacccgcagaattaccctattttggttcagtcttcagtcaaagcagaagacaaaaattcgccagccccctttatggtgatgccgcctctatttcgtttagaagcgaaccagcagagtcaactgcgtattatccgtactggtggtgacatgccaacggatcgtgagactttacagtgggtctgtataaaggcggtaccacccgaaaatgaaccgtcggatacacaggctaagggcgcgacccttgacctcaatttgtccatcagcacctgtgacaagctgattttccgcccggatgccgtgaaggggacgccggaagatgttgcaggaaatttaagatgggtggagacgggcaacaaacttaaggtagagaaccccaccccgttttacatgaatttagcctctgtcacagtagggggaaagcccattacagggcttgagtatatccccccctttgctgacaaaacactaaatatgccaggtggcactcgtggtgatgtcgagtggaaaattattacagacttaggtggtgaaagtcatccgttccactacgtttttaaataa

SEQ ID NO: 372185 - DNA, 2511 bp, Salmonella enterica
atgaagttcaaacaacctgccttgctactgttcatcgcgggagtggttcattgcgcaaatgcgcacgcttacacattcgatgcatcaatgttgggcgatgcagcgaaaggggttgatatgtcgctctttaacctgggggtacaacagccagggacttatcgagtggacgtgatggtgaatggtaaacgtgtcgacacccgtgatgtggtgttcaaattggaaaaggatgggcaaggaacgccttttctggctccttgtttgacggtcagtcagctttcacgctacggcgtaaaaacggaagattaccctcagttgtggaaagcagcaaagaccccagatgagtgtgcggatctgaccgccattccacaggctcaagcggtactggatatcaataatcagcaactgcaactgagtatttcgcagttggcgttgcgtccggaatttaaggggatcgctcctgaagatctctgggatgatggtattccggcgtttctgatgaactacagtgcgaggacaacgcagacggattacaaaatggatatggagaggcgtgacaactcttcctgggtacaactgcaaccgggaatcaatataggtgcgtggcgtgtccgcaatgcgaccagctggcagcggagtagtcaactgtcggggaagtggcaggcagcatatacctatgctgagcgtggactgtactcactaaaaagtcgtctgactctggggcaaaagacttcgcagggggagatatttgatagtgtgccatttaccggtgtgatgttggcatcggatgacaacatggtgccctacagtgagcggcagtttgctccggtagtgcgtggaattgcccgcacgcaggctcgggtggaggtcaaacagaatggttacaccatttacaacaccaccgtggcgcccggaccgtttgcactgcgggatctgtcggtagcagacagtagtggtgatctgcatgtcaccgtgtgggaggccgatggcagtacacaaatgtttgtggtgccgtatcagaccccggcgatagcactgcaccagggatatttgaagtacagcctgttggcgggccgataccgatcgtcagactctgcaacagataaggcgcagatcgcgcaggctacgttgatgtatggtctgccgtggaatctcactgcatacggcggtatacagagtgcaacgcactatcaagctgcatcgcttggtttggggggatctctcgggcggtgggggagtttatctgtcgatggaagcgacacacacagtcagcgtcagggggaggcggtacagcaaggagcctcctggcgactgcgttacagcaaccagctgactgcgacggggacaaatttttttctgacgagatggcagtatgcctcgcagggctataacaccttatccgatgtgctcgacagttatcgacatgatggcaaccgtctatggtcgtggcgagataatttgcagccgagctcgcgtaccaccctgatgttgagtcagtcatgggggaggcatttgggcaatctgagtttaaccggttcccgtaccgactggcgtaatcgccccggtcatgatgacagctacggactgagttggggaacctctatcggagggggctcgctgtcattgaactggaatcaaaacagaacgctgtggcgcaatggcgcgcaccgtaaagagaacataaccagcctgtggttcagtatgccattaagccgctggacggggaataatgtaagtgctagttggcagatgacttcaccatcacacggtggtcagacgcaacaagtgggggtcaacggagaggcattcagtcagcaactggattgggaggtgcgtcagagttaccgtgccgatgccccgccaggtggtggtaataacagcgcattgcacttggcatggaatggggattacggcctgttaggtggtgactatagctacagccgggcgatgcgccagatgggagccaatatcgcgggaggtatagttatccaccatcatggtgtgacgctggggcaacctttgcaaggctcagtggcgctggttgaagcgccaggggcctcgggggtgccagttggcggctggcctggcgttaagacggattttcgtggcgacaccacagtgggcaacctgagcgtctatcaggagaatacagtcagcctcgatccgtcgcgactaccggatgacgcagaggtcacacaaaccgatgtgcgcgtggtgccaaccgaaggggcggtggtggaagcgaagtttcacactcgcatcggggccagggcactgatgacgctgaaacgggaagatgggagcgccattcctttcggggcgcaggttacagtcaatgggcaggatggcagtgctgctctggtggatactgatagccaggtttatctcactggtctggcggataagggcgaactgacggtgaaatggggagcacagcaatgtcgggttaactaccagctacctgcccacaagggaatcgcgggcttgtatcaaatgagcggtctctgcagatag

SEQ ID NO: 372186 - DNA, 471 bp, Salmonella enterica
atgtggatgaaaatacagcgaatgaaaacggttatctatagcgtaaccttactggttgctgccagtagcttgatgccgatagcgaacgccgcagaaaaacttcagacaacgctacgtgtaggggcttactttcgggccgggcatgtgccagatgggatggtgcttgcgcaaggctgggtgacttatcacggcagtcacagcgggtttcgggtatggagcgatgagcaaaaggcgggtaacacgcctaccgtattgctgctgagcgggcaacaggatccccgccatcacattcaggttcgcctggagggtgaggggtggcaaccagatacggtgagtggtcgtggcgccattttaagaaccgctgcagataacgccagtttcagtgtggtcgttgatggcaatcaggaagtgcctgcggatacctggacgctggattttaaggcctgtgcattgacacacgaggaggcgtag

SEQ ID NO: 372187 - DNA, 822 bp, Salmonella enterica
atgtcttatgcacgacatttaccggtattaatgtatcaccatgtcagtgataaacccggacagataaccttatctccccgtacgttccgggcgcagatgaaatggctggctgaatctggctggaaaaccgttaccgcagcagaggtggaagctttttatcatggtgcaagattgcctcgtaaaagcgtcatgctgacctttgatggcggctggctggataactggttgcaggtttttccggtgctgcaggagtttaatctgcatgcgcatctctttcttgtgaccagtttgatcagtgacggaccggtccgtattcctgcaggcgaactggtgtactctcatgatgagtgtcagaagctggttaaacaaggccgggctgatgaggtcatgctgcgctggtcagaggtccgggagatgcacctcagtggccttgttgagtttcactcgcacacgcacacccaccgacgctgggaccagaaacctgtgtcccgtaatccgtcggatttgcttcgtgtcgatattcttcttagtcgtaagcggatgagggagatgctgggttattgcagtcagcatctgtgctggcctgagggctggtattgttctgactatattcatgtggctgaagagctggggttcacatacctgtataccacagaaaggcgtatgaacaatccagtcatcggttcacagcgtattggtcgtatcaacacaaaggagcgaaagaatgtgggctggctgaaacgtcgtctgttttatcacaccacgcccggattttcttcgctgctggcccggcataagggggcacgtcggatagctgactga

SEQ ID NO: 372188 - DNA, 612 bp, Salmonella enterica
ttgcatcgttcacctaacaaagtatcccgtggaaacaagcaaaacatcgccagattattcttacttgagtcccccacccggctcgacattatttgtgaaagcggaggaaacagaacagacggtttaaataagacgcttactcaaaacataaacctatgtgcaggctcctctcatttcgtcacgtcgctgatatccagctttactggcgccaggggaagatatctgcgcaaggcaataattccggcgcaacaacaaccactcccgctgggcctctgtacattcaaaatctcccatgaccaaaagccagcgggtagaagccctgcgccagtgacctgctgcctccagattctgcgcaaccgggtctatcacggcctccggtgttatcttatttctgctcaaaatcagcaccatcatttgggatatagcctacaacccctgcccgccgatgatgggggaggattcggtatgcagcactttcatcctggtctccggctcagtcagctatccgacgtgcccccttatgccgggccagcagcgaagaaaatccgggcgtggtgtgataaaacagacgacgtttcagccagcccacattctttcgctcctttgtgttga

SEQ ID NO: 372189 - DNA, 948 bp, Salmonella enterica
atgatggaactgatcaataatcgtggtatgcgagactggatgatatttattaaagtggcggaagtagggaatctttcccgggctgcacgggaattagatattagcatttctgctgtcagtaaatcgcttagccgccttgagaattctattgaggttactttacttcggcgcgattcacatcacttagaactgactggagctggtcagacagcctatgcaagcatgaaaaggataacatcttcctttcagtccttgctggatgaattgcgaaatccggataaaattatcagagggagtataaaattttcggctccggctcttgtctgtgagtttcttgccaataagtggatatgggaatttacagctagctatccggatacaaaaatctacctggattcacgagagcgtagcgatttttttagtaaatccctggagtttgatgagctggtttttaaaagtggcataatcgaaagtgaggatctcgtgtatcgaaagataagccctttaaagttggttctttgtgcgagtccgaaatatatcagaaaatatggcaggatctcacaccctggcgatttggaaaatcacattattgtgggtcttcacaatcatggtctttccggacctcttactcttttccgtcaagatgaatcatacactattagtggcgctgttaatgttcatttatcttccaataatcttttgagtgttcttaatttggttttagaaggaaagggtatcaaccttattactccggcctggcttgccaccaaatacttaaaaaataatgaacttgaaattatacttcctgaatggagggtcccagatctccccatttatcttgtatggcgtcatcgtcagtattattctcctttatttcaacgctttctgtcttttattgaagataaatggaataatcgcccacaaattgattttctgaatgatgattaa

SEQ ID NO: 372190 - DNA, 510 bp, Salmonella enterica
atgaaaaaaaacgtaccgattttccttcgattattgctactgctgtcggcggccggcctgtcgtttgccgtgcaggcgggaggcattgcgctgggcgcgaccagggtgatttatccgcagggaagtaagcaaacctccttgccgattattaattcttctgccagcaatgtttttttaattcagtcatgggtcgccaatgccgatggttcacgctcgacggattttatcattacgccgcctctctttgtgatccagcctaaaaaagaaaatatattacgtattatgtatgtcgggccgtcattaccgaccgatcgcgaaagcgtattttatttaaacagtaaagcgataccctctgtcgataaaaataaattgaccggcaactccctgcaaattgcgacgcaaagcgtgattaagctatttatccgcccgaaaaatctggcggaggcgccagctcatgccccgtcgacgcttcgctctgagagatcccctcataatttccccaaagcgtaa

SEQ ID NO: 372191 - DNA, 543 bp, Salmonella enterica
atgaaaaagcctgtactagcattaatggtctctgccattgcctttggcggaatgttgtccaccgcgcaagcggatactacaaccgtcactggcggtacggtaaattttgtcggacaggtcgttgacgctgcctgttctgtttccgctgactctgtcgatcagaccgtgacattaggccaggttcgcgccagtaaattaaccgaggccggtatggtggcgaatcaaaaagaagatttcaccatcaaactggaagactgcgatactcagaccagccagaatgcggcggtgatttttaatggccaacaggacgcaaaccagccggggtcgctggcgaataccgctggggcaggttcggcgacgaatgtggcattacaactttatggaccagatggccaggcgctgaatatcggtgaatcgtccagtactgttaccttgaacgatggcgaaaacgttattccgcttagcgtggattatatcgctaccggtacggcgactgccggtaatgttaccgcgacggcgacatttagcatggtttattcctga

SEQ ID NO: 372192 - DNA, 705 bp, Salmonella enterica
atgaaaaaaatgatgaacgacgcttttgctaaagataataatgagaattcattacactcttttcttttttctcagcaggctaaacctcacgcggcaattgatgccttattttcggccttgttgccatttggtcaaccgtttacgctgggtatcggcgatgagttttatttacaggcaaatgatgaacactacattgtattactggagtcaggcgttgtttctttctgtcatgatgacaaacgactccatatatcttcatcgtttgcgccatcggtcgtgggtatggttgacagctatggcgctacctataacgtccccgcgcgaccggaacactttttgctcgcagaaacggtttgtaccggtagatttgttcgcctgccggattttataaaaatcgccgatgaatgcgatttgtggcacgacgtggcccgttgtctggcttaccgtctgatggtgatgagcgcgcgcgatcgtgaattagtcggcgtcgattcttatctgaaagttcgggcgctgctgactgaaatctgggcttatccacaggcctaccgggaaagcattatcgtgttgaattttattcaacggcgtaccgggatatcgcgcagtcggaccatgaagattctgtctgaactaaaaaaaggcgggtatatccatattgataatgggcggctgacggcgctcggaaaactgccagtggcgtattaa

SEQ ID NO: 372193 - DNA, 2997 bp, Salmonella enterica
atgaccatttccattcacgccagcgcatttgacgtcaacagctggtatcaaaaaatcaccttaaccttcatcaatgagagcggtaatgcggtcgatatgaaccatgccgcaatatcattcacggcttccgggcacatcgatccatggggaaatagcggcggtacgctcaaagggaacctgccgcttacgctgaatgagagttcgtatggcacgctggaaactaacaacatcatcattaataacagcgatgcattacttcttcagccgggcgaacgcgggacgctctctttcagcctcgcggcgacgcaggtgccggtaaaaatgtccgccatcaccttgacgctggcgtcatcgtcatccgaagacgcagagtctgaaaccccatccgatcaggagacgccagcgatacccgccgcagacgaacaactcgccgaacccgatgtgccggaaaaggacaatgatcttcaggaacacggccttacgcttaacgttagcgagttgaataccgcaagttggtatcaacgcgtcacctttacgctgaccaacctctacgcccaggcggtagatctcaatcagcttcaactgaattttacggccagcgcgcaccccgatccctacagtccgtttcagggaacaatgttggggaatcaggccgtgacgctggccagcgatgggggatggcccatcgagaagaataccatcaccattaatcatgacggcgcgctgatgctggcggcgggggataccgccgaattacagtgctatctggccgccacgcagacgccagttgccatcagcgatttgaacgcgacgttggcccatgatcctgcccgtcagggaaaagtttgcgttcattttcctgccatgacgcagaccgtggcgctcaaaccggtgattgagctgctgtttcctgccggcgaaacccggcgctttgtcggtgagtggggcgaggttctgacaataggcgatcttagcgcaggaacgtatcggcttaccgtaccggtactggcgaatgatgagatgcaaatcgcgccagtcgagtcctcttttaccgttacgctgcaatccggcgatgccgccgcgcaggtccaggtatcctgtctgccgattgtccgttatgccagcgcgcgtctgatgattgacgcccctgcgcttggtaatgcgaaattgaccgttgagatcgccgatgctacgcaagcggatgagcgtaccgtcacgctgatcgccaaccaaccgcagttaatcacccggctactggcggggcatcattatacggtcaatctgcagcctgcgatgattaataaccgctttatatcggcacccatacagcttacgggatttatccctgctgcggcgcagattgccgaggttgctgtcgcttaccaacagtcggcgctcgacacggcgagtttcgtgacggtggatgccactatactgggcctgcccgatggcgtcgcgccgcagcgttatctgttcagcagcggtaaatatcagtactcattaatgctggagagcggcagcgatcggcagacgttggcattacgctttgcgcccgggctgtatgatgttcagacggacgatattttcatcgacagcgtgccgtggcgttgtgaacaggccgggccgctacggttgttgcaaaaggtcaaccatgtggcgctggagtttctgcccggcgtgacgctacaggtaaaaggttggcctgattaccttgctcatggcggcgtgacggttaacgcgccagagacggtttctctttatcgcgatataccgtttagcgcgttgtttaaatacgatggttttgacggcggcggcgatccggttccggccgcggaggttgacgtgaacggggatggttttctggattacgcgacgttaccgatccataaaaccgttgcgctggtgcgccagatagaaaaagaagccgggcgtagcgtcatgccggtaatggtcatttataccgcgaatgccagcggcggtagcgcgctggcggatttacaggatgcgcaaaagctacgtaaccattttggtaactttattacccagtgtctggcggcgcagtcatacaaagatgagacgcatcctgtcccggccacctttgtgcttaacccggattttctcggggcgctacagcaaggaccgtatggctataccgtagtacggcaaaaaaacagtgtgccggtgaatgcccaactggcggcggcgatacaagcattaccggcgatggctggctttatcgtgccttcgttgccgacgtttagcgacgatctctacggctatattcaggcggtgaactatcttgttcgtcagtttgccccggatgtggcttttggctggcagacgaatgtctgggcgacaggaacggcggactgggtgttgcgcgataccgctgatccggtagctgaagggcaggcgatcgccggatttattcatgaactgggcgtttacagcggagaatatgcgccggactttattgcgtttgataaatttgagcgtgactgtttcagtcctgatgcgcttgcccactatggctggaatgcgacatgctggcttaattacctggcgatggtcaaacaggtgacgaaagcgctgctgacgcccgccatgctgtggcaaatccctggcggccatatgcctacagtagaagagggcgtcagtaaaatcagcgctgcgcactttgcatccggcggaaccttttttatgggggacgcccgcattggcagcgatcctgacacgctctctttgcagctactcaatacggccttaaatagcgcgacttacggcgtcccgaccgtcggcgactttttacgtaaagataaagggtatgactggggccagatgcaggcgctgaatctaccggactttaacgtcttttcgatcttatggggcggtggttctactatcagtattacgacaatccattctaacggtgaagacggcggctggctggcggataaaatggtagagtattatgctgcccctcgctatttcagataa

SEQ ID NO: 372194 - DNA, 2100 bp, Salmonella enterica
atggctacaagcaaactgattcaaggcgatacaattactgaaactactcatgcagcgaatggttttgaccctgcaacaagcgatgataaaataagctatacttccgctcgtgttgcgaaaccggtatacaataaatataaaaattccacgactaaaccgaaggtattcggttattacaccgactggtcacagtatgacagccgtctgcaaggcaatatgtcccaaccgggccgtggttatgatttaaccaaagtttcaccgacggcttatgacaaactgatttttggctttgttggcatcaccggtttcagaaaaattgatacagaagaccgcgatgtcgtagcagaagcggcagcgctgtgcggcaaagtgaaatatgagccgaccttcctcgacccatggggcgacttccagtcttatatcaacctcggctttgatgtcagcggctgggatgtggatccgaagactgtaactcagtctaacgccaagggtctgctgggcgcgctgcgtgatatgcaggcaaaagcgaaagccgcaggtcacacgctggcgctctccatgagtatcggcggctggagcatgagtaacgggttccacgaaaccgccgcttctgactcttctcgtaaaatcttcgccaaaggcgtggtgaaactgttcaaacagttcccgatgttcagcgaagtggatattgactgggaatacccgaacaatgaaggggcgggcaacccgtttggtccggaagatggcgctaactacgcgctgctgattgccgaactgcgtaaacagctggattccgctggtctgagcaatgtgaagatctctattgccgcttctgctgtcactactatttttgactatgcgaaagtaaaagatctgatggctgctggcctgtatggcatcaacctgatgacctatgacttcttcggtacgccgtgggcggaaactctgggccaccacaccaaccgcaaagcgctggaagagggcggctgggctgtcgaaaccatcgttgatcacctgctggcggaaggtttctccgctgaccgtatcaacatcggttatgccggctatacccgtaacgctcgtcaggtagaaattgaatccctgtcgccgctgaaaggttcttacaacccaggttcaggccctactaccggttcctttgaatccggcaccagtgaatggtatgacgtcatttatagctacctggatctggaaaaccagaaaggccgtaacggtttcaacgtttacaccgaccaggtcgctgacgctgactacctgtatagcccggaatccaaactgtttttatccctggatacgccgcgtactgtcaaagcaaaaggcgaatatgcagcgaaactgggcctgggcggcgtgtttacctggactatcgatcaggacaacggcgtgctggttaacgccgtgcgtgaaggtctgggttatgaaatcgaatctgaagttatcgatatggaaccgttctactttgaaggtatcaatgtagaaaaagatgaagagcagagcgacagcgacgacgcgcagaaggtcaaccacgcgccgaaagcggcgattgaactgctggtcgtaggcggatctacggtacagctgtctggcgcaggttcttctgatgaagataacgatgagctgtcctttagctggggcgtgccttctcaaatcactgtggcagacaaaacggctgaaatcattgaggttgtggtaccggaagttagcgaaaaaacagccttccagttcaccctgtttgtacgcgactgctacaacgaaccgtcctctcaacagcgctttgttctgacggctgtgcctgcgctatctcaggttcaaccggaaccggaagaggaagaagatattatcgttcctgtaccggacgaggaagaagataccacaccggctgaggatgatacgccagcagatgacaaaacgtcaccttacgcgcagtgggatgcttctaccgtttatggcgcaaactggggttctttcgaaatcgttagctggaaaggccataactatcaggtgaaatggtggtctatgggcaaccagcctgacctgaactgcggtgtcggcggtgcatggaccgatcttggcgcttactaa

SEQ ID NO: 372195 - DNA, 444 bp, Salmonella enterica
atgaaaacttatatcattaatagcaattgcatttacaatgaaggtaaatatgaactgaggacggtctcaaattcacaggttattaaaatgactgcgatgagagccaaatgtctcagtttcatcatcgagaatgctcatctggagattatcgagcgacaaaaaataaccactgcgttatggggaagtcgaagccattatgttaatgatgcaaatctaacgcagattctctatttaatcagacgtgaccttaaagcgcttggtattaacgatctttttattaccattccaagacaaggtctcaaagtgaatagtgatatcgccattatcgcgacggatagcgaaacaaagggaagaaaaaaacagattgtacggcaaaccatcgccgccctgacgaccgtattttcagtaacgttaggttctctcatgtatctgcatattcactaa

SEQ ID NO: 372196 - DNA, 534 bp, Salmonella enterica
atgaatccaattatagatggaattattgcgcttgaaggcggttacgtatttaaccctaaagataaaggcggcgccacccattggggcattaccgaagccacggcgcgagcgcatggctatgctggcgatatgcgggatctgacccacgctgaagcctacgcgattctcgaagaggattactggataaaaccaggttttgacgtcatctcgacgctatcgtggccagtctccttcgagctgtgcgatgcggcagtcaacataggcgcttaccaccccagcgcgtggctgcaacgctggttgaacgtctttaatcacgaaggtaaacgctacccggatattcatgtggatggcaatattggcccgcggacgcttgccgctctcgaacattatttggcctggcgaggccaggaaggggaagccgttttggtgaaagccctcaattgcagtcagggcacgtactacttaaacgttgctgagaaaaaccacaataacgaacaatttatttatggctggatcaagaatagagtgacctag

SEQ ID NO: 372197 - DNA, 345 bp, Salmonella enterica
atgtctattcccaaccatgtgtcgacaacggaagttgtgctattggagctagagatcttactcactattatttcgattggcgcgtggggaggctttgtcagctatcttttacgcaaagataagacagaatataatagttctcatgaaagtattaaatattgcttaacgcagatcgtgatttcctgcttcaccagtttcttgttaagcgcgattgcgatcgaaaaagaatgcagtttcaacattgttctgttggcggcaggcttaggcggtgttttcgcgagtccgatcttaaagattcttgggcggcggattaaaaaaattatcgaaggtaataattcagattaa

SEQ ID NO: 372198 - DNA, 948 bp, Salmonella enterica
atgggatcgaaaggtgccaacaagagctttgattataatttaatcaaaattcttgacgctgttattttgtcaggaaatgcggctatggcggcaaaaaagttaggcattacaccggctgccgtttctctggcgttaaagcgcctgcagagttattacccggaagaactgtttagcagagggaaaggcgggctcatccccacagctaaggctgtcgacattcaccaaaatttcagtcaggtgatgaaactggtggatgacacctttctctgtaatagtaaaaaagatgaagcgttccagataacgttattaggcagtgatattgttgaaagctattatctttctcagctctataacagcgatatatttgaccgtattttgataaatcatttcactgtcagaaatatgagtcgggagcatatcagcgaacttctgtttactgcgcaaggcgatctgttgattagtgccgaacctttgctggagtccggcatagagaatcaaattattgatagttttaaatcatttgtttgtatctgtagcagtaaacacatgctgagtaccctctcacaactgtcgctacatcatttttattcttcgcgtcatgcgttatatcagccggggatgggggcttcagtgatatatcatgatagtgaattatttaaggatgagctttactatactggcaggcgtattgtcggctatcgcagtgattcgcttaacggtttgatgagcatgatcgaacgaacctcattgattgcattgatgcctttgaaattagcgcttttttataaaaatcatcgtaaatatgacattaaatttattcagcctccgcccgaactggctttgaagtcagttcaggtttatgcatcctggaataaaaatagtagaaatatatcgacgattaatgagatggtaagtatgttacaaacgctttcctccttccgtcgttaa

SEQ ID NO: 372199 - DNA, 141 bp, Salmonella enterica
atgcgtttaacagaagcctgggcgcgtacaggcagaaaaaagcccggatatacacccgggctgaagaaaaatacaacgggaaaaagattagcgagtcaaatcgtcaaagaattttttcacgccgtcaaagaagctttttga

SEQ ID NO: 372200 - DNA, 1140 bp, Salmonella enterica
atggcgaaaagagattactacgagattttaggcgtttccaaaacagcggaagagcgtgaaatcaaaaaggcgtataagcgcctggccatgaaatatcatccggaccgcaatcagggtgataaagaggccgaagctaagtttaaagagattaaagaagcctacgaagtgctgaccgatgcgcaaaaacgcgcagcctacgatcagtatggtcacgccgcgtttgaacaaggcggtatgggcggcggatttggcggcggctttaatggcggcgctgatttcagtgatatctttggtgacgtttttggcgatatctttggcggcgggcgtggtcgccaacgtgcggcgcgtggggctgatttgcgttataacatggatctcaccctggaagaagcggtgcgtggcgtgaccaaagagatccgtattccgacgctggaggagtgcgacgtttgccacggcagcggcgcgaaagctggtacgcaaccgcaaacctgtccgacctgtcatggttctggtcaggtacagatgcgccagggattctttgctgtacagcagacctgcccacactgtcagggccgcggtacgctgatcaaagatccgtgccataaatgtcacggtcatgggcgtgttgaaaagagtaaaactctgtccgttaaaatcccggcgggcgtggataccggcgatcgtattcgtctggcaggcgagggcgaagcgggcgagcatggcgcaccggcaggcgacttgtacgttcaggtccaggtgaaacaacaccctattttcgagcgtgaaggcaataatctttattgcgaagtgccgatcaactttgcgatggcggcgctgggcggtgaaattgaagtgccgacgttagatggtcgtgtgatgctgaaagtaccgagcgaaacacaaacgggcaagctgttccgtatgcgcggcaaaggcgtgaagtccgtacgcggtggcgcgcagggcgatttgctgtgccgtgtggtggttgaaacgccggtcggtctgagcgaaaaacagaagcaattgctaaaagatcttcaggaaagttttggcggcccgacgggagagaaaaacagcccgcgttcaaaaagcttctttgacggcgtgaaaaaattctttgacgatttgactcgctaa

SEQ ID NO: 372201 - DNA, 1917 bp, Salmonella enterica
atgggtaaaattattggtatcgacctgggtactaccaactcttgtgtagcgattatggatggaacgcaggcacgcgtgctggagaacgccgagggcgatcgcactacgccttctatcattgcttatacccaggatggtgaaactctggttggtcagccggctaaacgtcaggcagtgacaaacccgcaaaacaccctgtttgcgattaaacgcctgattggccgccgcttccaggacgaagaagttcaacgtgacgtttctatcatgccgtacaaaatcatcggcgccgacaacggcgacgcatggcttgatgtgaaaggtcagaaaatggcgccgccgcagatttctgccgaagtgctgaagaaaatgaagaaaacggctgaagattatctgggcgaaccggtaactgaagcggttatcaccgtaccggcttactttaacgatgcgcagcgtcaggctaccaaagatgctggtcgtatcgcggggctggaagttaaacgtatcatcaacgaaccgactgccgcagcgctggcttacggtctggataaagaagtcggcaaccgtactatcgcggtttacgacctcggtggtggtactttcgatatctctattatcgaaatcgacgaagttgatggcgaaaaaacctttgaagttctggcaaccaacggtgatacccacttgggtggtgaagacttcgatacccgcctgatcaactacctcgttgacgagtttaagaaagatcagggcattgacctgcgtaacgatccgctggccatgcagcgcctgaaagaagccgcagaaaaagccaaaatcgagctgtcttctgcgcagcagaccgacgtgaacctgccgtacattaccgcagatgccaccggtccgaaacacatgaacatcaaagtgactcgtgcaaaactggaaagcctggttgaagatctggtgaaccgttctatcgagccgctgaaagtcgcactgcaggacgctggcctgtccgtgtctgatatcaacgacgtgatcctcgtcggcggtcagacccgtatgccaatggtgcagaaaaaagtggctgaattctttggtaaagagccgcgtaaagacgttaacccggacgaagctgtggctatcggcgcagcggtacagggcggcgtgttgaccggtgatgtgaaagacgtactgctgctggacgttaccccgctgtctctgggtatcgaaacgatgggtggcgtgatgactccgcttatcaccaaaaacaccaccatcccgaccaagcacagccaggtgttctctactgcggaagacaaccagtctgcggtaaccatccatgtgctgcagggtgagcgtaaacgtgcgtctgataacaaatctctgggtcagttcaacctggatggcatcaacccggcgccgcgcggtatgccgcagatcgaagtcaccttcgatatcgatgctgacggtatcctgcacgtctccgcgaaagataaaaatagcggtaaagagcagaagatcactatcaaggcgtcttctggtctgaacgaggaagaaattcagaaaatggttcgcgatgcagaagcgaacgctgaatccgaccgtaagttcgaagagctggttcagacccgtaaccagggcgaccatctgctgcacagcacccgtaagcaggttgaagaagcaggcgataaactgccggttgatgacaaaaccgctatcgagtctgcgctgaacgcgctggaaactgccctgaaaggcgaagataaagccgctatcgaagcgaaaatgcaggaactggcgcaggtttcccagaaactgatggaaatcgctcagcagcaacatgcgcagcagcaggctggctccgctgacgcttctgcaaacaacgcgaaagatgacgacgttgtcgacgctgagtttgaagaagtaaaagataaaaaataa

SEQ ID NO: 372202 - DNA, 405 bp, Salmonella enterica
atgcgatctgtgttaacgatttccgccggcctgcttttcggcctggcgttaagtagcgtcgcgcacgcgaacgaccataaaatactgggtgttattgccatgcccagaaatgaaacgaacgatctcgcgctaaaaattcccgtctgccgcatcgtgaagcgcattcaactcacggcggatcacggcgacatcgaacttagcggcgcatccgtctattttaaaactgcgcgtagcgccagccaaagcctgaacgtcccttcctcaatcaaagaaggccagacgacaggctggatcaatattaatagcgataacgacaacaaacgctgcgtatcaaagattaccttctcaggccatacggtaaattcttccgatatggcgagacttaaagtcattggcgacgattaa

SEQ ID NO: 372203 - DNA, 714 bp, Salmonella enterica
atgaacgtcacttatttacacgacgaggatttagactttcttcagcattgtagcgaagaacaactcgccgatttcgcccgtttgctgacgcataacgaaaagggcaaggctcgcttgtcaagcgtccttagtcataacgagctgttcaaagcgatggaaggtcacccggagcaacaccgccgtaactggcagctcattgccggcgagtttcagcattacggcggcgacagtatcgccaacaaattgcgcgggcacggaaaacagtaccgcgcgattctgctggatgtcgcaaaacggctaaaactcaaagcagataaaagcatgtcgacgtttgaaatagaacagcaactgctggagcattttttacgtcatacctggcagaagatggacgcggcgcataagcaggaatttctgcaagccgtagacgccaaagtttctgaactggaagaactgctgccgctgctcatgaaagatcgcagtctggcaaaaggggtctcccacctgctttccacccagcttacccgcattttgcgtacccatgccgcaatgagcatcctgggccacggattgctgcgcggcgcaggtcttggcggcccggtcggcgcggcgttaaacggcgtcaaagcgatgagcggcagcgcgtatcgcgtgactattccggcagtgttgcaaatagcctgcctgcgacgaatgatggcagccgttcaggcgtga

SEQ ID NO: 372204 - DNA, 567 bp, Salmonella enterica
atgggcaacactaagttggctaatccggcaccgctgggcctgatgggcttcggcatgaccaccattctgcttaacctgcacaatgccggttttttcgccctggacggtattattctggcgatggggattttctacggcggtatcgcgcaaatttttgccggtctgctggagtacaaaaaaggcaatacctttggtttaacggcctttacctcttacggttcgttctggctgacgctggtcgctatcctgctgatgccgaaaatgggcctgacggatgcgcctgacgctcagctactcggcgcttatttaggtctgtggggcgtgttcacgctgtttatgttcttcggtacgctgaaagccgcccgcgcgctgcaatttgttttcctgagcctgaccgtactgttcgctctgctggcggtcggcaatatcaccggtaacgaagccattatccatatcgcaggctgggttggtctggtttgcggcgccagcgctatttatctggcgatgggtgaagtgctaaacgagcaatttggccgcactattctgccaatcggcgaggcgcactaa

SEQ ID NO: 372205 - DNA, 591 bp, Salmonella enterica
atggataccttacgtattggcttagtttctatctccgaccgcgcttcaagcggcgtttaccaggataaaggcattcctgcgcttgaggagtggctcgcttctgcgctgaccacgcctttcgaggtccagcggcgcttaattcctgatgaacaggaaattatcgagcaaacgttgtgtgaactggttgatgagatgagctgtcatctggtgctgaccactggcggtaccggtccggcgcgtcgcgacgtcacgccggacgcgacccttgccatcgccgaccgtgaaatgccaggttttggcgaacagatgcgccagatcagcctgcgctttgtgccgaccgccattctttcccgccaggtgggcgttatccgtaaacaggcgttaattcttaatctgcctggacagccaaaatcgatcaaagaaacgctggaaggcgtaaaagcggacgatggcagcgttagcgtgccgggcatttttgcgagcgtgccgtattgcatacagctgcttgacgggccgtatgtcgaaaccgcgccggaagtggttgccgctttccgtccaaagagcgccagacgtgagaatatgtcgtcctga

SEQ ID NO: 372206 - DNA, 954 bp, Salmonella enterica
atgacggacaaattgacctcccttcgtcagttcaccaccgtagtggctgataccggagatatcgcggcaatgaagctgtaccagccgcaggatgctacaactaacccttctctcattcttaacgcagcgcaaatcccggaatatcgtaagctgattgacgatgctgtcgcctgggcgaagcagcagagcagcgaccgcgcgcagcaggttgttgacgcgaccgataagctggcggtgaatattggcctggaaatcctgaagctggtgccggggcgtatttctaccgaagttgacgcgcgtctgtcttatgacactgaagcgtctatcgccaaagcaaaacgtatcattaaactctacaatgatgcgggtatcagcaacgatcgtatcctgatcaagctggcgtccacctggcagggcattcgcgcagccgaacagctggaaaaagaaggcatcaactgtaacctgacgctgctgttctccttcgcgcaggcgcgtgcgtgcgccgaagcgggcgtctacctgatctcgccgttcgtaggtcgtattcttgactggtataaagccaataccgacaagaaagactatgcgccagctgaagatccgggcgtggtttccgtaacggaaatctacgagtactacaaacagcatggttacgaaaccgtcgttatgggcgcaagcttccgtaacgtaggcgaaattctggagctggcgggctgcgaccgcctgactatcgcaccggcattgctgaaagaactggcggaaagcgaaggggcgattgagcgtaagctctctttctccggcgaagtcaaagcgcgcccggaacgcattaccgaagccgagttcctgtggcagcatcaccaggaccccatggcggtggacaaactggcggatggtatccgtaagtttgcggtagaccaggaaaaactggaaaaaatgatcggcgatctgctgtaa

SEQ ID NO: 372207 - DNA, 1431 bp, Salmonella enterica
atgcctgagtttttcagttttattaacgaaatactctggggctcggtaatgatttacctgctgctcggcgcaggatgttggtttacctggcgtaccggattcattcaatttcgttatattcgccaatttagccgcagtctgaaaggcagccttagcccgcagccaggcggcctgacgtcatttcaggcactgtgtaccagcctcgcggcgcggattggcagcggtaatctggccggcgtggcgctggctatcgccgcaggcggtcccggcgcggtattctggatgtgggtctcggccatcattggcatggcgacctccttcgccgagtgttcgcttgcccagctttataaagaacgtgacccgacaggccagttccgcggcggcccggcgtggtatatggcgcgtgggctgggaatgcgctggatgggcgtggttttcgccctctttctgctcgtcgcctacgggttgatttttaatagcgtgcaggcgaatgccgtctcacgcgcgctccatttcgccttcaacattccgccgcttatctccggcattgctctggcgttctgtgccctgttaattatcattcgcggcatcaaaggcgtcgcccgtctgatgcaatggctgattcccatcatcgcgttattgtgggtcgccggcagcgtattcatttgcctctggcatattgagcaaatgcctggcgttatcgcctcgatagtcaaaagcgcatttggctggcaggaagccgcggcaggcgcagccggatatacgctcacccaggctattaccagcggttttcagcgtgggatgttctctaatgaagcgggaatggggtcaacgcctaatgcggccgcagcggcaacgtcgtatccacctcatcctgtcgcgcaggggattgtgcaaatgattggcgtattcagcgacaccattatcatctgtaccgccagcgcgatgattatcctgctggcggggaatcacgcgtcccattcgtcaacagaaggcattcagcttctccaacatgcaatggtttcgttgaccggtgaatggggcgccagttttgtcgcgcttatcgtcattctgttcgcgttcagttctatcgtcgccaactatatttacgccgagaacaatctgttttttctgcggttacataacgcaaaggccatctggctattacgccttgcgacgcttggcatggtcatcgccggtacgctcatcagttttccgctgatatggcagctcgctgacatgatcatggcctgtatggctattaccaatctgacggcgattttgttgctctcaccggtggtgtataccctcgccggcgattatctgcgacaacggaaactgggcgtaagaccgcagttcgatccgcggcgcttcccggatatcgaaccacaactggcgccagatacctgggatgcggcatcgcgcgattaa

SEQ ID NO: 372208 - DNA, 774 bp, Salmonella enterica
atgctgattctgatttcacctgcaaaaacgcttgattatcaaagcccgctggccacgacccgctatacccagccggagctgttggatcacagccagcagcttattcaacaggcccgccagctttcggcgccgcaaatttccaggctgatgggaattagcgacaaactggcggatctcaacgccacgcgttttcatgactggcagcctcattttacgccggataatgcacgccaggcgattctggcgttcaaaggcgatgtttataccggcctacaggcggaaacgttcaacgacgcggattttgattttgctcaacaacatctgcgtatgctctctggcttgtatggcgtattgcgcccgctggatttaatgcagccttatcgtctggagatggggattcgcctggagaatccgcgcggcaaagatctttatcaattctggggcgatatcattaccgataagctcaacgaagcgcttgaggcgcagggcgatcgggtggtggtgaatctggcctctgaggaatattttaaatcggtgaagccgaagaaactgaatgccgaactgattaagcccgtgttccttgatgagaaaaacggcaagtttaaggtggtaagcttctacgccaaaaaagcgcgcggactgatgagccgttttattattgaaaaccgcttaacgaagccggaacagcttaccgcgtttgaccgtgaagggtatttctttgatgaagaaacctccacacaagacgagctggtctttaaacgctacgagcagtaa

SEQ ID NO: 372209 - DNA, 1287 bp, Salmonella enterica
atgaaactctataatctgaaagaccataatgagcaggtcagctttgcgcaggccgtcacgcaagggctgggcaaacagcagggacttttttttccgcacgaactgccggagtttagcctgacggaaattgatgagatgctcaaccaggactttgtcagccgtagcgcaaagatcctctcggcatttattggcgatgaaataccgcagcaaattctggaagagcgcgtccgcgcggcgtttgctttcccggcgccggtagcgcaggtagaaagcgatgtcggctgcctggagctgttccatggtccgacgctggcctttaaagacttcggcgggcgttttatggcgcaaatgctgacgcatatcagcggcgacaaaccggtgacgattctgaccgcaacgtcaggcgataccggcgcggcggtggctcacgcgttctatggcctggaaaatgtgcgggtcgtcattctctatccgcgcggtaaaatcagtccgttgcaggaaaaactgttctgtactctgggcggcaacattgaaaccgtagcgatcgacggcgatttcgacgcttgccaggcgctggtgaaacaggcatttgatgacgaagaactgaaaacggcgctggggctgaattcagctaattcgattaatatcagccgcctgctggcgcaaatttgctactactttgaagccgtggcgcaactgccgcagggggcgcgtaaccaactggtgatctccgtacccagcggcaactttggcgatttgacggcaggactgctggcgaagtcgttaggcctaccggtgaaacgctttatcgccgccaccaacattaacgatacggtgccgcgtttcctgcaggacgggaagtgggcgccaaaagcgacgcaggcgaccctgtcgaatgcgatggatgtcagccagccgaataactggccgcgtgtggaggagctattccgccgtaaaatctggcgtctgactgagctgggctatgcggcggtggatgacactacgacacaacagacgatgcgcgagctgaaagcgaaaggttatatctcggaacctcatgcggcggtagcgtatcgggcattacgcgaccagttaaaccctggcgagtatggcttgtttctcggaacggcgcatccggcgaagtttaaagaaagcgtggagtccattctgggagaaacgctggccttgcctgaagcgctcgccgaacgcgccgacctgccgctgctttcacatcatctgcctgcggattttgccgccctgcgtaagctgatgatgacccgccagtaa

SEQ ID NO: 372210 - DNA, 930 bp, Salmonella enterica
atggtgaaagtgtatgccccggcttccagcgcgaacatgagcgtcggtttcgacgtgttgggcgcagccgtcacacccgttgacggcacgttgctgggcgatgtggtatccgttgaagcagcggaccatttccgtctgcataacctggggcgatttgccgataaactgccgccggagccgcgtgaaaatattgtttatcagtgctgggaacgtttttgccaggcattggggaaaaccatcccggtggcgatgacgctggaaaaaaatatgccgattggttccgggttagggtccagcgcctgttccgtcgtcgccgcgctggtcgcgatgaatgagcactgcggcaaaccgttaaacgacacgcgtctgttggcgctgatgggcgagctggaaggccgtatctccggcagcatccattacgataacgtcgcgccgtgctttcttggcggtatgcagttgatgattgaagaaaacggcattattagtcagcaggtgccgggctttgatgagtggctatgggtactggcttatccgggcattaaagtttctaccgcagaagcacgggccattttgcctgcgcagtatcgccgtcaggattgcattgcgcatggacggcatctggccggttttattcacgcctgttactcgcggcagccgcagcttgccgccgcgctgatgaaagatgttattgccgaaccataccgcgcgcgtttactgccgggctttagccaggcgcgacaggcggtgtcggagatcggcgcgctggcgagcgggatttccggatcggggccgacgctgtttgcgctatgcgataaaccggagacggcgcagcgcgtcgcggactggctgagcaaacattatctgcaaaatcaggaaggcttcgttcatatttgccggctggatacggcgggcgcacgagtagtgggataa

SEQ ID NO: 372211 - DNA, 2463 bp, Salmonella enterica
atgcgagtgttgaagttcggcggtacatcagtggcaaatgcagaacgttttctgcgtgttgccgatattctggaaagcaatgccaggcaagggcaggtagcgaccgtactttccgcccccgcgaaaattaccaaccatctggtggcgatgattgaaaaaactatcggcggccaggatgctttgccgaatatcagcgatgccgaacgtattttttctgacctgctcgcaggacttgccagcgcgcagccgggattcccgcttgcacggttgaaaatggttgtcgaacaagaattcgctcagatcaaacatgttttgcatggtatcagcctgctgggtcagtgcccggatagcatcaacgccgcgctgatttgccgtggcgaaaaaatgtcgatcgcgattatggcgggacttctggaggcgcgtgggcatcgcgtcacggtgatcgatccggtagaaaaactgttggcggtgggccattaccttgaatctaccgtcgatatcgcggaatcgactcgccgtatcgccgccagccagatcccggccgatcacatgatcctgatggcgggctttaccgccggtaatgaaaagggtgaactggtggtgctgggccgtaatggttccgactattccgccgccgtgctggccgcctgtttacgcgctgactgctgtgaaatctggactgacgtcgatggcgtgtatacctgtgacccgcgccaggtgccggacgccaggctgctgaaatcgatgtcctaccaggaagcgatggaactctcttacttcggcgccaaagttcttcaccctcgcaccattacgcccatcgcccagttccagatcccctgtctgattaaaaataccggtaatccgcaggcgccaggaacgctgatcggcgcgtccagcgacgatgataacctgccggttaaagggatctctaaccttaacaacatggcgatgtttagcgtctccggcccgggaatgaaagggatgattgggatggcggcgcgtgttttcgccgccatgtctcgcgccgggatctcggtggtgctcattacccagtcctcctctgagtacagcatcagcttctgtgtgccgcagagtgactgcgcgcgtgcccgccgtgcgatgcaggatgagttctatctggagctgaaagaggggctgctggagccgctggcggttacggagcggttggcgattatctctgttgtcggcgacggtatgcgcacgctacgcggcatttcagcgaaattcttcgccgcgctggcgcgggctaatatcaatatcgtggcgatcgctcagggatcttctgagcgttccatttctgtggtggtgaataacgacgatgccaccaccggcgtgcgggtaacgcaccagatgctgttcaataccgatcaggtgattgaagtatttgtcattggcgtcggcggcgtcggcggcgcgctactggaacagcttaaacgtcagcaaacctggttgaagaacaagcacatcgatctacgcgtgtgcggcgtggcgaactcaaaggcgttgctaaccaatgtgcatggcctgaatctggacaactggcaggcggaactggcgcaagcgaacgcgccgttcaatctgggacgcttaattcgcctggtgaaagaatatcatctactcaatccggtgattgttgattgtacctccagtcaggcggtggccgaccagtatgccgacttcctgcgtgaaggattccatgtggtgacgccaaacaagaaagcgaacacctcgtcgatggactactaccatcagctacgtttcgccgccgcgcaatcacggcgcaaattcttgtatgacaccaacgtcggcgccggtttgccggtaatcgaaaacctgcaaaacctgctgaatgcgggtgatgaactgcaaaaattttccggcattctttccgggtcgctctcttttattttcggtaaactggaagaggggatgagtctctcacaggcgaccgccctggcgcgcgagatgggctataccgaacccgatccgcgcgacgatctttccggtatggatgtggcgcggaaactgttgatcctcgcccgcgagacgggccgcgagctggagctttccgatattgtgattgaaccggtgttgccggacgagtttgacgcctccggcgatgtgaccgcctttatggcgcatctgccgcagcttgacgacgcgtttgccgcccgtgtggcgaaagctcgtgatgaaggtaaggtattgcgctatgtgggcaatatcgaagaggatggcgtgtgccgcgtgaagattgccgaagttgatggtaacgatccgctcttcaaagtgaaaaacggtgaaaacgcgctggcgttctacagccactattatcagcccttgccgttggtgctgcgcggctacggcgcaggcaatgatgtgacggcggcgggcgtgtttgccgatctgttacggaccctctcatggaagttaggagtttaa

SEQ ID NO: 372212 - DNA, 687 bp, Salmonella enterica
atgcgtgtaacaatcgttcttgtcgctcccgccagagcggaaaatatcggcgcagccgcccgggctatgaagaccatgggatttactgacctgcgtattgtcgacagccaggcgcacctggagcccgccacccgttgggtcgcacatggatctggcgatattattgataatattgaggttttccacacccttgctgacgcgctccacgatgtggattttaccgtcgcgacgacagcccgcagccgggcaaaatttcattactacgcttcgcccgctgaactggttcccttattacaggaaaaatcacgctggatgcgtcatgccgcgctggtttttggccgtgaggattccggtctgaccaatgacgagctggcgctggcggatgtattgaccggcgtgccgatggcggcggattacccttcgctcaatctgggacaggcagtcatggtgtattgctatcaattagcaggtttaatgcaacagaccacagaatccgttgatattgctgatgaatcgcagttacaggcgttacgcgcgcgccttttacgcctgctaacgactctggaggcgaccgatgaccacaaattaaccgactggctacaacagcgaatcggcctgctgggacagcgagatacggtaatgttgcaccgtttggtccatgatattgaaaaaaaactaacaaaataa

SEQ ID NO: 372213 - DNA, 717 bp, Salmonella enterica
atgcagaccccgcacattcttatcgttgaagacgagttggtaacacgcaacacgttgaaaagtattttcgaagcggaaggctatgatgtattcgaagcgacagatggcgcggaaatgcatcagatcctctctgaatatgacatcaacctggtgatcatggatatcaatctgccagggaaaaacggtctcctgttagcgcgtgaactgcgtgaacaggctaacgttgcgctgatgttcctgacgggccgcgataacgaagtcgacaaaattctcggcctcgaaatcggcgcggatgattacatcaccaaaccgtttaacccacgcgaattgaccatccgtgcccgcaacctgctgtcccgtaccatgaacctgggtaccgccagcgaagagcgtcgtagcgttgaaagctacaagttcaacggttgggaactggatatcaacagtcgttcactgatcggcccggacggcgagcagtataaactaccgcgcagcgagttccgcgcgatgcttcacttctgcgaaaaccctggcaaaattcagtcgcgcgcagagctgttgaagaaaatgaccggccgcgagctgaagccgcatgaccgtactgttgacgttaccattcgtcgtattcgtaagcatttcgaatccacgccggatacgccggaaatcatcgccaccattcacggcgaaggttatcgcttctgcggcgacctgcaggattaa

SEQ ID NO: 372214 - DNA, 315 bp, Salmonella enterica
atgaaaaaatcaccattatgctgctacctgttttgtgcagcgatgtcagcttcatcagccgcgctggctgctaccgcgccggtctccgcaggcgttattcatttcaaaggccagattgtcgaatatggttgtaatcttgcgcctcacgatcgcaatatcgaggtatcatgtttgcggaataatatcccccatttgcagacagtcgccacaccgtctggaaacgctatttcgttgatgaatggaatcgccacggtacggcacgtgtcgttaaaagatcatccggagattcaaagtctgatcgtccagtaccgctaa

SEQ ID NO: 372215 - DNA, 555 bp, Salmonella enterica
atgtctgacacattacgtccttataaggatctttttcctgaaatcggtcagcgcgtgatgatcgataccagcagcgtggttattggtgatgtccgtctggcggatgatatcgggatctggccgcttgtggtgattcgcggcgatgtgaattacgttgcgataggggctcgtacgaacattcaggatggcagcgttcttcacgtaacccacaagtcttcatccaatccacacggcaacccattaatcattggcgaagatgttaccgttggccataaagttatgctgcacggctgtaccatcggtaaccgcgtactggtcggtatgggctccattgtgttggatggcgcgataatagaagatgacgtaatgattggcgcgggaagcctggtgccgcagcacaaacggctggaaagcggctatttatatcttggcagtccggtaaaacagatccgccccttgagcgatgctgagagatcgggcctgcagtactccgccaataactatgtaaagtggaaagacgactatctttctcaggataaccatatccaaccgtga

SEQ ID NO: 372216 - DNA, 258 bp, Salmonella enterica
gtgaaccaggccatacaatttcctgaccgcgaagaatgggatactgccgccagtgctatcatctttcccgccctggttaatgggatgcaactcacgtgtgcaataaaaaaagatgtactggcgtatcgctttggtggagaaacagcggagcaatggctggccatttttcgtgagtatcgctgggacctggaagaagaggcggaagcattaatcctggcccagcaggaagatgatcacggttggatatggttatcctga

SEQ ID NO: 372217 - DNA, 822 bp, Salmonella enterica
atgatggaaacctatgctgtttttggaaatccgattgcgcacagcaaatcgccatttattcatcagcaatttgctcagcagctagatattgttcacccctatggtcgcgtgctggcccctattaataatttcattaatacgcttgatgcctttttcgcggcagggggaaaaggcgcaaacatcacagtaccttttaaagaggaggcgtttgcgcgttcggatgagttaacggaacgagcatcgctggcgggagccgtcaatacattaaaacggctggaagatggtcgtttgcttggcgacaatactgacggtatcggtttattaagcgatctcgaacgtttaaattttatccgcccaggattgcgtattttgctgattggcgcgggcggcgcatcccggggcgtgctgttacccctgctttctttggattgcgcggtcactatcactaaccgtacagcttcacgtgccgaagcgttggcgaaaatctttgctcataccggcagcgttcatgccacggatatggacaagctggatggttgtgagtttgacctgattattaatgcgacctccagcggcatacggggcgaaatcccggcgattccggcgtcacttattcacccttccctctgttgctatgacatgttctatcaaaaagggaatacgccatttctctcctggtgtgtacaacagggcgcaaaacgctacgcagatgggctgggaatgctggtggggcaggctgcacatgccgttttgctttggcacggtgtattaccgcaggtcgagccagtgattgagctgctacagcaggaattattagcgtga

SEQ ID NO: 372218 - DNA, 573 bp, Salmonella enterica
gtgaataatagcctgccaacaggatctatcgccgcagcggtagatctcctgaataaagaaaatgtcatcgcttatccaacagaagccgttttcggcgtcggctgcgatcccgatagtgaaacagccgttacgcgcctgctggcgttaaaacaacggcccgtcgataagggactcattttgattgccgccagctttgagcagttaaaaccttatattgatgacagcatacttaccgccgcacagcgtaaagcggtatttgattgctggcccgggccggtaacgtttgtttttcctgcgcccgcgacaacgccgcggtggctcacgggacgttttgattccctggccgttcgtgttaccaaccacccgctggtggtcgcgctatgcaatgcgtatggcaaaccgctggtttccaccagcgccaatctgagcggattaccgccatgtcgtaccattgaagaggtgcgtgcgcaatttggcgatgattttccggtggttgaaggcgcaacgggtgggcgtttaaatccttcagaaattcgcgatgctctgacgggcgaactgtttcgacaggggtaa

SEQ ID NO: 372219 - DNA, 543 bp, Salmonella enterica
atggctaaatcagcactgttttcggtgcgtaaaaatgagccctgcccgcagtgcggggccgaactggtaattcgctccgggaaacatggtccgtttctcggctgttctcgctatccggaatgcgattacgttcgtccgctgaaaagtcaggcggacggacatatcgttaaaattctggaggggcaaccgtgccctgagtgtggcgccgtgctggtgctgcgtcaggggcgctttggcatgttcatcggatgcagtcagtatccgcaatgtgaacatacagtggttattgataaaccggatgaaacggcgattgcctgtccagcctgccagcaaggacatttggtccagcgccgttctcgttacggtaaaatctttcattcctgcgatcgctacccggaatgtcagttcgtcattaacttcacaccggttgcgggggaatgccccgagtgccattatccgctactcatcgaaaagaaaaccgcgcagggcgtgaagcgcttttgcgccagtaaacaatgtggaaagccggttccggtggaataa

SEQ ID NO: 372220 - DNA, 474 bp, Salmonella enterica
atgttcgacgtactaatgtatttgtttgaaacatacatccataacgaagccgagctgcgcgtggatcaggacagactggagcgtgatctcaccgacgctgggtttgatcgcgaagacatctacaatgcgctgctgtggctggaaaaactcgctgactatcaggatggcctcgcggaacccatgcaacttgcttccgatcctctttcaatgcgcatttatacggttgaagagtgtgaaaggcttgatgccagttgccgggggttcctgttattccttgagcagattcaggtgctaaacctcgaaacacgagaaatggtgattgagcgtgtgctggcgctggataccgcagagtttgacctggaagacttgaaatgggttattttgatggtgttattcaacattccgggctgtgaaaacgcctatcagcaaatggaagaattactctttgaggtaaatgaaggtatgctgcattga

SEQ ID NO: 372221 - DNA, 1125 bp, Salmonella enterica
atggcccgtaccgaaatttggttacgtttaatgtacgtcggcgacctttatggcgaggcgatgttgaacatggcgaactcgcttattcgtcagcctcagataaatcgcacgcaccttcaggaggctggtcttaccgcgcggcaagctgaacgttttttacagcttccagcaggtgtgcttgatgagacgttacgctggcttgaactaccgcagcatcattttctgtgtgcggatagtgagatttatcctccccaactgcgtgctattgatgattatcccggcgctatttttattgacggcgatcctgcctgtctgcatacctgccaacttgccgtcgtagggagccggagccactcctggtatggagaacgctggggacgtctgctttgcgaaagccttgcgaaaagcggtttgacgatcaccagcggccttgcccggggaattgatggcgtagcacacaacgccgcggtgagtatggggggaaaaagtgtagcggtgttagggaatggcttggcaaagatttatcctcgccgacatgccatgctggctgaaaacttgattgctaccggcggcgcagtggtctcagaatttccgctttcaacgcctccgctaccgcaaaattttcctcgcagaaaccgtatcatcagcggactgagcaaaggcgtgctggtgattgaggcggcgttgcgcagcggttcgttggtgacggcgcgctgcgcgcttgaacaggggcgggacgtttttgcattaccaggtcctatcggtagtccgggaagcgaaggcacgcactggttaattaaacaaggggccacgcttgtgacgacgccggaggatattctggaaaatttgcaatacggcttacactggttgccaactacggcggaaaattcactttattcactaaatcaggatgaggcggcattgccatttcctgagctcctggctaacgtaggagatgaggtaacacctgttgacgtcgtcgctgaacgtgccggccaacctgtgccagcggtagtggctcagctactcgaactggagttagcaggatggatcgcagctgtacccggcggctatgtccgattaaggagggcaagccatgttcgacgtactaatgtatttgtttga

SEQ ID NO: 372222 - DNA, 510 bp, Salmonella enterica
atgtcagttttgcaagtgttacatattccggacgagcgccttcgcaaagtcgcaaagccggttgaagaagtgaatgcagaaattcagcgtatcgtcgatgatatgttcgaaacgatgtacgcggaagaaggtatcggtctggccgcaacgcaggtcgatatccaccagcggatcatcgtgattgacgtttcggaaaaccgcgacgagcgcctggtactcattaacccggaattgctggagaaaagtggcgaaacgggtatagaagaaggctgtctgtcgattccggaacagcgcgctttagtgccgcgcgccgagaaagtgaaaatccgcgcgctggatcgcgacggcaacccgtttgagcttgaagcggatggtttgctggcaatttgcattcagcatgagatggatcatctggtcggtaaactgtttatcgattatttgtcgccgctgaagcaacaacgtattcgtcagaaagtagaaaaactcgaccgcctgaacgcccgggcttaa

SEQ ID NO: 372223 - DNA, 948 bp, Salmonella enterica
gtgtcagattcactacgtattatttttgcgggtacacctgactttgcagcgcgtcatctcgacgcgctgttaacttctggacataacgttgtcggcgtatttacccaacccgatcgtccagcaggtcgcggcaaaaagttgatgcccagcccggtaaaagtgctggcggaagaaaaaggcctgcccgttttccagcccgtgtcgcttcgtcctcaggaaaaccagcaactggttgctgacttacatgccgacgtcatggttgtcgtagcatatggtctgattctcccaaaggcagtgctggatatgccccgtctcggatgtatcaacgttcacggttcgctgcttccacgctggcgcggcgcggcgcctattcagcgctcactctgggcaggcgatgcggaaaccggcgtcacaattatgcagatggatgtagggctggataccggcgacatgctgtataaacttgcgtgcccgattaccgcagaagataccagtggctcactgtataataagttggctgagcttggcccgcaggggttaattaccacactaaaacaactggcggacggcacagcggcgcctgaagcgcagaatgaagcgctggtcactcatgcggaaaagctcagtaaagaagaagcgcgtatcgactggtctctctccgcagtacagctggagcgttgcattcgcgcctttaatccgtggccaatgagctggctggaaatcgacggccagccggtaaaagtctggcaggcgtccgtcattgaggacgccacgcagtcgctgccgggaaccattctggccgcgacgaaacagggcattcaggttgcaacaggcaaggggatattaaatttgctttcgcttcagcctgccggcaaaaaagcaatgagcgcccaggatctgttaaattcacgccgggaatggtttattcctggtaaccgtcttgcctga

SEQ ID NO: 372224 - DNA, 1290 bp, Salmonella enterica
atgaaaaaacaaaacaatttacgtagtctggcagcacaggccgttgaactggtcgtcgaacagggacaatcattaagtaatgtgctcccgccgctgcaacaaaaagtcgccgataaagacaaagcgctacttcaggagctgtgctttggcgtcctgcgcaccctttcacagctggaatggctgatcaataagctgatgtctcgtccaatgaccggcaagcagcgtacagtgcattacttaattatggtcggcttttatcagttgctgtacacccgcgttcctccccatgcggcgctggctgaaaccgttgaaggcgcggtcgccatcaaacgtccgcagttgaaagggttaattaacggcgtcctgcgccagtttcagcgccagcaggaaacgttgcttaatgagtttgcgaccagcgatgcgcgctttttacatccaggttggctggtaaagcgtttgcaaaatgcttaccccacacagtggcaacacattattgaagcgaataaccaacgtccaccgatgtggctacgtgtaaatcgtacacaccacacccgcgacggttggcttggcttacttgaagacgcaggcatgaagggatatccccatcccgattatcccgacgctgtacgtctggaaacgccagctccggtacatgctttacccggttttgctgagggttgggtaactgtccaggatgcctctgcgcagggatgtgcggtttttctcgctcctcagaacggtgagcacattttagacttgtgcgccgcgcccggcggtaaaaccacgcatattctcgaagtggcccccgaagcagacgtgttggcggttgatattgatgaacaacgactctcccgcgtttacgacaacctaaagcgtcttgggatgaaagcgacagttaaacaaggggatggacgttatcccgcccaatggtgcggcgagcagcagtttgaccgtattctgctggatgcgccctgctccgcaaccggcgtcattcgccgtcatccagatatcaaatggctgcgtcgcgatcgcgatatcgcggaactggcgcaattacaggcggaaattcttgatgccgtctggccgcgcctgaagcctggcgggacgctggtttacgccacctgttccgtactgccggaagaaaaccgcgatcagatcaaaacctttttgcaacgcactcccgatgccgcgctcagcgaaacgggaacacctgatcagccaggacagcaaaatctgccgggcggcgaagaaggtgatgggttcttttacgctaagctaatcaagaagtga

SEQ ID NO: 372225 - DNA, 1377 bp, Salmonella enterica
atgaaaattatcatactgggcgcagggcaagttggcggaacactggcggaaaacctggtcggcgaaaacaacgacatcacggtggttgataccaacggcgaacggttacgcagtttgcaagataagttcgatctacgcgtagttcaggggcatggttcgcatccccgcgtgttgcgcgaagcgggcgctgacgatgcggatatgctggtcgctgtcaccagttcagatgaaactaatatggttgcctgtcaggtagcctattcactcttcaacactccaaaccgtatcgcccgcattcgctccccggactatgttcgcgatgcggataaactctttcattctgaagcggttccgattgatcatctgatcgcgccggagcagttggttatcgataatatttatcgtctgatcgagtatccgggagcattacaggttgtaaactttgctgaagggaaagtcagtctggcagtagtaaaagcctactatggcggtccactaataggtaacgcgctctcgacaatgcgagaacatatgccgcatatcgatactcgcgttgccgcaattttccgccatgacagaccaatccgtcctcagggctcgactatcgtggaagcaggggatgaagtcttctttattgcggcttcacagcatatccgtgcagtaatgagcgaattacagcgtctggaaaaaccctacaagcgcatcatgctggtgggcggcggcaatatcggcgccgggctggcaaggcgtctggaaaaagactatagcgttaaattgatcgaacgcgatcaacaacgcgccgcagaactggctgagaaactgcaaaacacgatcgtcttttttggcgacgcctccgatcaggaattgctggcggaggagcatattgatcaggtcgatctctttatcgcggtcactaacgatgatgaagccaatatcatgtccgcgatgttggccaagcggatgggcgccaaaaaagtgatggtgttgattcagcgtcgagcttatgtcgatcttgtgcagggtagcgttatagatattgcgatttctccgcagcaggccaccatctctgcattactgagccatgtgcgtaaagcggatatcgtcggcgtttcctcactacgtcgcggagttgccgaagccatcgaagccgtcgcgcacggcgatgaaagcacttcccgcgtggttggccgcgtcattgacgaaataaaactgccgccaggcaccattattggcgcggtcgttcgtggtaatgatgtcatgattgctaatgacaatttgcgcattgaacaaggcgatcacgtcattatgtttttgaccgataaaaagtttattaccgacgtcgaacgtctgttccagccaagtcctttcttcctctaa

SEQ ID NO: 372226 - DNA, 414 bp, Salmonella enterica
atgagttttattaaagaatttcgcgaattcgcgatgcgcgggaatgttgtggatttggcagtgggtgtcattattggcgcggcattcggtaagattgtttcttcactggttgccgatatcattatgccgccgttgggattgttaatcggcgggatcgactttaaacaatttgcttttacgttacgcgaagcgcagggagatattccggcggtcgtcatgcattacggcgtgtttatccagaacgtatttgattttgtgattgtggcctttgctatctttgttgccattaagcttatcaacagactcaaccgtaaaaaagcagaagagccggcagctccgccagcgccttctaaagaggaagtgctattgggcgaaatccgcgatctgctgaaagaacaaaataaccgttcttaa

SEQ ID NO: 372227 - DNA, 270 bp, Salmonella enterica
atgagtcgttatcaacataagaaagggcagataaaggacaatgccattgaggcattactgcacgatccccttttcaggcaacgcgttgaaaaaaataagaaaggcaaaggaagctatctgcgcaaaggtaaacacggtaatcgagggaactgggaggccagtggcaagaaagtaagtaacttttttaccactggccttctgcttattaagaacggttattttgttctttcagcagatcgcggatttcgcccaatagcacttcctctttag

SEQ ID NO: 372228 - DNA, 426 bp, Salmonella enterica
atgtatcgcattggtgagctggcaaagctggcagacgtaacgcctgataccattcgctactatgaaaaacagcagatgatggatcatgaggtacgtactgaaggcgggtttcgtctgtataccgaaaccgatctgcagcgtctcaagtttattcgttatgcgcgacagttgggtttcacgctcgactcgatccgcgagcttttatcgatccgaattgatcctgagcaccatacctgtcaggagtcaaaaagtattgtgcaagagcgattgcaggaggttgaagccaggattgcggaactgcaaacgatgcagcgttcgttacaaaggcttaatgatgcttgttgcggaacggcccacagtagcgtctattgttccattctggaagccctggaacagggggccagtggagcgaaatcaggatgttga

SEQ ID NO: 372229 - DNA, 369 bp, Salmonella enterica
atgtggttacttgaccagtgggcagagcgtcatattatcgaggcacagcgtaaaggcgagtttgataatttgcctggccgtggcgagccgcttattctggatgatgattctcatgtgccggcggaacttcgtgcgggttatcgcttactcaagaatgcgggctgtcttccccctgaactggagcagcgcagagacgctattcagttacttgatatcctcaacagtatccgggaagatgaccctcgataccatcaggttagtcgccagctctccctgcttgaactaaaacttcggcaggctgggttgagtaccgactttttacacggtgagtatgcagaaaaactgctgcataaaatcaacgataattaa

SEQ ID NO: 372230 - DNA, 384 bp, Salmonella enterica
atgcgccatcgtaagagtggtcgtcaactgaaccgcaacagcagccatcgccaggctatgttccgcaacatggcaggttcactggttcgtcatgaaatcatcaagacgaccctgcctaaagcgaaagagctgcgtcgcgtagttgagccgctgattactcttgccaagactgatagcgttgctaatcgtcgtctggcattcgcccgtactcgtgataacgagatcgtggcaaaactgtttaacgagctgggcccgcgtttcgcgagccgcgccggtggttacactcgcattctgaagtgtggcttccgtgcaggcgacaacgcgccgatggcatacatcgagctggttgatcgttcagagaaaacagaagctgctgcagagtaa

SEQ ID NO: 372231 - DNA, 990 bp, Salmonella enterica
atgcagggttctgtgacagagtttctaaaaccgcgcctggtagatatcgagcaagtgagttcgacgcacgccaaggtgacccttgagcctttagagcgtggcttcggccatactctgggtaacgcactgcgccgtattctgctctcatcgatgccgggttgcgcggtgaccgaggttgagattgatggtgtactacatgagtacagcaccaaagaaggcgttcaggaagacatcctggaaatcctgctcaacctgaaagggctggcggtgagagttcagggtaaagatgaagttattcttaccttgaataaatctggcattggccctgtgactgcagccgatatcacccatgatggggatgtcgaaatcgtcaagccgcagcacgtgatctgccacctgaccgatgaaaacgcgtctattagtatgcgtatcaaagttcagcgcggtcgtggttatgtgccggcttctacccgaattcattcggaagaagatgagcgcccaatcggccgtctgctggtcgacgcctgctacagccctgtagagcgtattgcctacaatgttgaagcagcgcgtgtagaacagcgtaccgacctggacaagctggtcatcgaaatggaaaccaacggcacaatcgatcctgaagaggcgattcgtcgtgcggcaaccatcctggctgaacaactggaagctttcgttgatttacgtgatgtacgtcaaccggaagtgaaagaagagaaaccagaattcgatccgatcctgctgcgccctgttgacgatctggaattgactgtccgctctgctaactgcctcaaggcagaagctatccactatatcggtgatctggtacagcgtaccgaggttgagcttcttaagacgcctaacctgggtaaaaaatctcttaccgagattaaagacgtgctggcttcccgtggactgtctctgggtatgcgcctagaaaactggccaccggcaagcatcgctgacgagtaa

SEQ ID NO: 372232 - DNA, 621 bp, Salmonella enterica
atggcaagatatttgggtcctaagctcaagctgagccgtcgtgagggcaccgacttattccttaagtctggcgttcgcgcgatcgataccaagtgtaaaattgaacaagctcctggccagcacggtgcgcgtaagccgcgtctgtctgactatggtgtgcagttgcgtgaaaagcaaaaagttcgccgcatttacggtgtgctggagcgtcagttccgtaactactacaaagaagcagcacgtctgaaaggcaacaccggtgaaaacctgttggctctgctggaaggtcgtctggacaacgttgtataccgtatgggcttcggcgccactcgtgcagaagcacgtcagctggttagccataaagcaattatggtaaacggtcgtgttgttaacatcgcttcttatcaggttagtccgaatgacgttgttagcattcgtgagaaagcgaagaagcagtctcgcgtgaaagccgctctggagctggctgagcagcgtgaaaagccaacctggctggaagttgatgctggcaagatggaaggtacgtacaagcgtaagcctgagcgttctgatctgtctgcggacattaacgaacacctgatcgtcgagctttactccaagtaa

SEQ ID NO: 372233 - DNA, 381 bp, Salmonella enterica
atgagggatcggagtcacatcagtaatattagtgatgcggaaaccagcggcgttcagagcacgaatagtagattcgcggcctggacccggacctttaaccataacttccagattcttgataccgtattctttcacggcgtcagcgcaacgctctgctgcaacctgagctgcaaacggagtggatttgcgagaaccacggaaaccggaaccaccggctgttgcccaacccagcgcattaccctgacgatcggtaatagtcacgatggtgttgttgaaagaagcatggatatgagccacgccgtcagagacttgttttcttacacgtttacgtgcgcgaactggtgcctttgccattattcaatcaccccgattatttcttga

SEQ ID NO: 372234 - DNA, 357 bp, Salmonella enterica
gtggcccgtatagcaggcattaacattcctgatcagaaacacgccgtgatcgcgttaacttcgatctacggtgtcggcaagacccgttctaaagccatcctggctgcagcgggtatcgctgaaaatgttaagatcagtgagctgtctgaagaacaaatcgacacgctgcgtgacgaagttgccaaatttgtcgttgaaggtgatctgcgccgtgaaatcagcatgagcatcaagcgcctgatggatcttggttgctatcgcggtttgcgtcatcgtcgtggtctcccggttcgcggtcagcgtaccaagaccaacgctcgtacccgtaagggtccgcgcaaaccgatcaagaaataa

SEQ ID NO: 372235 - DNA, 1332 bp, Salmonella enterica
atggctaaacaaccgggattagattttcaaagtgccaaaggtggcttaggtgagctgaaacgcagactgctgtttgttatcggcgcgctgattgtgttccgtattggctcttttattccgatccctggtattgatgccgctgtacttgccaaactgcttgagcaacagcgaggcaccatcattgaaatgtttaacatgttctctggtggtgctctcagccgtgcttctatctttgccctggggatcatgccgtatatttcggcgtcgatcattatccagctgttgacggtggttcatccaacgctggcagaaattaagaaagaaggggagtctggtcgtcgtaagatcagccagtacacccgttacggtactctggtgctggcgatattccagtcgatcggtattgctaccggtttgccgaatatgcctggtatgcagggcctggtgatgaatccaggctttgcattctatttcaccgctgttgtaagtctggttacagggacgatgttcctgatgtggctcggcgaacagattactgagcgcggtatcggtaacggtatctcaatcatcatcttcgctggtatcgttgcgggactcccgccagccattgcccatactatcgagcaagcgcgtcaaggcgacctgcacttcctcgtgttgctgttggttgcagtattagtatttgcagtgacgttctttgtagtattcgttgaacgtggtcaacgccgtattgtggtaaactacgccaaacgtcagcaaggtcgtcgtgtctatgctgcacagagcacacatttaccgctgaaagtgaatatggcggggggaatcccggcaatcttcgcttccagtattattctgttcccggcgaccatcgcgtcatggttcgggggcggtactggttggaactggctgacaacaatttcgctgtatttgcagcctgggcaaccgctttatgtgttactctatgcgtctgcaatcatcttcttctgtttcttctacacggcgttggttttcaacccgcgtgaaacagcagataacctgaagaagtccggtgcatttgtaccaggaattcgtccgggagagcaaacggcgaagtatatcgataaagtaatgacccgcctgaccttggttggtgcgctgtatattacctttatctgcctgatcccggagttcatgcgtgatgcaatgaaagtgccgttctacttcggtgggacctcactgcttatcgttgttgtcgtgattatggactttatggctcaagtgcaaactctgatgatgtccagtcagtatgagtctgcattgaagaaggcgaacctgaaaggctacggccgttaa

SEQ ID NO: 372236 - DNA, 435 bp, Salmonella enterica
atgcgtttaaatactctgtctccggccgaaggctccaaaaaggcgggtaaacgcctgggtcgtggtatcggttctggcctcggtaaaaccggtggtcgtggtcacaaaggtcagaagtctcgttctggcggtggcgtacgtcgcggtttcgagggtggtcagatgcctctgtaccgtcgtctgccgaaattcggcttcacttctcgcaaagcagcgattacagccgaagttcgtctgtctgacttggcgaaagtagaaggcggcgttgtagacctgaacacgctgaaagcggcaaacattatcggtatccagatcgagttcgcgaaagtgatcttggctggcgaagtcactactccggtaactgttcgtggcctgcgtgttactaaaggcgctcgtgctgctatcgaagctgctggcggtaaaatcgaggaataa

SEQ ID NO: 372237 - DNA, 180 bp, Salmonella enterica; identical to SEQ ID NO: 75813

SEQ ID NO: 372238 - DNA, 504 bp, Salmonella enterica
atggctcacatcgaaaaacaagctggcgaactgcaggaaaagctgatcgcggtaaaccgcgtatctaaaaccgttaaaggtggtcgtattttctccttcacagctctgactgtagtaggcgatggtaacggtcgcgtaggttttggttacggtaaagcgcgtgaagttccagcagcgatccagaaagcgatggaaaaagcccgtcgcaatatgattaacgtcgcgctgaacaacggcaccctgcagcacccggttaaaggtgttcacacggggtctcgtgtattcatgcagccagcttccgaaggtaccggtatcatcgccggtggtgcaatgcgcgccgttctggaagttgctggggttcataacgttctggctaaagcatacggttccaccaacccgatcaacgtggttcgtgcaactattgatggcctggaaaatatgaattctccagaaatggtcgctgccaagcgtggtaaatccgttgaagaaattctggggaaataa

SEQ ID NO: 372239 - DNA, 354 bp, Salmonella enterica
atggataagaaatctgctcgtatccgtcgtgcgacccgcgcacgccgcaagctcaaagagctgggcgcaactcgcctggtggtacatcgtaccccgcgtcatatttacgcacaggtaattgcaccgaacggttctgaagttctggtagctgcttctactgtagaaaaagctatcgctgaacaactgaagtacaccggtaacaaagacgcggctgcagctgtgggtaaagctgtcgctgaacgcgctctggaaaaaggcatcaaagatgtgtcctttgaccgttccgggttccaatatcatggtcgtgtccaggcactggcagatgctgcccgtgaagctggccttcagttctaa

SEQ ID NO: 372240 - DNA, 534 bp, Salmonella enterica
atgtctcgtgttgctaaagcaccggtcgttgttcctgccggcgttgatgtcaaaatcaacggtcaggttattacgatcaaaggtaaaaacggcgagctgactcgtactctcaacgatgctgttgaagttaaacatgcagataatgcactgaccttcggtccgcgtgatggttacgcagacggttgggcacaggctggtaccgcgcgtgccctgctgaactcaatggttatcggtgttaccgaaggcttcactaagaagctgcagctggttggtgtaggttatcgtgcagcggttaaggggaatgtagtaaacctgtctttaggtttctctcacccggttgaccatcagctgccggcaggtattactgctgaatgtccgactcaaactgaaatcgtgctgaaaggcgctgataagcaggtgatcggccaggttgcagcagatctgcgcgcctaccgtcgtcctgagccttacaaaggcaagggtgttcgttacgccgacgaagtcgtgcgtaccaaagaggctaagaagaagtaa

SEQ ID NO: 372241 - DNA, 393 bp, Salmonella enterica
atgagcatgcaagatccgatcgcggatatgctgacccgtatccgtaacggtcaggccgcgaacaaagctgcggtcaccatgccttcctccaagctgaaagtggcaattgccaacgtgctgaaggaagaaggttttattgaagattttaaagttgaaggcgacaccaagccggaactggaactgactcttaagtatttccagggtaaagctgttgtagaaagcattcagcgtgtcagccgcccaggtctgcgcatctacaaacgtaaagatgagctgccgaaagttatggccggtctgggtatcgcagttgtttctacctctaaaggtgttatgactgatcgtgcagcgcgccaggctggtcttggtggcgaaattatctgctacgtagcctaa

SEQ ID NO: 372242 - DNA, 306 bp, Salmonella enterica
atggctaagcaatcaatgaaagcacgcgaagtaaaacgcgtagctttagctgataaatacttcgcgaaacgcgctgaactgaaagcgatcatctctgatgtgaacgcaaccgacgaagatcgttggaatgcggttcttaagctgcagactctgccgcgtgattccagcccgtcacgtcagcgtaaccgctgccgtcaaactggtcgtccgcacgctttcctgcggaagttcgggttgagccgtattaaggtccgtgaagccgctatgcgcggtgaaattccgggtctgaaaaaggctagctggtaa

SEQ ID NO: 372243 - DNA, 540 bp, Salmonella enterica
atggcgaaactgcatgattactacaaagacgaagtagttaacaaactcatgactgagtttaactacaattctgtcatgcaagtccctcgggtcgagaagatcaccctgaacatgggtgttggtgaagcgatcgctgacaagaaactgctggataacgcagcagcagacctgacagcaatctccggtcaaaaaccgttgatcaccaaagcacgcaaatctgttgcaggcttcaaaatccgtcagggctatccgatcggctgtaaagtaactctgcgtggcgaacgcatgtgggagttctttgagcgcctgatcactattgctgttcctcgtatccgtgacttccgtggcttgtccgctaagtcattcgacggtcgtggtaactacagcatgggtgtccgtgagcagatcatcttcccagaaatcgactacgataaagtcgaccgcgttcgtggtttggatattaccattaccactactgcgaaatctgacgaagaaggccgtgctctgctggctgcctttgacttcccgttccgcaagtaa

SEQ ID NO: 372244 - DNA, 315 bp, Salmonella enterica
atggcagcgaaaatccgtcgtgatgacgaagttatcgtgttaaccggtaaagataaaggtaaacgcggtaaagttaagaatgtcctgtcttccggcaaggtcattgttgaaggtatcaacctggttaagaaacaccagaagccggttccggctctgaaccaaccgggcggcatcgttgaaaaagaagctgcaattcaggtttctaacgttgcaatcttcaatgcggcaaccggcaaggctgaccgtgtaggctttagattcgaagacggcaaaaaagtccgtttcttcaagtctaacagcgaaactatcaagtaa

SEQ ID NO: 372245 - DNA, 372 bp, Salmonella enterica
atgatccaagaacagactatgctgaacgtcgccgacaactccggtgcacgtcgcgtaatgtgtatcaaggttctgggtggctcgcaccgtcgctacgcaggcgtaggcgacatcattaagatcaccatcaaagaagcgattccgcgtggtaaggtcaaaaaaggtgatgtgctgaaggcggtagtggtgcgcaccaagaagggtgttcgtcgcccggacggttctgtcattcgcttcgatggtaatgcatgcgttattttaaacaataacagcgagcagcctatcggtacgcgtatttttgggccggtaactcgtgaacttcgtaacgagaagttcatgaaaattatctctctggcaccagaagtactctaa

SEQ ID NO: 372246 - DNA, 255 bp, Salmonella enterica
atgaccgataaaatccgtactctgcaaggtcgcgtggttagcgacaaaatggagaaatccattgttgttgctatcgaacgttttgtgaaacacccgatctacggtaaattcatcaagcgtacgaccaaaatgcacgtacatgacgagaacaacgaatgcggtatcggcgacgtggttgaaatccgcgaatgccgtccgctgtccaagactaaatcctggactctggttcgcgttgtagagaaagcggttctgtaa

SEQ ID NO: 372247 - DNA, 192 bp, Salmonella enterica
atgaaagcaaaagagctgcgtgagaagagcgttgaagagctgaacaccgagctactgaacctgctgcgtgagcagttcaacctgcgtatgcaggctgcaagtggccagctgcaacagtctcacctgttgaagcaagtgcgtcgtgatgtcgcacgcgttaagactttactgactgagaaggcgggtgcgtaa

SEQ ID NO: 372248 - DNA, 411 bp, Salmonella enterica
atgttacaaccaaagcgtacaaaattccgtaaaatgcacaaaggccgcaaccgtggtctggctgcaggcgcggatgttagcttcggcagcttcggcctgaaagctgttggccgtggtcgtctgactgcccgtcagatcgaagcagcacgtcgtgctatgacccgtgcagttaagcgtcaaggtaagatctggatccgtgtattcccggacaaaccgatcactgaaaagccgctggcagtgcgtatgggtaaaggtaaaggtaacgtggagtattgggttgccttgattcagccgggtaaagtcctgtatgaaatggacggcgtaccggaagagctggcccgtgaagcattcaagctggcagcagcgaaactgccgattaaaaccacctttgtaactaagacggtgatgtaa

SEQ ID NO: 372249 - DNA, 702 bp, Salmonella enterica
atgggtcagaaagtacatcctaatggtattcgcctgggtattgtaaaaccatggaactctacctggtttgcgaacaccaaagaattcgctgacaacctggacagcgattttaaagtacgtcagtacctgacgaaggaactggctaaagcgtctgtatctcgtatcgttatcgagcgtccggctaagagcatccgtgtgactattcacaccgctcgcccgggtatcgttatcggtaaaaaaggtgaagacgtagaaaaactgcgtaaggtcgtagcggatatcgctggcgttcctgcacagatcaatatcgccgaagttcgtaaacctgaactggacgctaaactggttgctgacagcatcacttctcagctggaacgtcgcgtgatgttccgtcgtgcgatgaagcgtgctgtacagaacgccatgcgtctgggcgctaaaggtatcaaagttgaagttagcggccgtctgggcggcgcggaaatcgcacgtaccgaatggtaccgcgaaggtcgcgtacctctgcacactctgcgtgctgacatcgactacaacacctctgaagcgcacaccacttatggtgtaatcggcgttaaagtgtggatcttcaaaggcgagatcctgggtggtatggctgctgttgaacaaccggaaaaaccggctgctcaaccgaaaaagcagcagcgtaaaggccgtaaataa

SEQ ID NO: 372250 - DNA, 333 bp, Salmonella enterica
atggaaactatcgctaaacatcgccatgctcgttcttctgctcagaaggttcgccttgttgctgacctgattcgcggtaagaaagtgtcgcaggctctggatattctgacctacaccaacaagaaagcggctgtactggtcaagaaagttctggaatctgccattgctaacgctgaacacaacgatggcgctgacattgacgatctgaaagttacgaaaattttcgtagacgaaggcccgagcatgaagcgcattatgccgcgtgcaaaaggtcgtgcagatcgcatcctgaagcgcaccagccacatcactgtggttgtgtccgatcgctga

SEQ ID NO: 372251 - DNA, 279 bp, Salmonella enterica
atgccacgttctctcaagaaaggtccttttattgacctgcacttgctgaagaaggtagagaaagcggtggaaagcggagacaagaagcccctgcgcacctggtcccgtcgttcaacgatctttcctaacatgatcggtttgaccatcgctgtccataatggtcgtcagcacgttccggtatttgtttccgacgaaatggtcggtcacaaactgggtgaattcgcaccgactcgtacttatcgcggccacgctgctgataaaaaagcgaagaagaaataa

SEQ ID NO: 372252 - DNA, 822 bp, Salmonella enterica
atggcagttgttaaatgtaaaccgacatctccgggtcgtcgccacgtcgttaaagtggtcaacccagagctgcacaagggcaaaccttttgctccgctggttgaaaaaaacagcaaatccggtggtcgtaacaacaatggccgtatcaccactcgtcatatcggtggtggtcacaaacaggcttatcgtattgttgacttcaaacgcaacaaagacggtattccggcagttgttgaacgtcttgagtacgatccgaaccgttccgcgaacatcgcgctggttctgtacaaagacggcgaacgccgttacatcctggccccgaaaggcctgaaagctggcgaccagattcagtctggcgttgatgctgcaatcaaagcaggcaacaccctgccgatgcgcaatatcccggttggttctaccgttcataacgtagaaatgaaaccaggtaaaggcggtcagctggcgcgttccgctggtacttacgttcagatcgttgctcgcgatggcgcttatgtcaccctgcgtctgcgttctggtgaaatgcgtaaagtcgaagcagactgccgtgcaaccctgggcgaagttggcaatgctgagcatatgctgcgcgttctgggtaaagcaggtgctgcacgctggcgtggcgttcgtcctaccgttcgcggtactgcgatgaacccagtagaccacccacatggtggtggtgaaggtcgtaactttggtaagcacccggtaactccgtggggcgttcagaccaaaggtaagaagacccgcagcaacaagcgtactgataaattcatcgtacgtcgccgtagcaaataa

SEQ ID NO: 372253 - DNA, 303 bp, Salmonella enterica
atgattcgtgaagaacgtctgctgaaggtgctgcgcgcaccgcacgtttctgaaaaagcgtctactgcgatggaaaaaactaacaccatcgttctcaaagttgctaaagacgcgaccaaagcagaaatcaaagctgctgtgcagaaactgtttgaagtcgaagtcgaagtcgttaacaccctggtcgttaaagggaaagttaaacgtcacggacagcgtatcggtcgtcgtagcgactggaaaaaagcttacgtcaccctgaaagaaggccagaatctggacttcgtcggtggcgctgagtaa

SEQ ID NO: 372254 - DNA, 606 bp, Salmonella enterica
atggaattagtattgaaagacgcgcagagcgcgctgactgtttccgaaactaccttcggtcgtgatttcaacgaagcgctggttcaccaggttgttgttgcttatgcagctggtgctcgtcagggtactcgtgctcagaagactcgtgctgaagtaactggttccggtaaaaaaccgtggcgccagaaaggcactggccgtgcgcgttcaggttctatcaagagcccgatctggcgttccggtggcgtgaccttcgctgctcgtccgcaggaccacagtcaaaaagttaacaagaagatgtaccgcggcgcgctgaaaagcatcctgtccgaactggtacgtcaggatcgtctgatcgttgtcgagaagttttctgtagaagcgccgaaaactaagctgctggcacagaaactgaaagacatggctctggaagatgtgctgatcatcaccggtgagctggacgagaacctgttcctggccgcacgtaacctgcacaaggttgacgtacgcgatgcgactggtatcgacccggttagcctgatcgccttcgacaaagtcgtaatgactgctgatgctgttaagcaagttgaggagatgctggcatga

SEQ ID NO: 372255 - DNA, 630 bp, Salmonella enterica
atgattggtttagtcggtaaaaaagtgggtatgacccgcatcttcactgaagatggcgtctctatcccagtaaccgtaatcgaagttgaagcaaaccgtgttactcaggttaaagacctggctaacgatggctaccgcgctgttcaggttactacgggtgctaaaaaagctaaccgtgtcaccaagccggaagcgggtcactttgctaaagctggcgtagaagctggccgtggtctgtgggaattccgtctggctgaaggcgaagaatacaccgtaggtcagagcatcagcgttgaactgtttgctgacgttaaaaaagttgacgtaaccggtacctctaaaggtaaaggtttcgctggtaccgttaagcgctggaacttccgtacccaggacgctactcacggtaactccttgtctcaccgcgttccgggttctatcggtcagaaccagactccgggcaaagtgttcaaaggcaagaaaatggcaggtcagatgggtaatgagcgcgtaaccgttcagagccttgacgtagtacgcgttgacgctgagcgcaacctgctgctggttaagggtggtgttccgggtgcaaccggttgcgacctgatcgttaaaccagctgtgaaggcgtaa

SEQ ID NO: 372256 - DNA, 312 bp, Salmonella enterica
atgcagaaccaaagaatccgtatccgcctgaaagcgtttgatcatcgtctgatcgatcaatcaaccgcggaaatcgtcgagactgccaagcgcactggtgcgcaggttcgcggtccgatcccgctgccgacccgcaaagagcgctttaccgttctgatctctccgcacgttaacaaagatgcgcgcgatcagtacgaaattcgcactcacaagcgtctggttgacatcgttgagccaaccgagaaaaccgttgatgctctgatgcgtctggacctggctgccggtgtagacgtgcagatcagcctgggttaa

SEQ ID NO: 372257 - DNA, 468 bp, Salmonella enterica
atgtttgttgccctcccctttctcattttttatgcgtcgttctctttattacttggcatatacgacgcgcgtaccggtctgctgcctgaccggtttacctgtccattactgtggggtggtctgctttatcaccagatttgcctgccggagcgtttaccggatgcgctttggggtgctatcgccggctatggcggattcgcgttaatttactggggctatcgcctgcgttatcagaaagaggggcttggatatggcgacgtcaagtacctcgctgccttaggggcatggcattgttgggaaacactgccgttactggttttccttgccgctatgttggcctgtggcgggtttggcgtcgcgctactggtgagaggtaaatcggcattaataaacccgctaccttttgggccatggctggcggtggcgggtttcataacaggttggaaagttttctttccagacggttaa

SEQ ID NO: 372258 - DNA, 477 bp, Salmonella enterica
atgaaaggtgatgttaaaatcataaattatctcaataaactattgggaaatgagcttgtcgcaattaatcagtattttcttcatgcccgtatgttcaaaaactgggggctgacccggcttaatgatgttgagtaccatgaatccattgatgagatgaaacacgccgataagtatattgagcgtattttatttctggaaggcataccgaacctacaggatctgggcaagctgggcatcggtgaagatgtcgaagagatgctacgatcggatctccggctcgaactggaaggcgcaaaagatctacgtgaggcaatagcctatgccgatagcgttcatgactatgttagccgggatatgatgattgaaattcttgccgacgaggaaggccacatcgactggctggaaactgagctggatttgattgccaaacttggtatgcaaaattatctgcaatcacaaattaaggttaccgattaa

SEQ ID NO: 372259 - DNA, 195 bp, Salmonella enterica
atgtacgtttgtttgtgtaatggtataagcgataaaaaaatccgccaggctgtacgacaatttcatccacagtcatttcaacagttgcgtaaatttattcctgtgggaaatcaatgtggtaagtgtattcgcgccgcgcgagaagtgatgcaggatgagttaacgcaaatgccggaatttaaagagatcgcctga

SEQ ID NO: 372260 - DNA, 132 bp, Salmonella enterica
atggctatgaatgttgagttgaccgcagaacaaaaaatcgctcttgaagcattacaacgaaaaagtcgcgatcccataaatgaacagaaccgatgtacgaccgggccggaattaaacgggaggcgttattag

SEQ ID NO: 372261 - DNA, 894 bp, Salmonella enterica
atggatttcttgattaataaaaaattaaaaattttcataacactgatggaaacaggttccttcagtatcgcaacatcagtactgtatatcacccgaaccccgctgagcagggttatttcagacctggaaagagagctgaaacaaagactctttatacggaagaatggcactcttatcccaaccgaatttgcacaaactatttatcgaaaagtaaaatcccattatattttcttacatgcactggagcaggaaatcggacctacgggtaaaacgaaacaactagaaataatatttgacgaaatttatccggaaagtttaaaaaatctgatcatttcagcactgaccatttccggccaaaaaacaaatataatggggagagccgttaacagccaaataatagaagaactgtgtcagacaaacaactgcattgttatttctgccagaaattattttcatcgggaatcgcttgtctgccggacatcagtggagggtggggtcatgttatttattcctaaaaaattctttctctgcggcaaacctgatatcaacaggctggccggaacacctgtactttttcatgagggggctaaaaattttaatctggacaccatataccatttttttaaacagacactaggtattaccaaccctgcattcagttttgataacgtcgatttgttcagttcactgtaccggttacaacaagggctggcgatgttactcatccccgtcagagtctgtcgggctctgggattatcaacagatcacgcactgcacatcaaaggcgtagcgctctgtacctccttgtattacccgaccaagaaacgggagacaccagattatcgtaaagctataaaactgatacagcaggaactgaaacagtccaccttctga

SEQ ID NO: 372262 - DNA, 165 bp, Salmonella enterica
atgggcattaacgcgctggctcacgccactttactgaagaaactgaataacggtgactatgacggcgcagcgaatgaattcctgaaatgggaccacgccagcggtcaggttgttcccggcctgacccgacgccggagcgctgaacgttgtttattcctgagttaa

SEQ ID NO: 372263 - DNA, 768 bp, Salmonella enterica
atgaatatgaatcagaccaccagtccggcactttcacaggtcgaaaccgccatccgggtcccggcagggaattttgcaaaatataattattattccgtgtttgatattgtccgtcagacccgtaaacagtttattaacgccaatatgtcatggccgggctcccgcggaggtaaagcctgggacctggcgatgggccaggcgcagtatatccgctgcatgttccgagaaaatcaattgacccgcagagttcgggggaccttgcagcagacactggacaatggcacgaacctgagcagttccgctgtcggcggtattcagggacaggcagagcgtcggccggacctggccaccctgatggtggttaatgatgccattaaccagcaaataccgaccctgctgccgtatcattttccacacgaccaggtggagttatctctgctgaataccgatgtgtcgctggaagatattatcagcgagagcagcattgactggccgtggttcctgagcaactcgctgaccggcgataacagtaactatgccatggagctcgccagccggctgtcaccagagcagcagacactgccgaccgagccggacaacagtaccgccactgacctgacctctttttaccagaccaatctggggctgaaaaccgccgactatacgccatttgaagcactgaatacctttgcccgacagttagcgattaccgttcccccaggtggaacagttgattgcgggtactctgcgtgccagccggcagtttag

SEQ ID NO: 372264 - DNA, 213 bp, Salmonella enterica
atggccaggtatattttctgcttacagcgtctgctctacggcctgttcaaaagtgctgccgccgtacagcgcggtagaatgcacctgaacaatgacgtcgctcagattctgcagaatggtctgctgctcactactctggtagcgcgggaagctaaactgccggctggcacgcagagtacccgcaatcaactgttccacctgggggaacggtaa

SEQ ID NO: 372265 - DNA, 1776 bp, Salmonella enterica
atgttgatactaaatggtttttcatctgccactttagcgctgatcactccccctttcctgccaaaagggggcaaggcgctgagtcagtcaggccctgacggcctagccagtataacgctgcctctgcccatcagcgccgaacgcggctttgcgcctgcgctggcgctgcactacagcagcggtggcggcaatggccccttcggcgtgggctggtcctgcgcgacaatgagcattgcccgccgcaccagccatggcgtgccgcagtataacgacagcgatgagtttctggggccggacggagaagtgctggttcaaacgctcagcaccggtgatgcccccaatcccgtcacctgcttcgcgtacggtgacgtatcgttcccgcaaagctacacggtgacccgctatcagccccgcacggagagcagtttttatcgcctggagtactgggtgggcaacagcaacggcgatgatttctggttactgcatgacagtaacggcatcctgcacctgctggggaaaaccgccgcagcacgcctcagcgatccgcaggccgcctctcatacggcgcaatggctggttgaggagtcggtgacccctgccggcgagcatatctattactcctacctggcggagaacggtgacaatgtggacctcaatgggaacgaggccggacgcgatcgcagcgccatgcgctatctcagcaaggtacagtatggcaacgcgacccccgccgccgatctgtacctctggactagcgccacacccgcggtacagtggctgttcaccctagtgtttgactacggcgaacgtggtgtagatccacaggtaccgcctgcattcactgctcagaacagctggctcgcccgccaggatcccttctccctgtataactacggctttgagatccgcctccatcgcctgtgccgccaagtcctgatgttccaccactttcctgatgaactgggtgaagccgatacgctggtttcccgtctgctgctggagtatgacgaaaatccgatactgacacagctttgcgctgctcggacgctggcctatgaaggcgacggttatagaagagctcctgtcaacaatatgatgccaccgccaccgcctcctccgatgatgggaggtaattcatctcgaccaaaatcaaaatgggcgattgtagaggaatcaaagcagattcaagctctgaggtactattcagctcaagggtacagtgtgattaataaatatttacgtggggatgattatcctgaaacacaggcaaaagaaactctgctctccagagactatctttccacaaatgaacccagtgatgaggagtttaaaaatgccatgtcagtttatataaatgatattgcggagggattaagttcacttcccgaaacagatcacagagtcgtataccggggcctgaagcttgataagcccgcattatcggatgtgctgaaggaatacactactataggtaatataataatagataaagcttttatgagtacatcgccagataaggcatggataaatgacactattctcaacatatacctagaaaaaggacataaaggtagaatactcggagatgttgcacattttaagggagaggcagagatgcttttccctccaaatactaaactcaaaatcgaaagcattgtaaattgtggatcccaagactttgcaagccagcttagtaagctgagattaagtgatgatgcaactgctgacacaaacaggataaaaagaataataaacatgagggtactcaactcatag

SEQ ID NO: 372266 - DNA, 726 bp, Salmonella enterica
atgcccataaataggcctaatctaaatctaaacatccctcctttgaatattgtagctgcttatgatggggcggaaataccatctacaaataagcacctgaaaaataatttcaactccttgcacaaccaaatgcggaagatgccggtatcccactttaaagaggcgctggatgtgcctgactattcagggatgcgccagagtggtttctttgctatgagccaaggttttcagctgaataaccatggttacgatgttttcatccatgctcgtcgagaatcacctcagtctcagggcaaatttgccggtgacaagttccacatcagtgtgctcagggatatggtgccacaagcatttcaagcgctgtccggattgctgttttcagaggacagtccggtagataagtggaaagtgaccgatatggagaaggtcgttcaacaagcccgtgttagcctgggcgctcagttcacgttgtatataaaaccagaccaggaaaattcgcagtacagtgcgtcgtttctccacaagacacggcaatttatagagtgtctggaatccagactatccgaaaatggggttatttcaggacagtgtcctgagtcagacgttcatcctgaaaattggaaatatctcagttatcgtaatgaactacgaagtgggcgtgatggtggtgaaatgcagagacaggctttacgtgaggaaccgttttatcgtttgatgacagagtaa

SEQ ID NO: 372267 - DNA, 651 bp, Salmonella enterica
atgagagtttctggtagtgcgtcatcccaagatataatatcacgtataaattcaaaaaatatcaataataatgattcaaatgaagtcaagagaattaaagatgcgctttgtattgaatcaaaagagagaattttgtatccacaaaatttgagtcgagataatttaaaacaaatggctagatatgtaaataatacatacgtccattactctgggaactgcgttttattatcagcgtgtttacattataacatacatcaccgacaggatatattaagttcgaagaacactgcctctcctacagtgggattagacagcgccattgttgataaaatcatttttggtcatgagcttaaccaatcatattgtttaaattccatcgatgaggtggaaaaagaaatattaaaccgttatgacattaagagggaaagttcttttatcattagcgcagagaactacatagttccaataattggcgaatgtggacatgatttcaacgctgtggttatctgtgaatatgataaaaaaccatatgtacaattcattgattcttggaaaacatccaacatacttcctagcttacaagaaataaaaaaacacttctcatcatcaggggaattttatgtcagggcttatgatgaaaaacacgattga

SEQ ID NO: 372268 - DNA, 426 bp, Salmonella enterica
ttgagtaatcaccacgaatcactggaaggctttcttcgtaaacggcatagtgtaagtaagctggttgtgcatttaatctttacgacaaaataccgctgcaagctgtttgacgggcagattatcgctcagttacgtgatgcttttggttcggctgcggcaaagttggagtgcgaaattatcgagatggatggtgaacaagatcacgtccatctgctgatagcgtatccgctaaaactgggggtcagcgtgatggtaaataatttaaagtcggtatcgtcgcggcttctccgtcagcagaatacccacttgcggatgcagagcaaaaccgggctgctgtggtctcgttcttactttgcctgtagcgccggtggtgccacgatagaaacgcttaaagcatacgtgctcagacagaatacgccggagtag

SEQ ID NO: 372269 - DNA, 351 bp, Salmonella enterica
atgttaagagccacgaaagtatgcatatatccgacaccggaacaggcggagcaccttaacgcccagttcggtgcagtccgttttgtgtacagcaaatctctgcatatcaagaaacacgcttatcaacgacacggcgtaagtttaaccccgcgtaaagacattaaaccgcttctggctgtagcgaaaaaattccgtaaattccgtaaatacgcatggctaaaggaatatgactctattgcgttgcaacaggcggtgatcaatctcgatgttgccttttccaactgcttcaatccgaagctaaaagcccgcttccctatgttcaagcgcaaacacggcaagctgttggggtaa

SEQ ID NO: 372270 - DNA, 561 bp, Salmonella enterica
atgctcggggcgaacatcttcctcgactatgacctctcccgcgaccacgcccgcgccggcttcggcggcgaatactggcgcgacttccttaagctttccgccaacgcctatgtcggcctgaccggctggaaaacctccccggatgtggaggactacgaagagcgtccggccagcggctgggacctgcgtgctgaaggctacctgccgtcgtacccgcagctcggggcgaagatggtgtatgagcagtattacggaaatgaagtgggcctgttcgggaaggatgagcggcagaagaacccgcacgccctgaccgccggggtcagctggactccggtgccgctgctgaagctcagcgcggagcagcgcgccggcaaggccggggagcatgacacccgcttcggggcagaagcgagttaccgcattggtgacagcctgcgcagccagctggatccggatgccgtgggcgccctgcgcagcctggcgggcagccgctacgacctgactgaccgtaacaatgacattatcctcgagtaccgtaagcaggaggtgacgtgccagtaa

SEQ ID NO: 372271 - DNA, 288 bp, Salmonella enterica
atggcggttattgtcacctttcccgccggtcagcgggaccgccggcacgtcaagctcgtcgccggcctgcaggtggtcaaagccgcgggcgaaagtgcggagcccgttcagttttttcagctgtgggacggtcaggccgtgcgcctgcgccaccgtctccccctttttcagggtataaggcacggtccggatcccggcgagggcggcatcccggtcggcagagaacgggctctgcccgatccgggacgcgatgtccgcccgggccgtcatggccggcgtgagcgttaa

SEQ ID NO: 372272 - DNA, 486 bp, Salmonella enterica
atgctgattatcgtcagtgactgtcagtttacccgcctggcgctgacgcgcctgctcgcacatctggaccccgtgaacatgagtgttgcccggtggttacagaccgcgccgccggcaggcagccatgtgctgctggcggcctctcccggcatgctggcatcgctggtcccggcctgccatcacgccaggacatcactgtccctgaaactggcgctgctgggctcaggaggacaggctgtcttcctgaacaccctcggtctcaggccggactgcctgctgccgcgcaccgcctccgcgactcagctgaaggccgcggtcagcagctggctgcgccgtgcgcggggctggcggcaggcgacgacggagagtctctccctgcgcgagcgacaggcgctgtgtgccacgctcgccggcctctccgcgcgcacggcgcccggctcggcatcagccccaaaaccttttacggccatcgccgcagcgcgctga

SEQ ID NO: 372273 - DNA, 489 bp, Salmonella enterica
atgaaccagccgttgttattccggaccgttgccggcaggcagagcaaccatgaagggttttacatgcccccgggcatccgccatctgggcaccctgtccctgtaccgggccgtggcctggtgggggctgtttctgggccgggagtttacccgcgatgacgtcagcgaggcgttcagcattgagccccgccgtgccagcggtatcctcaattacatctgtaaccgtcacaatgacgacgacatttgctttgattcccgcctgcaccccgtgcggggaggccgcgcccagctcgtggtgcgtatccgggcagtggaatcccgcccggacaccatccgccggcagcggacagaccggccgggcgggaaggtgagtgaccggcagtatgaccgccagatggcgcactggctgctgtcccgcccggccggcggtgatacggcaaaactagccgcctggcaggcagcctgcccggtccgggaggcatcatgctga

SEQ ID NO: 372274 - DNA, 714 bp, Salmonella enterica
atgcatttttcagcctttcgcctgcaacaggccatccggaaccgggagtttacgccgttttatcagcccattgtctgcgccacaggaggggaggtggtgggctgcgaaatgctggcccgctggctgcatccgcagaagggcctgctgagcgccgggaactttattcccgccattgaagccaccggcctcggcggagcgctgctgcgcggactggccgacgaggtctgcggggacgggcaggaccttgcccgcagtgccggccgcaggctgatgatgacgctgaatctcagcctgagcctggttatgacgccgcttttccgtccgcacctgctggccctcagcatccggctggagcaggccggcatgacccccgtctttgaaatcaccgagcgggaagatatccgcgcctttcctcaggcggcggtattccgccagcttgccgccggggggctgcggttcgccgtggacgacttcggcaccggtcatgccggtcccgccagcacggtggctgatcggatgattgcgcgcaccgtcagtctggcccggtgccagggggcccgggtcattgccgaaggtatcgagaccccggcgcaggcggcgcgcctgcgggacgcggggggcgattacctgcagggctggcactgcggcgccccgatgcccttcgggctgtttcatttccggctgacgcaaaaaagccagccggcctttggttaa

SEQ ID NO: 372275 - DNA, 783 bp, Salmonella enterica
atgagtcagccaccgttacctgctgtctgtacgcaggcagcgtccgccctgctgccggtggccattgattacccggcggccctcgcactgcgccagatggcaatgcagcatgacgactacccgaaatatctgctggcaccggaggtaagtgccctgctccactacgtccctgatctgcatcgcaggatgctgctggccactctatggaataccggcgcacggattaacgaggcgctggccctgacacggggagacttttcgctggcaccaccttatccgtttgtgcagctggccactctgaaacagcgggcggaaaaggcggccagaacggcaggacggatgccgtccggcagccagccccaccgcctggtgccgctttctgataaccagtatgtcagcgaactgcagatgatggtggccacgctgaaaatcccgctggagcgtcgtaacagacgtaccggcagaacggaaaaggcgcgcctctgggagatcaccgaccggacggtccgtacctggattggggaggcggttgaggccgcagcggctgacgacgtgacgttctcagtcccggtgacaccccatacattccgccactcctatgcgatgcacatgctgtacgccggcataccgctgaaggtgctgcaggcgctgatgggacacaaatcggtgagctcgacggaagtgtacacgaaagtgtttgcgcttgatgttgccgcacgacaccgggtgcagtttcagatgccgggtgctgatgcagtggctatgctcaaaggaggttcatag

SEQ ID NO: 372276 - DNA, 522 bp, Salmonella enterica
atgacacggtcacgcatctgtccggatactgaatccaccggtctcagtccggcatcggatgccctgccggtcagggagacgacagaacagtttgcacaggtctttttcggaaaatccgtgtccctgctgacgccggaagagcggttcacgacggtgtacgccggctcccgggatatacctgcggatttgcatccggcgagctggtttccggccgacacctggtttcgtaacgaacttcgcgcctgcgcggcctatgtcggacgtcgtcagggctggccactgtatcacgcttcagaagcggaacggctgcgcgcactctatccgctacggctcgccacgcccgcgaccgatccgggaaaacaattgctgacccgtacggcgctgctgaaagcgggttactcacgtgccacgattgcggccatgacaccggtggccgaacggcagaaccgtcacagcggcgactggtatcctttatacagggttcagactgaaaccagagatgactccggggaaaaaacatga

SEQ ID NO: 372277 - DNA, 291 bp, Salmonella enterica
atgcgtgtcagcgaacaggtgctgctcagtagtctacgtcagggcggctgtgtgcggagtttctggcgccgctccgccagactggcgggtacgccctctccgatcgttccggacgggcttgtgctggaaacccccggtgaacgcggggataccccactctgtcatgtggattttgcggtggtacagaagtggctggtctgcgaggaaacctggacacagaccctcgggggaacggagttcggcgggacggtctggcgactgcgtactgacagggagaacaccacctcatga

SEQ ID NO: 372278 - DNA, 306 bp, Salmonella enterica
atgcagtttaaggtttacacctgtaaaagggagagtcgctaccggctgtttgtggacgtgcagagcgacatcattgacacccccggacggcggatggctgtcccgctggtcagcgcccgtctgctgtcggaaaaggttccccgcgatctttacccggtgatgcatatcggggatgagccttaccgcctgctgaccacggatatgaccagtgtgccggccaccgtcatcggggaagaggtggccgatctcagcctccgggagaacgatatcaaaaacgccattaacctgatgttccgggggatctga

SEQ ID NO: 372279 - DNA, 219 bp, Salmonella enterica
atgaagcagcgaattacagtgacagtggacagcgacagctatcagctgctcaaggcatacgacgtgaatatctccggtctggtcagtacgaccatgcagaacgaagcccgccgtctgcgagccgaacgctggcaggaagaaaatcgggaaggtatggctgaggtggccagctttatagaggctaacggatcgtttgctgacgacaacaggaactggtga

SEQ ID NO: 372280 - DNA, 489 bp, Salmonella enterica
atgaacacagcattactcgttccatttatctcaactgcattatccggagtgggcgtttatacccgctattactttaagaaatatcaggcttccagggatctgtgccaaaaggtccacagaatgatggtaaatacactgaccgataccgcgaggttattcagccggagcgcccccgcgcaggcgcttaaatcagaactgagaatcatgcagcagaaactctctcaggagactcaaaaactggataaaatgacgacacgccttccgttaaagcgtctgcaacgggaacaacgtcatattttgaggcatgcaaagtggttgttaggttatctcgattcgcatctggcaaataatgaagggaaattttttctgttcctgcatgacttggcgacggatagcgatgataaagtcctggatttcctgacgtcattacatgacacaaagagattcagaaatcgccgtctgcaaactggatcaactacctgtccctga

SEQ ID NO: 372281 - DNA, 990 bp, Salmonella enterica
ttgtttgaagaggtggataaatcctccggtgaaatcgtaaatctcactcctaatgccagtaataccgtgcagcctgtagctctgatgcggcttggagtatttgttcctacgcttaagtcactgaaaaaccgtaaaaagaacacactttcgcgtactgatgcgtcggaagaactgacgcgtctgtctctcgccagggccgaggggtttgataaagtggagatcaccggtccccgcctggatatggataatgacttcaagacctgggtaggggtgatccattcctttgcccgacataaagttattggcgataaagttgagctgccgtttgtcgaattcgccaaactctgtgggatcccctccagtcagtcatcccggaagctccgggaacgtatcagtccttcacttaagcgtatcgcgggtactgtgatctcgttttcccgcacaacggagaagcacaccaaagagtacattacgcatctggtacagtcggcttactatgatacggaaaaagatatcgttcaactgcaagccgatccgcgcctctttgaactctaccagtttgaccggaaagtgctgctgcagctcaaggccatcaatgccctgaagcgccgggagtccgctcaggctctttatacctttatagagagtctgccgcgggatccggcgccgatatcactggcgcggctacgggcccgtctgaacctgaaatcccctgtgttctcgcagaaccagacggtgaggcgtgccatggagcagctccgggagattggctatctggattacactgagatccagcgtgggcgcacaaaactcttctgtattcactaccgccggcccaagttaaagccacctcatgatgagagtgcggagaacccgcaactgccagccacaccgggtgacgtcagtccggagatggctgaaaaacttgcacttcttgataaactgggcatcacacttgatgacctggagaaactcttcaaatcccgctga

SEQ ID NO: 372282 - DNA, 387 bp, Salmonella enterica
atgaaaaaaactttaatcactcttattattaccactctttctttcagttcgcttgcccggcaaacggacattgtttcttccgtagagcagcccgggtatgttcagggaggatttacaggcccggcccccacccagacatcggtttcacaggctaaaaaacagtgggatgatgcgtgggtggtactggaaggcaacattatcaggcaagtcggtcacgagctttatgaattccgtgacagcagcggtactgtttatgtggacatcgataacaaatactggatgggtcaaacagcctcgcctgcggataaggttcatattgaaggagaagtggatcgggactgggatggtataaagatagatgtaaaaaatatccgggtaatgaagtaa

SEQ ID NO: 372283 - DNA, 303 bp, Salmonella enterica
atgatgctgaacagaaaagatgctgattattatttgggcaaagagatcatgctggccagaataagacgaggggcgctgatacctgcaaaagtaaatgaggaacatttctggttactcatcggtatatcatccattcacagcgagaagattattcaggcactcagggactaccttgtttttggggtgtccagaaaggatgtctgtgaacgctatgaagtgaacaacgggtatttcagtaccagtctgaaccgcctgtcacgtatcagtcaggccgcagcgcagatggttgtttattattcataa

SEQ ID NO: 372284 - DNA, 525 bp, Salmonella enterica
atgaaaaagagcattattgcttccattattgcactgggtgttctgggcgggactgcacacgctgccaatgaagtgactttcctgggttcagtgagcgccacgacctgtgacctgaccacttctgtcaacggcgcagctcagccaaaccaggttgttcagttaggtactgttcaggcaggtcaggaaggtacggctgttgattttgccatgaagccggctaacccgggctccctggggtgtcaggggctggatactaaaaccgtcactgtctcctgggcttctgctgccctgaatgctgacggctttggtgcaactggcggcgcagcaacagacgctactgttctggtcaataacgtgaacgcaaaaaccaatcctggtgcggcggtgaatgcaaatgccagcaccgtggaatttaacggtgctgatctgaacaccgacggcctgaaattccaggccaaactgaaaggtggccagactgaaggtgacttcaaatctgtggcgtctttcgcagtggcttacaaataa

SEQ ID NO: 372285 - DNA, 2454 bp, Salmonella enterica
gtgcaatttcctccggagagggactgtctgagtcagggggttgttgtgtcatttcatcaccgggtatttaaactgtcggcgctgagtctcgccttattttctcacctgtcttttgccagtactgactcagagcttaacctggatttcctgcagggaatgggcgccattccctccgtattaaaatccggttcggattttccggccggacagtattatgtcgacgtcattgttaaccaggaaaacgtgggtaaggcccgtttatccattacaccacaggaagagtcagcaaacgccctgtgcctgtcgccggagtggctgaaggctgccggggttcctgtccgcctggagggatatgcctccacactagatgcggcaaagcaatgttatgttctcagccgtaatccctacacgaaagtggatttcagctatggctcccagagcctggtgttcagtattccccagtcgtttctggtcagtaaaacggaccccagccgctgggactacggcgtgccggcggcacgcctgaagtactccgccaacgcctcgcagacgtccgggcaaagcaccagtgcctatgcgaatgccgacctgatggtcaaccttggccgctgggtgctggccagtaacatgagcgcatcccggtacgctgacggctccggtgagttcaccgcccgggatatcacgctgtccaccgccatcagccaggtgcagggggacctgctgctcggtaaatcccagacccgcagcgccctgttctctgatttcggcttttacggggcggcactgcgctccaacagtaacatgctgccgtgggaggcccgcgggtatgccccgcttatcaccggggtggcaaactccacctcccgcgtcaccatcagccagaacgggtacaccgtgtactcaaaagtggtgccgcccggcccgtaccagctggatgatgtccgctccgtggggaacggtgacctggtggtgaccgtggaggatgcgtccggccacaaaaccaccaccgtctatccggtcaccaccctgccgacgctgctgcgtcccggggagattgaatacaacgtggcggccggccgcaagtccagtaactatcagctgaaaaaaccgttccgggacggtgaaagcggcacgttctggatgggaagcgtggggtacggctttgactccaccacgctgaatgccgcctccatcctgcacggtaaataccaggccggcggggtgagcgtgacgcaggccctggggggcttcggcgccgtgtctgccgggatgaacctgtcacaggcgaaatacgacaacggggacaacaagcgcgggcacagcgtcagcgccaagtatgccaaaagcttctctgacagctcggacctgcagctgctggcctaccgttaccagagtaaggggtatgtggagttcgcggacttctacagcacggaccggtatacccgctacaacacaaaatcacgctatgagatgcgcctctcgcaacgtctggggaacagcaacctgaacctggccggctggcaggaggactactggtggatgaaaggaaaggccaccgggggcgatgtctccctcagcaccaccattcttgatggtgtgtcggtcttcctgaacggcagctacagcaaacgcccgtacctggacaaaccggactacagcacgtcgctctccttcagtattccgttcaccctgggtggcgtgcgccattacagcagtaccggactgagctacagcagcagcggcaggatggggatgaacagcggggtgtcggcaagtccgacggaccgcctgagctacggcctcaacaccaacctgagtgataagggcgaccgcagcctgaacggcaacctctcgtatggctttgatgccatccagaccaacatgatgctgtcgcagggacgagataacaccaccgtgtcaggcagcgtgagcggcaccattctgggcacggcagacagcggcctgatgatgacgaaggaaaccgggaacacgctgggcgtggcgcgcattccgggggtgaagggcgtgaggattaacggctcagcccccaccaacagcaagggatacaccgtggtgaacctgtcggattactccctgaaccgggtcagcgtggacatggaaaacgtgccggatgacctggagctgcagaccacctcctttaacgtggtgccgacggaaaaagctgtcgtgtaccgggagtttggcgccgagcatgtgctgcgctacatcctgcgggtgaaggagcgtgacggacggatactgaacgggggcagcgcgcagacggagcagggactggatgccgggtttattgccggtaacggcgtcctgctgatgaatatgctgagcgcgccgtcacgggtcagcgtcgagcggggggacggcagcgtctgccatttttcagtgaaaggtattgtgcctaataccggcaaagttcaggaggtttattgtgaataa

SEQ ID NO: 372286 - DNA, 693 bp, Salmonella enterica
gtgaataagatgatgaagtggggactggtgtccctgctgtccctggccgtcagcgggcaggccatggcagcctttgtgctgaacggcacgcgttttatctatgaggaagggagaaagaacacctcatttgaggtgaccaaccaggcggatgagacctttggcggccaggtgtggatagacaacaccacccagggcagcagtacggtgtatatggtaccggcgccgccgttctttaaggtcaggcccaaagaaaagcagattatccgcatcatgaagacggacagcgcgctgccgtcagaccgtgagtcgctgttctggctgaacgttcaggaaattccgccgaagccaaaggcgtcggaagggaatgtcctggcggtggccgtgaacacgaaggtgaagctgatttaccggccgaaagcgcttgttgagggacgccgtaatgccgagaagaacctgcagattacgcaccgcggcggtgaggcttacctgaagaacccgacgccgtactactttgcggtcaccggggtgaaactgaacggacagccggtcaggctgaacgacagggtgatgaatgagattgcgcagctggcgccgaagagtgaggtggcgctggggaaactgtcgctgaacggaacggtgacggtgcaggctgttaacgactggggcggcacccaggactacacgctgaaatga

SEQ ID NO: 372287 - DNA, 558 bp, Salmonella enterica
atgaaacagaaagaataccggaccgtgcggataacgcgacacatgcgtgcgggcatgctggccgccgggctgctgcttcccctggtggccggggcggcgacaagtggaggtatgctcatcccgttcgagataaacaacccgcagcagacctgtgacctgacctttgataacggcagcaccatgatgacctaccagctgggggcgatgagtaagggaagccggatacagcacaggccgtttaccgtcaccgtggactgcagggggagcacggcagtgaagacggccctgacggcaaggagcaccacgggaacgctgcagggagggagtgacagcgtcatgatgcgggtgaacggtcaggcgtcaactaatggtccgctgttctggctggagaatggcggacagcgggtgaagctgacgggggcaaaaagtgatgccttctgcatctcccccaccgccccgaacaggtgtgagcttcgtccggtgacggatatcccggcgaactccccggaggggaatattgatgcgacggtggtctttgatgtggtttatccgcagtag

SEQ ID NO: 372288 - DNA, 942 bp, Salmonella enterica
atgaaaccgatttcttattttaccgggagcagaaaacgcagcagcacatgtctgatatcgtcgttgctgcttccgggaatgacagccatgagtatttcacttcccggcaccgcagcaatggttgggttcgggggagactatacctacaggggcacaataaccgtaaccggagaggcgctcatcggtcctgctgtagatgcaagggtgcctaaggttagtgtgactctctgtagctcgaccaaagtgacggtggaacaatgcaacgcccggttagagcgcaaaaatcaggatggctcatggaatgttgtgacagggatgcagtgtacagggcaaaatagcaataatttaagtgtggtgacccccatctcaaaaatctataagctcgtgtacggcgatttctaccgtgtcgtttttatgaatgtgagggcgaggtttgaaccaagtggagcagctgagcatggttcgcgttgttttgttgaaaaacaaagctacagctatgggaatcctgtcagtggaggagtactggagttgagtacattgtcaggtcaaactgaacgtttggctgcctatggccagcacgagacgacattcttgatgccagtcactgcggtcgataaaacttatatcgaatacccgaccatgacccggttgagtgttgctcccgacggaagcgcgcgcggacaggtagtcaccgttgtgggtcgtaacgcacaagtgaaatttaccctgagggaggcttatggtaataataatttggggcagtattggataccaacggctgctagcgggagtaaaattaaaccgcagttgataaaaaaggacggatcacaatgtgtcaatgcccgtgaaggggagtcatgtgacctttattatccaccgggatctgtacctccaggacgatactaccgcggctatgtggacatttacgccacggtatattga

SEQ ID NO: 372289 - DNA, 213 bp, Salmonella enterica
atgagtgaatccatcattacacatatcatctccatcatccgggagcggcagagcgcgcacgacggcgcgcctgttaaaacccgcgatattgccgatgctgccggactcagtatctaccaggtccgctcgtatcttgagcagctccgcgctgtcgggatgcttgagaaagtgaatgccggaaagggagtacccggattatggcgtctgctctga

SEQ ID NO: 372290 - DNA, 741 bp, Salmonella enterica
atgaaaaactttttcgcagtctgcatcattccccttgtggtagcctggtccgctactgcatcagcaaaagaagggatctatatcaccgggaaagcggggacatccgtagtcaatgtctatggaatcaactcaaccttcagccaggatgagatagttaatggtcatgcaacgttacctgaccgtaccaaaggcgtttttggcggcggggttgctatcggttatgacttttatgatccattccagcttccagtacgtttagaactggataccactttcagaggtgagacggatgctaaaggcgggcaggatattattgcatttggtgatccagtacacataaatgtaaaaaatcaggtccgaatgaccacttacatggttaatggctattatgattttcacaatagtacggcatttactccctatatcagcgcaggcgttggcctcgctcatgtgaagctaagtaataacaccattcctgttggttttggtattaatgaaactctgtctgcttcaaaaaataactttgcctggggcgcaggtatcggtgcaaaatatgctgtaacagataatattatgattgacgccagttataaatacattaatgctggcaaagtaagcatttcaaaaaatcactatgctggtgatgaacataccgcttatgatgcagacacaaaggctgcctccaatgacttcatgctcggcactgatgaatcccctaatgattttggtaaaaatcattaa

SEQ ID NO: 372291 - DNA, 408 bp, Salmonella enterica
atgaaaaactttgtacgcacaactttactggcagcgactctggcgggcgtttcttttggcgctttcgccaccgctgtccccaatcctcccctgcccgcccaggatcctattgtccagcatctgaagctgacaaacgatcagattacccggatcaaaaaacttcaccaacaactggaaaccgacgtcagtcagatttctatgaagggaattaaagacggtgcgctgatagaggtgattaaatccggtaaatgggatgacgccgccgtaaaacagcagcttgcagccttcagtaacatagaacaacaggctcgctattatcgggttaaatattattttgatttaagcaaagtcttaacaccagaacagcgtcaacaggtacaacaagatctcgcccaggcacttgagtaa

SEQ ID NO: 372292 - DNA, 768 bp, Salmonella enterica
gtgtctggtttgaaaattactctgttgcaacaacctttagtctggatggacggcccggcaaacctgcgtcattttgacagacagctagagctcgtatctggccgggatgtgattgttctgcctgaaatgtttaccaccggcttcgcgatggaggccgctaataactcactttcgcaagatagcgtgattacgtggatgcaggccaaagcccgacaaactgacgctctgattgccggcagcgcggcgctacaaactgagcgcggcgccgtaaatcgcttcttactggttgaaccggaaggcaaggttcatctctatgataagcgccatctatttcgtatggcggatgaacatcaacattatgccgcaggcgataaacgcatcatcgtgcagtggcgcggttggcgcattctgccgctgctctgttacgatctgcgctttccgatatggtcacgcaaccgcaatgattacgatctggcgctgtatgtagcgaactggcccgcgccgcgctcgctacactggcaaacattactgacggcgcgcgctattgaaaatcaggcttatgtcgcaggctgcaaccgggttggcaccgatggtaacgggctacattatcgcggcgatagccggatcattaatccccagggcgacattatcgccaccgccgaaccacaccaggcgacacgtatcgatgccgatctttctctcgtcgccttgcaggactatcgcgaaaaatttccagcctggcgcgatgccgatccattcaccttgtaa

SEQ ID NO: 372293 - DNA, 2445 bp, Salmonella enterica
atgatgattttgagtattatcgctacggttgttctgctcggcgcattgttctatcaccgcgtgagtttatttctcagcagcctgattctgctcgcctggaccgccgcacttggcgtcgctggcctgtggtccatctggctgttggttcctctggccattatcctcgtgccgtttaacctcacaccgatgcgaaaatcaatgatttccgcaccggtgttccgcggcttccgtaaggtcatgccgccgatgtcgcgcactgagaaagaagcgattgatgccggtacaacctggtgggaaggcgatctgttccagggcaagcctgactggaaaaaactgcacaactatccacaaccgcaactcactgccgaagagcaagcgtttctcgacggcccggtagaagaagcgtgccggatggcgaacgatttccagattacccatgaactggcggatctgccgccggaactgtgggcttatctgaaagagcatcgtttttttgcgatgatcattaaaaaagagtatggcggactggagttctccgcttatgcgcagtcccgtgtactgcaaaaactgtccggcgtctccgggattctggctatcaccgtcggcgttccaaactcactcggccctggcgagttgttgcagcactatggtacggaagagcagaagaatcactatctgccgcgactggcgcgcggccaggagatcccctgctttgcgctgaccagcccggaagcaggttctgatgcaggcgccattccggataccggcgtggtttgcatgggcgaatggcagggccagcaggtgctgggtatgcgcctgacctggaacaagcgttacattacgctggcaccgatagctaccgtgttgggcctggcgtttaagctttccgatccggatagattgttaggcggagaagaagagctgggtattacctgtgccctgatccccacctcaacgccgggtgtggaaattggtcgtcgtcacttcccgcttaacgttccgttccagaatggtccaacccgcggtaacgatattttcgtgcctattgattatattatcggcggccccaaaatggccggacaaggctggcgtatgctggtggaatgtttgtcggtaggacgcggtattaccctgccgtccaactccactggcggggtgaaatccgtcgcgctggcaaccggcgcctatgctcacattcgtcgtcagttcaaaatatctatcggcaagatggaaggtattgaggaaccgctggcgcgtattgcaggtaacgcttatgtgatggatgccgccgcatcgttaatcacctatggcattatgctgggtgaaaaaccggcggtactgtcggctatcgtgaagtaccactgcacccaccgcggccagcagtccattatcgacgcgatggatatcactgggggtaaaggcattatgctgggcgagagcaacttcctggcgcgtgcttaccagggcgcgcctatcgcgatcaccgtggaaggcgcgaatatcctgacccgtagcatgatgatctttggtcagggcgccattcgctgccatccttatgtactggaagagatggccgcagcgcagaataatgatgtgaatgcctttgataagctgttgtttaaacatatcggccatgtcggcagcaataccgtccgcagtttctggcttggcctgacccgcggattaacgagccatacgccaaccggcgacgccacgaagcgttattaccagcatctgaaccgactgagcgcaaacctggcgctgctgtctgacgtgtcaatggcggtactgggcggcagcctgaaacgccgcgagcgtatctccgcgcgtctgggcgatgtgttgagtcagctttatctggcctcagccgtactgaagcgttacgacgacgaaggccgccacgaagccgacctgccgctggtgcactggggcgtacaggatgcgctgtatcgtgctgaacaagcgatggacgatctgctgcagaacttcccgaaccgcgtcgtggccggattgctcaccgcgatgatcttcccgactggccgtcattatctggcgccgtctgataagctggatcacgccgtggcgaagatcctacaggtgccgaacgccacacgttcacgcattgggcgcggtcagtatctgacgcccgccgaacataatccggtcggtttactggaagaagcgctgcgtgatgtcatcgctgccgaccctatccaccagcgcatctgcaaagaactgggtaaaaatctgccgtttactcgtctggatgaactggcgcgcaatgcgctggcgaaagggcttatagataaagatgaagccgccatcctggcgaaagcggaagagagccgcctgcgcagtatcaacgttgatgattttgaacctgaagcgctggcgaccaaaccggtaaagctgccggagaaagtgcgtaaagtcgaagccgcataa

SEQ ID NO: 372294 - DNA, 579 bp, Salmonella enterica
atgtaccaggatcttattcgtaacgaactgaacgaagcggcggaaacgctggctaattttttaaaagatgacgccaatattcacgctattcagcgcgcggcggtcctgttggctgacagttttaaagcgggtggtaaggtactttcctgcggtaacggcggctcccattgcgatgcgatgcactttgctgaagagctgacaggccgttatcgtgaaaatcgtccgggctacccggcaattgcgatttctgatgttagccatatatcctgcgtcagtaatgattttggctatgactatattttctctcgttacgttgaggcggtagggcgcgaaggcgatgtcctgttagggatctcgacgtcgggtaactctggtaacgtgattaaagcgattgccgcggcccgtgaaaaaggcatgaaagtgattacgttgaccggcaaagacggcggcaaaatggcgggaacggcggatattgaaattcgcgtaccgcacttcggttatgccgatcgtattcaggaaattcatatcaaagtaattcatatcctgattcaactgatcgaaaaagagatggttaaataa

SEQ ID NO: 372295 - DNA, 768 bp, Salmonella enterica
atgtgcgaactgcttgggatgagcgccaatgtgccgacggatatctgctttagcttcaccggactggtgcagcgtggcggcggaaccgggccgcataaagacggctggggaattaccttttacgaaggaaagggctgtcgcacgtttaaagatccgcaaccgagctaccattcgccgattgcgaaactggtacagaattacccgatcaagtcctgctcggttatcgcccatatccgtcaggctaatcgcggtgaagtggcgctggaaaatacacacccttttacccgggaattatggggacgcaactggacttatgctcataacggtcagctcaacggttataagtcgctggaaaccggtaattttcgtccggtgggggaaaccgacagcgaaaaagcgttttgctggctattgcataaattaacgcagcgttatccccgcacgccgggcaacatgacagcggtatttaaatatattgcgacactggcgacggtattacgtgaaaaaggcgtttttaacatgctgctgtcagatgggcgatatgtgatggcgttttgctcaacccatttgcactggatcactcgccgggcgccgtttggcgtagccacgctggtggatcaggatatggaaattgatttcagctcacagaccacgccaaatgacgtggttaccgtgattgctacccagccgctaacggggaatgaaacctggcaaaagattatgccaggcgaatgggcgttattttgcctcggagagcgtataatttga

SEQ ID NO: 372296 - DNA, 741 bp, Salmonella enterica
atgcgtaaaatcgcattttttcttgcgatgcttctgatgccgtgcgtctcatttgccggtttgctgagcagcagcagccccgtcacgccggtcagtaaagagtataagcagcagttaatgggctcaccggtctatattcagatttttaaagaagagcgcacccttgatctctacgtcaaaatgggtgagcaataccagttgcttgatagctacaaaatttgcaactattccggtgggttaggcccgaaacgccgtcagggcgattttaaaagtccggaagggttttacagcgttcagcgcaatcaactcaagccagacagccgtttttataaggccatcaacattggttttcccaatgcctacgatcgcgcgcatggctatgatggtaaatatctgatgattcacggcgcctgtgtttccgtcggctgctatgccatgaccgatagcggcattgatgagattttccagtttgtcaccgccgcgctggtctttggtcagccgagcgtgcaggtgagtatttatccgttccggatgaccgacgccaatatgcagcgtcataaatattcatattacaaagatttctgggcgcagctaaaacccggctacgattattttgaacagacgcataagccgccaactgtttctatcgttgatggacgttacgtcgtgagcaaaccgttgagtcacgaagtcgttcagccacagctggcctcaaattatacgctctccgaggcaaaataa

SEQ ID NO: 372297 - DNA, 1056 bp, Salmonella enterica
atgcgcaaaatcatacatgttgatatggactgtttttttgccgcggtagagatgcgtgataatccggcgttacgcgatattcccattgccattggcgggagtcgtgagcgtagaggcgttatcagtaccgccaactatcctgcgcgccagtttggcgtacgtagcgcgatgccgaccgccatggcgctaaaactgtgcccccatctcaccttattgcctggccgctttgacgcctataaagaggcttcgcggcatgtacgtgacatcttttcccgctacacttcactgattgaaccgctctcgctggatgaagcctggctggatgtgactgacagcccgcactgttatggttcggcgacgctgatcgccagggagattcgtcagactattttcaatgaactgcaactcaccgcctccgccggcgttgcgccagtgaaatttctggcgaagatcgcctccgatctcaataaaccgaacggacaatatgttattacgccagccgatgtacccggctttcttaaaacgttgccgttagccaaaattccaggcgtggggaaagtttccgccgctaaactggaaaatatggggttaagaacctgcggggatattcaacagtgcgatctggcgatgcttctcaaacgctttggtaaatttggccgggtattatgggagcgtagtcagggtattgacgagcgtgatgttaacagcgaaaggctgcgtaaatcggtaggcgttgagcgtactctggcggaggatattcatgaatggtcggactgcgaggccattattgaacatttatatccggaactggagcgtcgtctggctatagtaaagcccgatttactgattgcccgacagggcgttaaattaaaatttaatgattttcagcaaaccactcaggaacatgtctggccgcaattaaataaagaagacttaattaccaccgcccgtaaaacctgggacgagcgtcgcggcgagcgcggcgtacggctggtggggctacacgtaacgctgctcgaccctcagttggaacgacagttggtgttagggttataa

SEQ ID NO: 372298 - DNA, 1140 bp, Salmonella enterica
atgggcaattatattcgtcctttatcagatgtggtattttctatcgcatcggataacctgtggatcgaagattccgcgatccaacaattatatacgacggctaagttaaccggtatgaaacgcgttatcgggatgccagatctgcatccggggcgcggctatcctattggcgcagcctttttctcgcgtggacgtttttatccggcgctggtcggcaacgatatcggctgcggcatggcgttatggcaaacggatattttagggcgtaaatataacgccgataaactggagaagcggctggcgtcgctgcctgacgtggcggacgcgcagtggctggaggagaatgtccccgccgcaatgcagcatcattcgtggcgctctgcgctgggttccattggcggcggcaatcattttgccgagctgcagcaggtcgatcgcatcgtcgatgctgattcgttcgctttgtcggggttgcaaaaagcgcagttattactgctggtacacagtggttcacgcggtctggggcaagctatcctgcgtcgtcatgtggaggcgttttcgcataacggtttgccggaagatagcgacgatgcgcgccactaccctgcagaacatgacgatgcgctggcatttgcccgcagtaatcgcgcgctgattgcccgccggatactgcaacagctcagggctgagggcgaaccgcggctggatgtggcgcataacttcgttgaaccctgtactgtcgcgggtgaggcggggtggctgcaccgtaaaggcgctacgccagatgggcagggactggtgattatccccggctcgcgcggcgattatagctggctggtgaaacccgtcgtcagcgaggagagcctcttctccctggcgcacggcgcggggcgcaaatggatgcgtaccgagtgtaaagaacggttatcggcaaaatttaccccgcgacagctctgccgtactgggatgggtagccgggtgatttgccgcgatcgccagctcatttatgaagaagcgccgcaggcgtataaatccatcgatagcgttgtggattgtctggcagacgccggactgattacgccagttgcctgcctgcgtccggtgctgacgctgaaaacctcaggggagaaaagcgcatga

SEQ ID NO: 372299 - DNA, 615 bp, Salmonella enterica
atgatcttactgcaactttcttctgcgcagggaccggacgagtgttgtctggcggtaaaaaaagcgctggattgtctgacgaaagaagccgccagagaaaaggtatcgttgacgcgacttgaaacagagccgggacgattaccagacacgctgcgttccgcgctggtctcgctggacggcgaaaaagccatggctttcagtgaacgttggtgcggcacgttactgtggatttgtaccagcccgtatcgtccgcaccatgggcgaaaaaactggtacgtcggcattgggcgcttttccgccgacgagcacatacagtctgatgagattcgtttcgagactctgcgctcttccggcccgggtgggcagcacgttaataaaaccgactcggcagtgcgggccacgcacctggcgagcgggattagtgtgaaggttcagtcggagcgcagtcaacatgcgaataagcgtctggcccggctgctgattgcctggcggctggaacagcaacggcaaaatgagtgtgcggcgttgaagtctgaaaggcgtctgttccatcatcagattgagcgcggcaatccgctgcggatatttaaaggaatggcgtttacgccacaataa

SEQ ID NO: 372300 - DNA, 1458 bp, Salmonella enterica
gtgtctgaactgtctcagttatcaccacaacctttgtgggatatttttgccaaaatctgttctattcctcacccgtcctatcacgaagagcaactcgcggaacatattgtgagttgggccaaagagaaaggcctttacgtggatcgcgaccaggtcggtaatattctgatccgtaagcccgccactgcaggtatggaaaatcgcaagccggtcgttttacaggcgcatctggatatggtgccgcaaaaaaatagcgacaccgttcacgacttcactacagatcctatccagccttatattgatggcgaatgggttaaagcgcgcggtactacgctcggcgccgacaatggtattggaatggcttctgcgttagcggtactggctgatgataatgtcgtccatggcccgctggaagtgctgctgaccatgaccgaagaagcgggcatggatggcgcgttcggcctccagtccggctggttgcaggccgacatcctgatcaacaccgactctgaagaagaaggtgagatctatatgggctgcgcaggcggtattgattttacctctaatctgccgttgacccgtgaagctgtacccgcaggatttgcgtgctttaagctaaccctgaaaggcctgaaaggcggccactccggtggtgaaattcacctcggtcttggcaatgccaacaaattgctggcgcgttttctggccgggcacgcagaagaactggatctgcgtctgatcgatttcaacggcggcacgctgcgtaacgcgattccgcgcgaagcgttcgctaccctcgccgttgccgcagacaacgtaggcgctctgaaaacattagtgaacgcttaccaggatattctgaaaaacgaactggcggaaaaagagaaaaacctgacgctgcaactcaatgaggttgccagtgataaagccgcattgaccgcgccgtcacgcgatacctttgtgcgcctgctgaacgcaacgccgaacggcgtgatccgcaattcagacgtggcgaaaggcgtagtggaaacatcgctgaacgttggcgtggtcacaatgtctgatgcgaatgtcgaaattcactgcctgattcgctctcttatcgacagcggtaaagattatgtggtgagtatgctggattcgctgggcaagctggctggcgcgaaaaccgaagcaaaaggcagctatcctggctggcagcccgatgcgaactcgccggtcatgcacctggtgcgggaaacctatcagcgtctgtttaacaagacacctaacatccagattatccacgccggcctggaatgcggtctgtttaagaaaccctatccggatatggacatggtttctattgggcctaccattaccggacctcactctccggatgagcaggtacatatcgaaagcgtcggccactactggactctgctgaccgaattgctgaaagcgattcctgcgaagtaa

SEQ ID NO: 372301 - DNA, 459 bp, Salmonella enterica
atgagcgaaaaatacgtcgtcacctgggacatgttgcagattcacgcacgcaaactggcgagccgcctcatgccttcagaacaatggaaaggcattattgccgtaagtcgtggcggccttgtaccgggcgcactactggcgcgtgaattgggcattcgtcatgtcgataccgtatgcatctccagctacgatcacgataaccagcgcgaactgaaagtgctgaaacgtgcagaaggcgacggcgaaggctttatcgtcatcgacgatctggtcgataccggcggcaccgccgtcgcgattcgcgaaatgtaccctaaagcgcatttcgtcacgattttcgctaaaccggcgggccgtccgctggttgatgattatgttattgatattcctcagaacacctggattgaacagccctgggatatgggtgtggtatttgtaccgccgatttcaggtcgttaa

SEQ ID NO: 372302 - DNA, 1245 bp, Salmonella enterica
atgacacaggctaacctcagcgaaaccctgttcaaaccccgctttaaacatactgaaacgtctacccttgtccgtcggttcaatcgtgggtcgcagccgcccatgcaatccgcgctggacggtaagaacgtcccgcactggtatcgcatgataaaccgcctgatgtggatttggcgcggcattgacccacgagaaatccttgatgtgcaggcgcgtattgtgatgagcgacgcagagcgaacggatgatgatttatacgatacggtcatcggttaccgcggcggcaactggatttatgagtgggcaaagcaggcgatggactggcagcagaaagcctgtcaggaacaggacgccatgcgcagcggacgctactggcttcatgcctcaacgctctataacattgccgcctacccgcatttgaagggcgatgagctggcggagcaggcgcaggcgctggcgaatcgcgcctatgaagaggccgcgcagcggttgccaggctcgttacgtgaaatggaatttgccgttcctggcggttcgcctgtcaccgcgtttttacatatgccgaaaggggatggcccgtttccgacggtgctcatgtgcggcggcctggacgccatgcaaaccgactattacaccctgtatgaacgctatttcgcgccgcgcggtatcgcgatgttaacgcttgatatgccttcggttggattttcatcaaagtggaaattaacccaggattccagcttgctccaccagcatgtgttaaaagcgcttcctaatgttccctgggtggatcatacccgtgttgcggcgtttggtttccgttttggcgccaatgttgcggtgcgtctggcctatctggaagcgccgcgtttgaaggcggtggcttgcctggggccggtggtccatgcgctacttagcgatccgcaacgacagagcacggtgccggagatgtatctggatgtgctggccagccgtctgggtatgcatgatgcttcggatgaggcgctgcgtgtggagctcaatcgctattcgttgaaagtacaggggctactgggcagacgttgtcctacgccaatgctttccggcttctggaaaaacgatcctttcagcccggaagaagagtctcgcttaattacaacatcatcttcagacggtaagctgatagagatcccttttaacccggtgtaccgcaattttgaccgcgcgctgcaagaaattaccgactggattaatcatagattgtgttaa

SEQ ID NO: 372303 - DNA, 402 bp, Salmonella enterica
atgacgttaccgagtggacacccgaaaagtagattgatcaagaaatttaccgcgcttggcccctatatccgggaagggcagtgcgaagacaatcgtttttttttcgattgcctggcagtttgcgtcaacgtgaagcccgcgccagagaagcgtgaattttggggctggtggatggagctggaagcacaagagaaacgcttcacttatcgttatcagtttggtttgtttgataaagagggcaactggaccgcagtgccgattaacgaaaccgaagtggtggagcgactggaatacacgctacgcgagtttcatgaaaagctacgcgacctgctgatttctatggagctggcgctggagccgtctgacgatttcaacgacgagccggtaaaactgtcggcataa

SEQ ID NO: 372304 - DNA, 1053 bp, Salmonella enterica
atgaataagagcactctggcaatagtggtgagtatcatcgcatcagcatctgttcacgccgccgaggtttacaataaaaacggtaataagcttgatgtgtatggaaaagttaaagccatgcactatatgagcgattatgacagcaaagatggcgatcaaagctacgttcgttttggttttaaaggcgaaacgcaaattaacgatcaattgaccggctacgggcgctgggaagctgagtttgccggtaataaagccgaaagtgattcgtcccagcaaaaaacccgcctggcctttgctggcctgaaattaaaagatatcggttcttttgactatggacgtaacctgggcgcgctgtacgatgttgaggcctggacggatatgtttcccgaattcggcggcgactcttccgcccagaccgataattttatgactaaacgcgccagcgggctggcgacttaccgcaataccgatttcttcggcatcgttgatggactggatcttaccttacagtatcaggggaaaaacgaagatcgcgatgtgaaaaagcaaaacggcgacggcttcggcacatccgtgagctatgatttcggcggcagcgattttgccgtcagcggcgcttatactctctccgatcgcaccagggagcaaaatctgcagcgccgcggtacgggcgataaagccgaagcctgggctacgggtgttaagtatgacgctaatgatatttatattgcgaccttctattcagaaacccgcaacatgacgccagtttccggcggatttgccaataaaacccaaaacttcgaagcggttatccagtatcagtttgattttggtctgcgtccgtcattaggctatgtgctgtcaaaaggcaaagatattgagggcgtcggcagtgaggatttggtgaattacattgacgttggcgcaacctattacttcaacaaaaatatgtccgcgtttgtagattacaaaatcaatcagcttgatagcgataacacgttaggcattaatgacgatgatattgtggcaatagggttgacctaccagttctga

SEQ ID NO: 372305 - DNA, 1104 bp, Salmonella enterica
atgagtgacagccagacgctggtcgtaaaactcggcaccagcgtgctaacaggcggatcgcgccgcctgaaccgtgcccatatcgtagaacttgtccgccagtgcgcgcagctacacgccgcgggacatcgtattgttattgttacctctggcgcgattgccgccggacgtgaacatctcggctacccggaactgccggcaacgatcgcctctaaacagcttctggcggcggtagggcaaagccgcctgattcaactgtgggagcagttgttttcaatttacggtatccatatcgggcagatgctgttgacgcgtgcggatatggaagacagagagcgctttctgaacgcccgcgatacgctacgtgcattactggataaccatattgtgccggttatcaatgaaaatgatgccgttgcgacagcggaaattaaagtgggcgataacgataacctctccgcgctggcggctatcctggcaggcgcggataaactgctgctgctgaccgatcagcaaggattatttaccgccgatccgcgtagcaatccgcaggcggagcttatcaaagatgtgtatggcgttgacgatgcgctgcgctctatcgcgggagacagcgtttccgggctgggaaccggtggtatgagcactaagcttcaggcggcagacgtggcctgtcgcgcgggtattgatacgattattgcctcaggcagtaaaccgggcgtgatcggcgatgtgatggaggggatttccgtcggcacccgttttcatgcgcaagcctcgccgctggagaaccgcaaacgttggatcttcggcgcgccgccggcaggtgaaattacggttgatgaaggcgcgaccgcggcaatgctggaacgtggcagttcacttctgccaaaaggcatcaaaagcgtgacgggcaatttctcgcggggggaggtcatcagaatttgtaacctgcaagggcgtgatattgctcatggcgtcagccgttataacagtgatgctctgcggcggatagccggtcaccactctcaacaaatcgatgcgattctgggctatgaatatggcccggtcgctgttcatcgtgatgacatgattactcgataa

SEQ ID NO: 372306 - DNA, 1248 bp, Salmonella enterica
atgctggaacaaatgggcattgctgctaaagcggcgtcgtataagctggcgctgctctccagcggcgaaaaaaatcgcgtgctggaaaaaatagccgatgaactggaagcgcaaatggaaagtatcctcagcgcgaacgtacaagatgttgagcaggcgcgagccaatggcctgagcgaagcgatgctggaccgcctgacgctgacccctgcgcgtctgaaagcgattgctgacgatgtgcgccaggtctgtaatctcgccgacccggtcgggcaggtgatcgacggcggtctgctggacagcgggctacgtatggaacgccgccgcgtgccgttgggcgtggttggcgttatctatgaggcgcgtccgaatgttaccgttgatgtggcttctttgtgtctgaaaaccggtaatgcggtgattctacgcggtgggaaggagacgtatcgcacgaatgccgcaaccgttcgtgtcattcagaaggcgctgaaagcttgcggtttaccggaggcggcggttcaggcgattgataatccggaccgttcgctggtcaatgaaatgctgcgtatggataagtacatcgatatgctgatcccgcgcggcggcgcaggcttgcataaactgtgccgcgagcaatccaccattccggtgattaccggcgggattggcgtgtgccatatttttgttgatagcagcgcagacatcgccccggcgctgaagattattgttaacgccaaaacccagcgcccgagcacctgtaacacggtggaaaccttgctggtgcatcaggacatcgcagaacgctttttgcctgcgctgagcaagcagatggcggagagcggcgtgacgttgcatggggatgaaaccgtcatgcaactgcatggccctgccaaactggtgccgctgaaaccggaaaagctggataacgagtttctgtctctggatctgaacgttgtggtggtcgaaaatatggatggcgctatcgctcacattcgcgaacatggtactcagcactccgatgcgattttgacgagtgatatgcataatgctgcgcgtttcgtgaacgaagtggattccgctgcggtttatgtcaacgcctctacccgttttaccgatggcgggcagtttgggcttggcgcagaagtggcggtcagcacgcagaaattacatgcccgcggtccgatggggcttgaagcgcttaccacctataagtggatcggctttggcgatggtacgattcgtgcgtaa

SEQ ID NO: 372307 - DNA, 270 bp, Salmonella enterica
atgcctttaaacgatatgcagattcgccgcgctaagcctgaaactaaagcctatacactcggagatgggcaagggttgtcattgctaattgaacctaatggaagcaagagctggcggttccgttatcgttttgccggtaagccaaaaatgatctcgctgggtgtgtatccgacgatcacacttgcagatgccagttctcgtcgtgatgtcacccacccacttctgattcgggccgctggtgtaaaagtcctgcttcagccaattctctga

SEQ ID NO: 372308 - DNA, 453 bp, Salmonella enterica
atgaagaaaaacatattaatgatggtttttacagtaattgttttatttggaggagttattgcttggctttatcattcaaatgatagtttggaaaatgtgagtgcgaatagtgatatagcacatctaaccaagttagcagaacagggggatatgaaagcacaaacagatctggggcttgcttatgggagtggtaacagtatcccacaggattacacaaaagcaatgtattggtataatcaggctgcaaaacaaggttacgcaccagcacaatttaatctcggtcttttctatgaaaatggttggggtggaagcagagatcttcaattagcaaaagaattttaccgtaaggcggcaaatcaaggctttaccaatgctcaaataaatttaggcattctattcatggatggcaaaggggggggattgattatgttcaagccagaaaattatttataa

SEQ ID NO: 372309 - DNA, 471 bp, Salmonella enterica
atgataaagataagccctccctgcttaatgaaattttatgtattttctttgcatcttcaaaaaatcattaaaaatacattattgttgcttgtctgtattttaccatttttttgcgatgcgaaaatgctatttttccgtattccttttcgtattcaaacctatacaccaataacaagggggggaattaaaagacttgcagtgaaaggaggggtgcaagaattgctgcaacgaaatcatggaaaagtattagcattactaagcccacatgggaataaatgttatctattcgatgatgaaaacattagaatatatatatatgaagataatcacgaatatttcatagataacaaaggtgtagtgttattcaagaataaaaaaaactataaatgctcaaaaaataaaattaatgagaatgaaatcgttatgttattgaacgatggaaatgtagatacatgggagaaagatgaataa

SEQ ID NO: 372310 - DNA, 255 bp, Salmonella enterica
atggaacatacatgctacgatccctccgaatatactttctatattgaaatagattctgaccatgccgcatgccaatatcaaggaaaaggtaaagcatgcaaactgacacctacgccattaagtgtagttatcgcccacgaaatggggcatgcaatgggtgaaaatgacgacggaccaggacatatgaataatgtcaaaaaacatgagaaccctgtccgcaaagaaatgggaatcccaccaaggatgaaatactga

SEQ ID NO: 372311 - DNA, 1392 bp, Salmonella enterica
atgagtcaggacgcactcacgcacattattgttaccggccaggatccgcgcggcctgccggagttcagcgccctgcgggaagagatcaacaaatcgtctcacccgtcgcagccggagctgaactggaaactggtggaatcgctggcgctggccatttttaaagcccatggcgtggatctgcacacggccacttattacaccctggcgcgcacccgcacgcacggcctggccggattttgcgaaggggtggagctactggcggccatgataagccacgactgggacaaattctggccgcaggatgagtcagcccgcaccgggatgcttgactggcttaattcgcgcaccggcaatattctgcgccagcagctgtccttctccggcgcggacctgccgttgctgtaccgcaccgaacgggcgttacagttgatttgcgacaaactccagcaggtggaactgaaacgccagccgcatgtggagaacctgctttattttgtgcagaacacacgtaagcggcttgagccgccgccgaaaagcagcgtggacattccgccgcagaccaccgtcagaacgttgatctacgccccggagagcacgcagcccctcacggcggaaaaccttccgcccctgcctgagttgccggaaatgaaggtggaagtccaccacggcgcggtggaggatccagagcctgtcgccagggccacgtcaggccggactataaaaggctttatggccggtgtcgtctgcgctgcggctgtcgcagccgcactctggtggtggcaggtgtacccgatgcaacagcaactggcgcaggtaagggacacggcgcagggcgcggcaatgctctggctggcctcgcctgaactggacagctacgggcagcggttacaacagcttcccgacgcctcgccgctgcaactgctggaggcggggatgcagatgatgcataccgcagacagccgctggccggagagtctgcaacagcagcaggcaacagcgcagtggaatgaaatcctgaaaacccgcgcgcaaagcagcccacaaatgcgcggctggcagcaggcgcgccagaatctgcgtgactttgctgacctgatgatgcagcgggaaacggagaagcagggctttaccctctcctatattaaaacggtgacctggcaggcggaacgcctgctgaaccaggaaacgccgctggagtccctgctgacgcagtaccaagatgcccgcgctcagggacggaatgcggaggtgctggaaaaacaaattaatgaacggctggatggggtgttaagccgctggctgttgctgaaaaacaatgtagtgccggaaacggcaactaaagcccccccgaaaataatagttaaatcaaggagattaacatggccaatttaa

SEQ ID NO: 372312 - DNA, 480 bp, Salmonella enterica
atggccaatttaatttatttaacactgaacggtgaaaagcaaggattgatttcagcaggttgttgttcccttgactctatcggtaataaagcacagttactgcaccttgatcatattatggtatatgaactgacacatgggttaagtcgggatcaaaatgtcaatcatcattcagttacgataaaaaaacctgtcgataaatcatctcctttactgggaaaagcaattaacgataatgaaatattgacctgcacttttgatttttatcgaacaaatcgatttggtattaatgaaaaatattacaaactggaattaaaaaacgcccgaattagtgatattaatttctcgattgcgcatgtagtcattgacagtgaagcacaacctcaggaaagtatttcttttatatatgaatccataaactgggaacactgtattgccgggaccagtgcattcagtttatgggatgagagggtgttttag

SEQ ID NO: 372313 - DNA, 873 bp, Salmonella enterica
atggtaaatcgcacagcatcggcacacaaaggcatcccaacaacagaaaatccgagggaaagaccccaggtaaatacccggacaacagggaaagggtctggacaccctcccaaaaaactcagtcctcttgatgagtggaaggctggccgggaaaaagcgattggcaatcctgactggtatatttatgataatacaatcaggaaacttgtatctgagattaatcggcatttatcaacatctaaaaacatcgaaaaatataagccgctggactggaaattgattaaggcaatgatatggactgaaacaggtgcggcggtaacggcgtggaaaacgagaccaatacagataggaaacacaggagatgaggggatcaaagaagtggttattcctgctcgccctagaaagtacaacatcataattccgaaaacatggaacacatatttaatcaataagacagatcttataaggagcaatccagaatataacatccgggcgggcattgctcttttaatgataaaaatgtcagaaacagaaaaagataaaattgtttatgacaatgaaaatgaagatacctatgaagttgttgagggtgatcgtggttatagctccatagccaagaaaataggtacaacacagagtgttcttactaaactgaatggcgttaaagtcattcaccccggagataaacttaagtataagaaagcgcatctggaacagtatataccaggatggcttttatttacacctgaaaacattcaaaaacaatataatatagacccaacaaaagcacaacctggtcatagaggggatcacacctatgcggataaaatcagattcacatacgctctcattgtcgcagatgagagtaaataa

SEQ ID NO: 372314 - DNA, 441 bp, Salmonella enterica
atgaacataaaaaaaattctatgtctttttcttatatgtggtgcagccaatgcgcataacatcgatcctgcgaaatgcaataatgagatacaacaggatgacgtctattggtgccttatggataaataccagcaaagtgttatcgctttaaaaaaagaagaaattaatgcacaaaaaaggctggaaagattcgataaaaatgaaggaaaggaaagaggccttaatgaagatgggactcttgcatacgattctaacattcaccttgcaagaataaccttccccgaacttcatcgttattttatcatttacagggaaaaacaatgcggctatgcatcacttagtattggatcgctttccggttatagggttccaatatcttcattatattgtaaaaccgagatgaatatttcacaaataaaatggcttaacgattatatatag

SEQ ID NO: 372315 - DNA, 372 bp, Salmonella enterica
atgcgcaagaagttccttattataattaatttcattatggcatttttttactgtaactatttatttgcagaaaatgttaaccatatcgttatttatgatatgccgcaagacttacgggatttttttgaaaccgctgattcctgtgaaggatggataagggattttgatgttcgtcaagaaaaattgacttatcagtttgtagaggattcgattaaaagagactgctcaaacattgaaaataaattactctcgatgaaaaacaaatacaagaataataaagattattcagcaagactaacggtctatgatgataccatcataatatatgacgagtataaaaagacgcaaataaaaaatgaaagtaatgagtga

SEQ ID NO: 372316 - DNA, 459 bp, Salmonella enterica
atgattagtattgcacggatttttataatattagccacgttgatatttagcttttcctcaatccatagtacatatgcaaataatgtttattatcccagtaagaacaactgtgaatcaggagaagaggcggaacttgtcgactgcctgagaaatgaagtacttgaaagcactataacgctgagaaaggccgaagaaaatatcagattacgtataaacaaatggtctgaagtcaaaaatgcagcactggatgatgctatcccgattgcactctacagactggataaatctaatcaagagtttattcgttatcgtcttgctcagtgctcgtttgcagaatcatggggaaatggtgtggggagttttactcgcatatatttctgtatggctgaactaaacaaacaaagagccgaacaattgatgcatgctgatattcctaattatacagaggatacgaaataa

SEQ ID NO: 372317 - DNA, 699 bp, Salmonella enterica
atgacccgtttactgttatgctttttactttttgtgtgcaactcatcatattcacgcgaggagccagaatattcaaaaacatataccccagacgagtattattatttatcttctaaaatcccaaaagaagttcgtcaactgataatgaacgtaaatatggccccccccctcgccgccatattcaagaaagagctcgtacagaagtacgggctttttgcttatatatcccccaaaccaaggggggatgagaaccaccgaccggggttcgacacaaaaacgccgggagcgtttttgaacagagcttgctctggccccgaaggggcgaggtccagggatgggctgagtagcggcgcagccagctggacagacgacgagcctgcgaggagactgcccgaagggcgagcgaagcgagtcaattcccccttaccggcatcttcaaaaaagagcctgtacgaaagtatcagacgactgacaaaccttgatgccgaaatgcgcttcgcttttccaactgccaaaaccatcgttcccggaggttgggtggaacggcgcgtaacccaacattcatacccaataccgcaatgttgggtttcggtttcgcctcacccaacgttgccacgtcggataatgtgtaaccgcacaacaggtttgtcatcaagctcggcttttttcgcatattgcaattcagccaacctcacataa

SEQ ID NO: 372318 - DNA, 219 bp, Salmonella enterica
atgctagcactctatgcagagacgcgaaaaattttaatgtctggaattatggaaacgaccttccttagtgggccgttcttctatgcgccaggagacgccgccagtaatcttgatgaactttatgtgaggttggctgaattgcaatatgcgaaaaaagccgagcttgatgacaaacctgttgtgcggttacacattatccgacgtggcaacgttgggtga

SEQ ID NO: 372319 - DNA, 294 bp, Salmonella enterica
atgagtgtgctttgtgtggttgtcttaacctacgtaaaaccattgcatgaaattgatgcgcaaatccctgcacatgtggaatggctaaaaaaaggttatgccgatggactttttctggcttccgggcgaaaaattccgcgcacaggaggcgtaatacttgcaaactatgatgacgcggatgtactgcaaaactatctggcacaagatccttttcgcttgtctggcgtagctaaagtcgatttgattccttttgaacccacaatgatggtcacggaattaaaagcggtcttataa

SEQ ID NO: 372320 - DNA, 1104 bp, Salmonella enterica
atgacgaaatacggtgttgtaggtacaggttattttggcgctgaactggcgcgatttatgtctaaggttgaaggggcgaaaatcactgcgatttacgatccggtaaatgcggctccgatagcgaaagagttgaactgtgtcgccactgcaacgatggaggcgctttgttcccatcctgatgtggattgcgtaattattgcttcaccaaattacttacataaagcgccagtcattgcggcggctaaagcgggtaaacacgtgttttgtgaaaaacctatcgccttaaattaccaggattgtaaggatatggttgatgcctgcaaagaagctggtgttacctttatggcgggtcacgttatgaacttttttcacggggttcgccacgctaaagcgctcatcaaagctggtgaaattggtgaagttacacaagttcacactaaacgtaatggttttgaagacgtgcaggatgagatctcatggaagaagattcgcgcaaagtcaggtgggcatctgtaccatcacattcacgagctagattgtacactgttcatcatggatgaaaccccatccctggtttcaatggcggcggggaatgttgcgcacaaaggtgaaaaatttggtgatgaagatgatgttgtcctaatcacccttgagtttgaaagcggtcgtttcgcgacacttcagtggggatcatcgttccactaccctgagcactatgtattaattgagggcacgacaggtgcaattctcattgatatgcaaaacacggctggttatctaataaaagcgggcaaaaaaacacactttcttgtgcatgaaagccaggcggaggatgatgatcgtcgcaacggtaacatatccagcgagatggatggcgcaatcgcttatggtaaacccggtaaacgtacgccgatgtggctctcatcaattatgaaactggagatgcagtacttgcatgatgtgataaacggtctggagccaagcgaggagtttgctaaattgctaacgggagaagcggcgacaaatgctattgctaccgctgatgctgcgacgctttcctcaaacgaggggcgcaaagttaaactcactgaaattcttggctaa

SEQ ID NO: 372321 - DNA, 1281 bp, Salmonella enterica
gtgatagcaaaattcttcccgtggtatagcgagataacacgtccacaaaaaaatgctttattttcagcatggctgggttacgtttttgatggcttcgactttatgctgattttctacattatgtatctgatcaaggctgacttaggattgacagatatggagggcgcattccttgccacagcggcctttattgggcgaccatttggcggggcgctatttggtctgctggcagacaaatttggccgtaagccgttaatgatgtggtcgatagttgcctattctgtaggtacagggttaagtggcctggcttccggtgtaattatgctgacgcttagtcgcttcattgtcggtatggggatggcgggggagtatgcttgcgcttctacttatgccgtggaaagttggccaaagcatttaaaatctaaagcgagcgcatttctggtttcaggtttcggtattggtaacatcatagcagcctattttatgccgtcatttgccgaagcgtatggttggcgtgctgctttttttgtcggtttgctacccgttcttttagtaatctacatccgggccagggctcctgaatctaaagagtgggaagaagctaaactcagtggtcccggaaagcattcacaaagtgcctggtcagttttctctttgtcaatgaaagggctatttaatcgagctcaatttccactgacattatgtgtatttattgttctgttctctattttcggcgcaaactggccgatctttggtctactgcctacatatttggcgggagagggctttgatacgggcgtggtctctaatttaatgacggcggcggcattcggcactgtattgggaaatatcgtttggggtctgtgcgcagatagaattggtttgaagaaaacgttcagcattggtcttctcatgtcctttttattcattttcccgttattcagaattccgcaagataattatttactgctgggcgcatgtttattcggtttaatggcgactaacgtaggtgttggcgggttggttcccaaatttctctacgactactttcctcttgaggttcgtggtttgggtaccgggctgatttataatcttgctgcgacatcaggcacattcaattcaatggcggcgacctggcttggaataacaatggggctaggcgctgcgctaacgttcattgttgctttctggaccgcaacaattctactcattattggcctatccattccggatagactaaaagcacgtcgtgaaagttttcaatcaacaaaagaattttaa

SEQ ID NO: 372322 - DNA, 693 bp, Salmonella enterica
atgaaaatcaacaaatatcttctgggtatggtttcgtttatagcattttcatcatatctacaagcggcaacccttgattatcggcatgaatatgctgatagaaccagaattaataaagaccgtattgctataattgaaaagcttcctaacggcattggtttttatgtcgatgccagcgttaaatcgggaggagtagatggtgagcaggataagcatttaagcgatctcgtcgcaaacgctatagaactgggcgtaagttataattataaagttacggacaattttgttttgcagcctggatttatatttgaaagcggtccagacacttcaatttataagccttatttaagggggcaatataattttgattctggtgtttatatggctggtcgttaccgttatgactatgcaaggaagacagctaactatagtgatgatgagaaaacgaatagatttgatacttatataggttatctttttgatgagttgaaattagaatataactttacctggatggatagcgatcaaattaaatttgataacaaaaaaacaaactatgaacataatgtggctttagcctggaaactgaataagtcatttacaccatacgttgaggtcggaaatgtagcggtgagaaataataccgatgagagacagacccgttatcgcgttggattacaataccacttttga

SEQ ID NO: 372323 - DNA, 1143 bp, Salmonella enterica
atgaaaaattttaagaaaatgatgacgctaatggcgctatgtttatcagtcgctatcaccacatcaggatatgcaacgacgcttcctgatataccagaaccactgaaaaatggtactggcgctattgataataatggcgtgatttatgtcggcttaggtaccgcagggacatcctggtataaaattgatcttaaaaagcaacataaagactgggagcgtataaagtcgtttcctggtggagctcgtgagcaatcagtgtcggtatttttaaatgatgagctttatgtttttggtggcgtagggaaaaaaaacagtgaatcaccgttgcaggtttatagcgatgtgtacaaatactcaccggtgaaaaatacatggcaaaaagttgacactatatctccagttggattaacagggcatacgggagtaaaattaaacgaaacgatggtacttattaccggaggggttaatgagcatatctttgataagtattttattgatatagaagctgcggatgaaagtgaaaaaaataaagtcatctataattattttaataaacctgccaaagattatttttttaataaaatcgtatttatctacaatgctaaagagaacacatggaagaatgccggtgagctgccaggcgcggggacggcaggatcgtcatcggtaatggaaaataatttcctgatgctgattaatggtgagctcaaaccgggtttacgtaccgatgtgatttaccgcgccatgtgggataacgataagctaacatggttgaagaacagccagttaccgccatcgcctggagaacaacagcaagaagggttggccggagcattttcgggctatagtcacggtgtcctgcttgtcggtggtggcgcgaattttccgggagcaaaacaaaattataccaatggaaagttttattcccacgaaggaataaataaaaaatggcgagatgaagtctatggtttggttaatggccattggcaatatatgggtaaaatgaaacaacctctcggctatggtgtatcagtaagttatggtgatgaagttttccttattggtggtgaaaatgctaaagggaaacctgtttcgtctgtaacctcctttaccatgcgtgatggtaatttattaataaaataa

SEQ ID NO: 372324 - DNA, 681 bp, Salmonella enterica
atgtcactattagccaggctggaacaaagtgtacacgaaaacggtgggctgattgtctcatgccaaccggtaccaggcagccctatggataaacctgaaattgtggctgcaatggcacaggcagcggcttcggcgggtgcggtcgctgtgcgcattgaaggcattgagaatctgcgggctgttcgtccccatctttctgttcctattattgggataattaaacgtgaccttacagggtcgccagtccgtatcactccctatttacaggatgttgacgccctggcgcaggcaggtgccgatattatcgcttttgatgcctcattccgctctcgcccggttgatattgatagtttactgacacgtattcgcctgcatggattactggcgatggcagactgttcaaccgtgaatgaaggcataagttgccatcagaaaggaatcgaattcattggtacaacactgtctggctataccggccccatcacgccggttgagccagatttggcaatggtgacacaactgagccatgcaggttgtcgtgttattgccgaggggcgctataacacgcctgcactggcggccaatgctattgagcatggtgcctgggcagttaccgttggttccgctatcacccgtatcgagcatatctgtcagtggttcagtcacgcagtaaaacgctga

SEQ ID NO: 372325 - DNA, 1026 bp, Salmonella enterica
atgattacacattctttcggcatcgttaactatcttgtattatttggctacctcctggccatgatgttagtcggtgtctatttttccagacggcaaaaaacagcagacgattattttcgcggtggtggccgggttcctggttgggcggctggggtcagtgtatttgctactacgttaagctcaattacatttatgtcaattcctgccaaagcgtttacttccgactggacgtttatcattggtcagtatctggctatcgcaattttaccgctggttttttatttctatattccgttttttcggaaattgaaagtcacatcagcctatgaatatctcgaagcacggttcgatgtgcgctgccgtctattcgccagcatgtcatttatgttgtttcatatcggacgtatcgccattatcactttcctcaccgtgctggccttgcgccccttcatcgctatagacccggtgattttggtactgttgattagcgtgatgtgtatcatttatacttggatgggtggaattgaaggagtaatatggactgatgttattcaaggcctcttactttctggcagcgcgatactgatttttatagtgatatgtctcaaagtccagggcggcattggtgaaatttttacggtgacgcagcaggcggataaattctttccggctacgcagttccactggagctggacggaaagcacagtacctgtattgatgattggttttctgtttgccaatattcagcaatttactgccagtcaggatgtggtccaacgctatatcgtgactgactccatagaggaaacgaagaaaacattacttacaaatgccaaactggttgctgtgatccctgttttcttttttgctatcggctcggcattgtttgtctactatcagcaacatccacaattattaccggcgggattcaacactggcggcattttgcccttattcgtggtcaccgaaatgccagtcggcattgcagggttgataatcgccgctattttcgctgctgcgcactga

SEQ ID NO: 372326 - DNA, 1590 bp, Salmonella enterica
atgcaacaacgtcgtccagtccgccgcgctctgctcagtgtttctgacaaggccggtatcatcgaattcgcccaggcactttccgcacgcggtgtggagctgctgtctacggggggcaccgcccgcctgttagcagaaaaaggtctggcggtgaccgaagtttccgattacaccggtttcccggaaatgatggatggacgcgtaaagaccctgcatccaaaagtccacggcggcatcctcggtcgtcgcggccaggacgatgccattatggaacagcaccacatcgcccctatcgatatggttgtcgttaacctgtatccgttcgccgaaaccgtggcacgcgttggctgctcgctggaagatgcggtagagaacattgatatcggtggcccaacgatggtgcgctccgccgcgaagaaccataaagacgtggccatcgtggtgaagagcagcgactacgacgccattattaaagagatggatgctaacgaaggttctctgaccctcgacacccgtttcgatctctcgattaaagccttcgaacacaccgccgcctacgacagcatgatcgctaactacttcggcagcatggttccggcctaccacggtgaaagcaaagaagccgccggtcgcttcccgcgtacgctgaacctgaacttcattaagaagcaggatatgcgctatggcgagaacagccaccagcaggctgccttctatatagaagagaatgtgaaagaagcgtccgttgccaccgcacaacaggttcagggcaaagcgctttcctacaacaacatcgccgataccgacgcggcgctggagtgtgtgaaagcgttcaacgagccagcctgcgtaatcgtcaagcacgctaacccgtgcggcgtggcggtaagtacctctattctcgacgcttacgatcgcgcctataaaaccgacccgacctccgcgttcggcggcattatcgcctttaaccgtgagctggatgcggaaaccgcgcaggccatcatctcccgccagttcgtggaagtgatcatcgccccatctgcgaccgaagaagcgctgaagatcactgccgctaaacagaacgttcgcgtcctgacctgtggccagtgggcacagcgcgtaccgggcctcgactttaaacgcgttaacggcggcctgctggttcaggacagggatctgggtatggtgagcgaagctgaactgcgcgtggtctctaaacgccagccgaccgagcaggagctgcgcgatgcgctgttctgctggaaggtcgccaagttcgtgaaatccaacgccattgtgtatgcgaaagagaacatgactatcggtataggcgcaggccagatgagccgcgtgtactccgcgaaaatcgctggcattaaagcggctgacgaaggtctggaagtgaaaggttccgcgatggcctccgacgcgttcttcccgttccgtgacggtattgatgccgctgccgccgttggcgtgagctgtgtgatccagcctggcggttctatccgtgatgacgaagtgattgccgctgccgacgaacacggtattgcgatgatcttcactgacatgcgccacttccgccattaa

SEQ ID NO: 372327 - DNA, 1290 bp, Salmonella enterica
atgaaagtattagtgattggtaacggcggacgcgaacacgcgctggcctggaaagccgcacagtcgccgctggttgatactgtttttgtcgcaccgggtaacgccggtaccgcgctggagcccgcgttgcagaacgtggctatcggcgtcaccgatattccggcgctgctgagctttgcccagcacgagaagattgacctgaccatcgttggcccggaagcgccgctggtgattggcgtggtcgatgcgttccgcgcggcgggtctgaagatctttggcccaaccgaaggggccgcccaactggaaggctccaaagcgttcaccaaagatttcctcgctcgtcaccagattccgacggcggaataccagaatttcaccgagattgagccagccctggcttatctgcgtgagaaaggcgcgccgatcgtcatcaaagccgatggtctggctgcgggcaaaggcgttatcgtggcgatgacgctcgaagaagccgaagccgccgtccatgacatgctggcaggcaacgcctttggcgatgcgggccaccgcatcgtgattgaagagttcctcgacggcgaagaagcgagctttatcgtgatggtcgacggcgagcacgtgctgccgatggccaccagccaggatcacaaacgcgtgggcaacggcgataccggcccgaacaccggcggcatgggggcttactctcctgctcccgtggtcactgatgaagtgcaccagcgcaccatggaacgcatcatctggccaaccgtgaaaggcatggcggcggaagggaatacctataccgggttcctgtatgcgggtctgatgatcgacaagcagggcaacccgaaagttatcgagttcaactgccgcttcggcgatccggaaacccagccgatcatgctgcgcatgaagtcggatctggtggatctttgcctggccgcctgcgacggcaagctggatgagaaaacctccgagtgggacgagcgcgcttcattaggcgtggtgatcgccgcgggcggttatccgggcaactacaacactggcgatgagatccacggcctgccgctggaagaagtggctgacggtaaggttttccacgcgggcaccaaactcgccgatgacgaccgtgtgctgaccagcggcggtcgcgtactgtgcgccaccgcgctgggccacaccgtggctgaggcgcagaaacgcgcttacgccttgatgaccgacatccgctgggacggcagcttcagccgtaacgacatcggctggcgcgccatcgagcgtgaacagaactaa

SEQ ID NO: 372328 - DNA, 1326 bp, Salmonella enterica
gtgatacgcggaaaaatcgatattctggttgtggatgatgatgtaagccactgcacgattttacaggcgctgcttcggggctggggctataacgtcgctctggcctacagtgggcatgatgcgttggctcaggtgcgtgagaaagtctttgatctggtactgtgcgatgtgcgtatggcggagatggacggtatcgctacgctgaaggagattaaagcgctcaaccccgccattccgattttgattatgacggcattctccagcgtggaaacggcggtagaggcgttgaaagccggcgcgctcgactatttaattaaaccgctggattttgaccgtctgcaggagacgctggaaaaggcgttggcgcatacgcgggaaacgggcgctgaattgccatcggcgtcggctgcgcagtttggcatgattggcagcagcccggcgatgcaacatttactgaatgaaatcgcgatggtcgcaccatcagacgccacggtattgattcacggagactccggcacgggtaaagagctggtggcgcgggcgctacacgcctgtagcgcccggagcgataaaccgctggtcacgctcaactgcgcggcgcttaatgaatcgctgctggagtccgagctgtttggtcacgaaaaaggtgcgtttaccggtgcggataaacgtcgggagggacgctttgtcgaagctgacggcgggacattgtttcttgatgaaatcggcgatatctcgccgttaatgcaggtacgtttgctgcgggcgattcaggagcgcgaagtgcaacgcgtgggaagtaaccagacgatatctgtggatgttcggttaattgccgctacccaccgcgatctggcggaagaggtgagtgctggtcgttttcgccaggatctctattaccgcctgaatgtggtggcgattgaaatgccttctttgcgccagcgtcgggaagatattccgctactggcagaccattttctgcggcgttttgccgaacgtaaccgaaaagcggtaaaggggtttacgccgcaggcgatggatctgctgatccactacgactggccgggcaatatccgtgagctggaaaacgctatcgagcgggcggtggtgttgctgacgggagaatacatttctgaacgcgaattgcctctcgctattgccgcgacgccgataaaaacggaatacagtggtgagatccaaccgctggtggacgtcgaaaaagaggtgattctggcggcgctggaaaaaacgggcggcaacaaaaccgaagccgcccgtcaattgggcattacgcgcaaaacgctgctggctaaactcagccgttag

SEQ ID NO: 372329 - DNA, 1587 bp, Salmonella enterica
ttgtcgggcagcgagttaacccgcttcaggcggcaaaaagcgagtaaaaatgactcgcatgacccgcctggcgagtcatttttacccatccgtatccgaaagggtgtgcggcaacgcgcggttatgcggagcgaagaatggcatgatctctgcttaagtaaggaaaataaaaacgagccggggaagcctgtgagttttatacgattacataaagatgccgctgcaacgtggttgagtcggctgttacctgcggcgatcttcattctggtggggctattttccattatggtcattcgcgactatggccgtgagagcgctgccgccaggcagacgctgctggaaaagggaaatgtactcattcgcgctctggagtccggcacgcgagtaggtatgggaatgcggatgcatcacgcgcagcagcagacattgctggaagagatggcgggtcagccaggcgtgttgtggttcgccgtaacggatgcgcagggggtaatcatcactcatagcaaccctggcatggtgggcaaatcgctctattccgcatctgaaatgcatcaactaaaccccgggccgcaggagcgttggcggcgtgtcgacgttgctgctaacggcgagacggtgcctgcgctggaaatttaccgtcagttccagccgcttttcggtatgagaggtcacggtatgagggggcacggcatggcgcgtagcgccaatgacgacgaaccagcgaaacaaactatttttattgcctttgacgccagcgagctggccgcgacacaggcaagggagtggcgtaatacgctgattgttttgtctgcgttagcgacggtgctgttggcaacgttactggcgtttttttggcatcagcgttatcagcgctcgcacagagaactgcttgatgcaatgaagcgtaaagaaaagctggtggcgatggggcatctggcggcgggcgtcgcgcacgaaattcgtaacccgctctcgtccatcaaagggctggcgaaatactttgccgagcgcacgcctgccggcggcgagtcgcatgaactggcgcaggtgatggccaaagaggccgaccgtttgaaccgggtggtaagcgaattgctcgaactggtaaagcccgcgcatctgacgctccaggcggttaacctcaatgatattattactcactccctgaatctggtcagtcaggatgcccaaagcagagagattcagttgagattcacggcgaatgagacgcttaagcgtattcaggctgacccgaacaggctgactcaggtgctattgaatttgtacctgaacgctattcatgcgattggccgccagggaacgattaccgtagaggcaaaagaaagtgggaccgaccgcgttatcatcactgttaccgatagcgggaaagggatcgccccggatcagttggaggcgatttttacaccttattttacgaccaaagctgacgggacaggcctggggctggcggtggtgcaaaatatcatcgaacagcatggcggcgcgattaaggtgaaaagtattgagggtaaaggcgcggtctttactatctggttgccagtgatagcgagacaacaggattaa

SEQ ID NO: 372330 - DNA, 456 bp, Salmonella enterica
atgaaacggaacaataaatcagctatcgcgctaatcgccctctctcttttggccctgagctccggcgccgccttcgccgggcatcactggggcaacaatgacggtatgtggcaacagggaggtagcccgttaactacggaacagcaggcgacggcgcagaagatttatgatgattactatacgcagaccagcgcgctgcgccagcaactgatatccaaacgttatgaatacaacgcgctactgaccgccagttcgccggatactgcgaaaattaacgcggttgccaaagagatggagtcattaggccagaagttagatgagcaacgcgtgaaacgggatgtcgcgatggcgcaggctggcataccacgcggcgcaggaatgggctatggcggttgcggcggctatggcggcggttatcatcgcggcggcggtcatatgggtatgggaaactggtaa

SEQ ID NO: 372331 - DNA, 693 bp, Salmonella enterica
gtgaacagttttatcgaaggggctcgtcagccccttttgtctgtctggcgtcgcgcgtttctgttttctggcgcgctgttgctgactgcctgcagtcataacgcttcaccgcctccgtttactgccagcggctttgccggcgatcacggcgcggtgcgtatctggcgtaaagatacgaacgatgaagtccatctgctttctgtttttagcccgtggcatagcggcagcacgacgaccagcgaatatcgttggcagggtgatacgctttcgcttattgaactcaatatttacagcaaaccgccagaacatattcgcgcgcgtttcgacgctcatggcgaactcagttttatgcagcgtgaagtcggggggcagaagcagcagctttccaacgatcagattgccttgtatcgctatcgcgccgaacaaatccgtcagaccagcgacgccttgcgcctggggcgggtcatactacgccagggacgctggcacgccgaccatacggtaaccacctgtgaaggtgaaacgctgaaaccggatctggattcctgggcaataagccacattgagcgccgccagaaccactcatcggtagaggtgagcgtagcatggctggaggcgccggaaggatcgcaacttttgctggtggcgaattcagatttctgtcactggcagccgcaagcgaaaaccttttga

SEQ ID NO: 372332 - DNA, 273 bp, Salmonella enterica
atgaacaagactcaactgattgatgtaattgcagacaaagcagaactgtccaaaacccaggctaaagctgctctggaatccactctggctgctattactgagtctctgaaagaaggcgatgctgtacaactggttggtttcggtaccttcaaagtgaaccaccgtgctgagcgcactggccgtaacccacagaccggtaaagaaatcaaaatcgccgccgctaacgtaccggcgtttgtttctggtaaagctctgaaagacgcagttaagtaa

SEQ ID NO: 372333 - DNA, 591 bp, Salmonella enterica
atgttacaaaacccgattcatttgcgtctggagcggctggaaagctggcagcacgttacctttatggcctgcttgtgcgagcgcatgtacccgaactacgccatgttttgcaagcagacggaattcggcgacggacagatctaccgtcgcattctggatctgatctgggaaaccctgacggtgaaagatgcaaaggtcaatttcgatagccaactggagaagtttgaagaggcaattccggcagctgacgactatgatctgtacggcgtttacccggcgattgatgcctgcgtcgcattaagcgaattaatgcattctcgccttagcggcgaaacgctggaacacgctattgaggttagtaagacttccattactacggtagcgatgttggaaatgactcaggctggtcgggaaatgaccgatgaggagctcaaaacgaaccctgccgttgaacaggaatgggatattcagtgggaaatattccgacttttagccgactgcgaagaacgtgatattgaactgataaaagggctcagggcagacctgcgcgaggctggcgagagcaatatcggtataaattttcagcaatga

SEQ ID NO: 372334 - DNA, 672 bp, Salmonella enterica
atggatctcgcgtcgctacgcgctcaacagatagaacttgcttcatcggtttgccgcgaagatcgcctggacaaagatccgccagcgtttatcggcggggcggacgtcggttttgagcaggggggcgaggtgacgcgggcggcgatggtattgttgaaatatccgtcgcttgaactggtagagtacaaggtggcacgtattgccaccaccatgccgtatatccccggctttctctcttttcgtgaatatcctgcgctgctggcggcgtgggaacagctctcgcaaaagcccgatttgctgtttgtggacggtcacggtatttcgcatccgcgtcggcttggcgtcgccagtcattttggactgttggtggacgtgccgaccatcggcgtggcgaaaaaacggctatgcggtaaatttgaaccactttccaccgaacctggcgcacttagccccttaatggataaaggcgagcaactggcgtgggtatggcgcagcaaggcgcgctgtaatccgctgtttatcgcgacagggcaccgggtcagtactgacagcgcgctggcgtgggtacagcgctgtatgaaagggtatcgcctgccggagccgacgcgctgggcggatgccgtcgcttccggacgtccggcgtttgttcgttggcaagaaattcagcgctga

SEQ ID NO: 372335 - DNA, 1065 bp, Salmonella enterica
atgaccgaactcaaaaacgatcgttatctacgtgcgctgctgcgccagcccgttgatgttacgccagtgtggatgatgcgccaggcgggccgttatctaccggagtacaaagccactcgcgctcaggcgggcgattttatgtcgctgtgcaaaaatgccgaactggcctgcgaggtcactttacagccgctgcgccgttatccgcttgatgcggcgatccttttctcggatatcctgacgattccggacgcgatgggcctggggctctattttgaagccggggaaggcccgcgctttacggcccctgtcacctgcaaagccgatgtcgataagctgcccattcccgatccggaagatgaactgggttatgtgatgaatgcagtgcgtacgattcgccgcgaactaaaaggcgaggttccgctgatcggcttttccggcagcccgtggacgctggcgacttacatggtggaaggcggcagtagcaaagccttcacggtgattaaaaagatgatgtacgctgacccgcaggcgttgcatctgctgctggataagttggcgaaaagcgtcacgctgtacctcaacgcgcaaatcaaagcgggcgcgcagtcggtgatgattttcgacacctggggcggcgtgctgactggccgcgattaccagcagttctccctctactacatgcataaaatcgtcgatggcctgctgcgtgaaaacgacggtcgccgcgtgccggtaacgctgttcactaaaggtggcggtcagtggctggaggcgatggcggaaaccggctgcgacgcgctgggtctcgactggacgacagatatcgccgatgcgcgccgtcgcgttggccataaagtggcgctgcagggcaatatggacccctcgatgctgtatgcgccaccggcacggatcgaagacgaagtagcgactatacttgctggtttcggtcagggagaagggcacgtctttaaccttggacatggcatccatcaggatgtgccgccagaacatgctggcgcatttgtggaggcagtgcaccgactttctgcgcagtatcacaactaa

SEQ ID NO: 372336 - DNA, 774 bp, Salmonella enterica
atggatcgtataattgaaaaattagagagtggctggtggatcgtcagccatgaacaaaaattatggttgccgtatggggaattaccacacgggctggcggcaaatttcgatcttgtggggcagcgcgcactccggataggtgaatggcaaggcgagcccgtttggctggtgttacagcatcgacgtcatgatatgggatcggttcgccaggttatcgatcaggatgcagggctgtttcaactggcgggacgtggcgtacagttggcggagttttatcgttcgcataaattttgcggctattgcgggcaccctatgcacccgagtaaaaccgaatgggcgatgctgtgcagccattgccgcgaacgctactatccgcaaattgccccctgcattatcgtcgcgatccgccgtgaggattccatcctgctggcccagcatgttcgccaccgcaacggcgtgcatacggtactggccgggtttgttgaagtcggcgaaaccttagaacaggcggtcgcgcgtgaagtgatggaggagagcggcattaaggtgaaaaatctgcgctatgtgacttcccagccgtggcctttcccgcagtcgctgatgactgctttcatggcggagtatgacagcggcgagattgtcatcgacccgaaagaactgttggaagcaaattggtaccgttatgacgatctgccgctactgccgccgccgggcaccgtcgcgcgccgtttgatcgaagatacggtggcaatgtgtcgggctgaatatgattga

SEQ ID NO: 372337 - DNA, 489 bp, Salmonella enterica
atgctaaaccagctggaaaacctgacggagcgcgttggcggaagcaacaaactggtcgatcgctggctggatgtacgtaagcacctgctcgtggcttactacaatctggttggcattaagcctggcaaagaatcgtacatgcggctgaatgaaaaagcgctggatgatttttgtcagagcctggtcgattacctttccgccgggcacttcagtatttatgaacgtattctccataaattggaaggaaacggtcagcttttacatgcggcaaaaatctggccgctgctggaagataatacgcagcgcattatggattattacgacaccagcctggaaactgccatcgatcacgataattgtctcgaatttcaacaagctctgtcagatatcggcgaagcgctggaagcccgctttgtgctggaagacaagctgattatgctggtgtttgacgcgatgcacgacggcgccagagtcaaacgtcccgcttga

SEQ ID NO: 372338 - DNA, 1896 bp, Salmonella enterica
atgtctacaacaacgttaacccgccgcgagcagcgcgctaaagcccagcattttatcgatacgctggaagggactgcctttcccaactcgaaacgcatctacgtgaccggttcgcagcatgatattcgcgtaccgatgcgtgaaattcaactgagcccgacgctcatcggcggcagtaaagacaaccagcagtttgaagagaacgaagccgtgccggtgtacgacacctccggcccctatggcgatcctgaggtggcgattaacgtccagcagggtctggcgaaactgcgccagccatggattgacgcacgtaacgatagcgaagaattagacgaccgtagctcggcttataccagagaacgtctggccgacgatggcctggacgatctgcgttttaccggcctgctgacgccaaaacgcgctaaagcgggcaagcgcatcacccagttacactacgcccgccaagggatcgtcactcccgaaatggagttcatcgccatccgtgaaaacatgggccgcgagcgcatttgcagtgaagtgctgcgccaccagcatccggggatgagctttggcgcgcgcctgccggaaaacattacgccggaattcgtgcgtgatgaagtcgccgcgggccgcgcgattattcccgccaacatcaaccacccggaatcggagccgatgattattggccgcaacttcctggtcaaagtgaatgccaacatcggtaactcggcggtcacctcctccatcgaagaagaggtcgagaagctggtgtggtcaacccgctggggcgcggacacggtgatggacctctccaccggtcgctatattcacgaaacccgcgaatggatcctgcgtaacagcccggtaccgatcggcaccgtcccgatctaccaggcgctggaaaaggtcaacgggatcgccgaagatcttacctgggaagcgttccgcgacacgctgctggagcaggccgaacagggcgtcgactacttcaccatccacgccggcgtgctgctgcgctacgtgccgatgaccgccaaacgcctgaccggtattgtctcgcgcggcggttcgatcatggcgaagtggtgtctctcccatcacaaagagaacttcctgttcgaacatttccgcgagatctgcgaaatctgcgccgcctacgacgtttccctgtcgttgggcgacggcctgcgccccggctccattcaggacgccaacgacgaagcgcagttctccgagctgcatacgctgggcgagctgaccaaaatcgcctgggaatacgacgtgcaggtgatgattgaaggcccgggtcatgtacccatgcatatgattcagcgcaacatgaccgaagagctggagagctgccatgaagcaccgttctacaccttagggccattgactaccgatatcgcgccgggctatgaccacttcacctccgggatcggtgccgcgatgatcggctggtttggctgcgcgatgctgtgttatgtgacgccgaaagagcatctcggcctgccgaacaaagaagatgtgaagcaggggctaatcacctacaaaatcgccgcccacgccgcggatttagccaaaggacatccgggcgcgcagatccgcgataacgccatgtcgaaagcgcgcttcgaattccgctgggaagatcagtttaacctcgcgctcgacccgttcaccgcccgcgcttatcacgatgaaaccctgccgcaggagtccggcaaagtcgcccacttctgttccatgtgcgggccgaaattctgctcgatgaaaatcagccaggaggtccgcgactacgccgccgcgcaagccattgaagtcggcatggcggatatgtcggagaacttccgcgccaaaggcggcgaaatttatctcaaacgggaggaagcctga

SEQ ID NO: 372339 - DNA, 636 bp, Salmonella enterica
atgtatcagcctgatttcccgaccgtgccgttccgcctcgggctttacccggtggtggacagcgttgcatggattgagcgtctactggaggcgggcgtgcgcacgatccagctgcgtatcaaagataaacgcgatgaagaggtggaagcggatgttatcgctgccatcgcgctggggcgtcgttataacgcccgtctgtttatcaacgactactggcgtctggcaattaagcaccgcgcttacggcgtgcatctcggccaggaagaccttgaaaccaccgacctgaaggccattcaggcggcggggttacgcctgggcgtatcgactcacgatgatatggagattgacgtcgcactcgccgctaagccttcttatatcgcgctcggccacgtcttccccacgcaaaccaagcagatgccttccgccccacaggggctggcgcagttggccagtcatattgaacgactggcggattacccgaccgtcgcgatcggcggcatcagccttgaacgcgccacagcggtactggcgaccggcgtcggcagtattgccgtggtcagcgccattactcaggccgccgactggcgcgccgctaccgcgcagttactggatattgcgggagttggcgatgaatga

SEQ ID NO: 372340 - DNA, 759 bp, Salmonella enterica
atgaatgaccgcgattttatgcgctacagccggcaaatcctgctcggcgatatcgtcattgaaggccagcaaaagctgctcgcgagtcatgtactgatcgtaggtttaggcgggttaggttcacccgccgcgctgtatctggcgggagcaggcattggcaaactgacgctggcagacgatgacgacattcatctgagcaatttgcagcgccagatcctgtttaccaccgatgatatcgcgcgttcgaaatcccaggttgcccggcagcgcctgacgcagctcaacccggatatcgaactggtctcgctccagcggcgactaaaaggcgatgcgctccggcatgcggtctcgcgagccgacgtggtgctcgactgtaccgataacatgtccacgcgccaggaaatcaacgccgcctgcgttgcgctcaataccccactcatcaccgccagcgccgtcggctttggcggccagttgatggtgctcatgccaccgtgggaacaaggctgttaccgctgcctgtggccagatgatgtggagccggaacgcaactgccgcaccgctggggtgctcggtccggtggtgggcgtgatgggtaccttgcaggcgctggaggcgattaaattactcagcggtattgaaacaccgaacgggcagctacgtctgtttgacggcaaaaccagccagtggcgcagcctcgcgctgcgtcgcgccagcggctgtccggtatgcggagggcagcatgcaaattcaattcaatga

SEQ ID NO: 372341 - DNA, 174 bp, Salmonella enterica
atgcagtgcgccgcagggcaaaccgtcagcgggctgcttatccagctcaaccagctcaaaccgggcgcagcgttggcgctcaatcagcagatcctgccgcgcgagcagtgggaacagcaaatcgtgcaggaaggcgaccagatcctgctttttcaggttattgcagggggttga

SEQ ID NO: 372342 - DNA, 771 bp, Salmonella enterica
atgttacgtattgccgacaaaacgtttgattcacatctgttcaccggtaccgggaaatttgcctcatcgcaactgatggtcgaggcaattcgcgcttccggcagccaactggtgacgctggcgatgaagcgcgtggatttacgtcagcacaacgatgcgattctggcgccgctcattgaagcgggcgtcacgctgctgcccaatacctccggggcgaaaaccgctgaagaggcgatcttcgccgcccagctggcgcgtgaagcgctgggcacaaactggttgaaattagaaatccacccggacgcccgctggctattgccggatccgatcgaaacgctaaaagccgccgaggcgctggtgaagcagggttttgtggtgctgccctactgcggcgcggatccggtgttgtgcaagcggttggaagaggtcggctgcgcggcggtgatgccgcttggcgcgcctatcggttcgaatcaggggctggaaaccaaaaccatgctggagattattatccagcaggccaccgtgccggtggtggtcgacgccgggatcggcgtgcccagccatgcggcgcaggcgctggaaatgggcgctgatgcggtactggtcaacacggcgattgccgtggcggacgatccggtgatgatggcaaccgctttccgtctggcggtggaagccggattactggcgcgtcaggcggtgccggggaatcgtagcacctacgccagcgccaccagcccgctcaccggctttctggaggccctggcatga

SEQ ID NO: 372343 - DNA, 1134 bp, Salmonella enterica
atgaaaaccttcaccgaccgctggcggcaactggagtgggacgatattcgcctgcgcatcaacggtaaaactgccgccgacgtggagcgcgcgctgaacgccgcgcatcttagccgggacgatttgatggcgttgctctcccccgccgccgccgattatctggaaccgatagcgcagcgggcacaaaggctgacccgacaacgctttggcaacaccgtcagtttctacgtgccgctttatctctcaaacctctgtgccaacgactgcacctactgcggcttctcgatgagcaaccgcattaagcgtaagacgctggatgaggctgaaattgcccgcgagtgctcagctatccgtgagctgggttttgaacatctgctgttggtcaccggcgaacatcaggccaaagtcggcatggactatttccgccgccatctcccggccattcgtcgccaattttcatcattacagatggaagtccagcccttgtcgcaagaaaactacgcggagctcaaaacgctggggatcgatggcgtgatggtttatcaggaaacttaccatgaggcaatctatgcacagcatcacctgaagggaaagaaacaggactttttctggcggctggaaacgccggatcggttaggccgggcaggtatcgacaaaattggtttaggcgcgctaatcgggctttccgacagctggcgggttgattgctatatggtggcggagcatctgttgtggatgcagaaacactattggcagagtcgctattctgtttccttcccgcgtctgcgtccgtgtactggcggtgtggaacccgcatctgtgatggatgaaaagcaactggtgcaaaccatttgcgcgtttcgtttactggcgccagaaattgagctctcactctccacccgcgaatcgccctggttccgtgaccatgtgattcctctggcaatcaacaacgtcagcgccttctcgaaaacgcagcccggcggctacgctgacgatcatccggaactggagcagttttctccccacgatgcccgtcggcctgaaacagtagcaagcgcgttaagcgcgcaaggattgcagcccgtctggaaagactgggacagttggctggggcgcgcttcgcaaattcggtga

SEQ ID NO: 372344 - DNA, 1011 bp, Salmonella enterica
atgatcccaccattaaatagatatgttcccgcgctttcaaaaaatgaattggttaaaactgttaccaacagggacattcagtttacaagttttaatggaaaagattatcccttgtgctttttagatgagaaaacccctcttcttttccagtggtttgagcggaatcctgctcgctttgggaaaaatgatatacctataattaacacagagaaaaacccctaccttaacaatatcattaaagcagcaacaattgaaaaagaacgtcttataggtatttttgtagatggtgatttttttccgggacaaaaggatgctttttcaaaacttgagtatgactatgaaaacataaaagtcatatatagaaatgatattgactttagtatgtacgataaaaaattatcagaaatttatatggaaaatatttctaagcaagagtccatgccagaagaaaaaagggattgtcatttactgcagctattgaaaaaagaattgagtgatattcaagagggtaatgattcattaattaaatcttacttactggataaaggccatggatggtttgatttttacaggaatatggctatgttaaaggctggtcagttatttttggaggcggataaggttgggtgttatgatttatcaacaaatagtgggtgtatatatcttgatgctgatatgattatcacggaaaaactggggggtatatatattccggatggaatcgctgttcatgtagaaaggatagatggccgtgcttctatggaaaacgggataatagctgttgatcgcaataaccacccggctttacttgctggattagaaataatgcatactaaatttgatgctgatccctattctgatggtgtatgtaatggaattagaaaacattttaattattctttaaatgaagattataattctttttgcgattttattgagtttaagcatgataacattataatgaataccagtcagtttacgcaaagttcatgggcgaggcatgtgcagtag

SEQ ID NO: 372345 - DNA, 138 bp, Salmonella enterica
atgtatgaacagcaggtattttataatggcgagccaatagactttaataacttagatttatgggataaatttaaagtcacatttggaatcaatgttacagaaaaaaacaaacccaatgataaaaaatttcaattttga

SEQ ID NO: 372346 - DNA, 279 bp, Salmonella enterica
atgccagcgattatttcattaatctatttaatgtttagtcttttagtatttacaaaaaagataaccatttcaaacgttctgtccgcttttttattgtttctatcgttatatatacttcaccataaatcattacttatatttatttattgtcttattattattgtcgccaccgctattcttcatcgagtcaaaaccagcgcggataaaaaagccgtattttatttttcaatgccatgctggctcttggttttatctgtaattataaatattaatgaataa

SEQ ID NO: 372347 - DNA, 4224 bp, Salmonella enterica
gtgaaagatttattaaagtttctgaaagcgcagactaaaaccgaagagtttgatgcgatcaaaattgctctggcttcgccagacatgatccgttcatggtctttcggtgaagttaaaaagccggaaaccatcaactaccgtacgttcaaacctgagcgtgacggccttttctgcgcccgtatctttgggccggtaaaagactacgagtgcctgtgcggtaagtacaagcgcctgaaacaccgtggtgttatttgtgagaagtgcggcgttgaagtgacccagaccaaagtacgccgtgagcgtatgggccacatcgagctggcgtctccgactgctcacatctggttcctgaaatcgctgccgtcccgtatcggtctgctgctcgatatgccgttgcgcgatatcgaacgcgtactgtacttcgaatcttatgtggttatcgaaggcggtatgaccaacctggaacgtcaacagatcctgactgaagagcagtatctggacgcgctggaagagttcggtgacgaattcgacgcgaagatgggtgcggaagctatccaggccctgctgaagagcatggatctggagcaagagtgtgaaactctgcgcgaagagctgaacgaaaccaactccgaaaccaagcgtaagaagctgaccaagcgtatcaaactgctggaagccttcgtacagtctggcaacaagccagagtggatgatcctgaccgttctgccggttctgccgccagatctgcgtccgctggttccgctggatggtggtcgtttcgcgacttctgacctgaacgatctgtatcgtcgcgtcattaaccgtaacaaccgtctgaagcgtctgctggatctggctgcgccggacatcatcgtacgcaacgaaaaacgtatgctgcaggaagcggtcgacgccctgctggataacggtcgtcgcggtcgtgcgatcaccggttctaacaaacgtcctctgaaatctttggccgacatgatcaaaggtaagcagggtcgtttccgtcagaacctgctcggtaagcgtgttgactactccggtcgttctgtaatcaccgtaggtccataccttaggttgcatcagtgcggtctgccgaagaaaatggcgctggagctgttcaaaccgttcatctacggcaaactggaactgcgtggcctggccaccactatcaaagccgcgaagaaaatggttgagcgcgaagaagctgtcgtttgggatatcctggacgaagttatccgcgaacacccggtactgctgaaccgtgcaccaacactgcaccgtctgggtatccaggcatttgaaccggtactgatcgaaggtaaagctatccagctgcacccgctggtttgtgcggcatataacgctgacttcgatggtgaccagatggctgttcacgtaccgctgacgctggaagcccagcttgaagcgcgtgcgctgatgatgtctaccaacaacatcctgtctccggcgaacggcgaacctatcatcgttccgtctcaggacgtggtattgggtctgtactacatgacccgtgactgtgttaacgccaaaggcgaaggcatggtgctgactggcccgaaagaagctgagcgtatctatcgcgcaggtctggcctctctgcatgcgcgcgttaaagtgcgtatcactgaatatgaaaaagatgaaaacggcgaattcgttgcgcacaccagcctgaaagacacgaccgttggtcgcgccattctgtggatgatcgtaccgaaaggtctgcctttctccatcgtcaaccaggcgctgggcaagaaagcgatctccaaaatgctgaacacttgctaccgtattctgggcctgaaaccgaccgttatttttgcggaccagacgatgtacaccggctttgcttatgcagcgcgttcaggtgcgtccgttggtattgatgacatggtcatcccggagaaaaaacacgagatcatttctgaggcggaagctgaagttgctgagatccaggagcagttccagtctggtctggtaaccgctggcgaacgctataacaaagttatcgatatctgggctgcggcgaacgatcgtgtatctaaagcgatgatggataacctgcaaactgaaaccgtgattaaccgtgacggccaggaagagcagcaggtctccttcaacagcatctacatgatggccgactccggtgcgcgtggttctgcggcacagattcgtcagcttgctggtatgcgtggtctgatggcgaagccggatggctccatcatcgaaacgccaatcaccgcgaacttccgtgaaggtctgaacgtactccagtacttcatctccacccacggtgctcgtaaaggtctggcggataccgcactgaaaaccgcgaactccggttatctgacccgtcgtctggttgacgtcgcgcaggatctggtggtgaccgaagatgactgtggtacgcacgaaggtatcctgatgaccccggttatcgaggggggcgatgttaaagagccgctgcgtgaccgcgttctgggtcgtgtgacggcggaagatgtgctgaagccgggtacggcggacattctggttccacgcaacacgctgctgcacgaacagtggtgtgacctgctggaagcaaactccgttgacgccgttaaagtgcgttccgttgtatcctgcgacaccgactttggtgtatgtgcgcactgctatggtcgtgacctggcgcgtggccacatcatcaacaaaggtgaagctatcggcgttatcgcggcacagtccatcggtgaaccgggtacacagctgacgatgcgtacgttccacatcggtggtgcggcatcgcgtgcggctgctgaatccagcatccaggttaagaacaaaggtagcatcaagctcagcaacgtgaagtcggttgtgaactccagcggtaaactggttatcacttcccgtaacaccgaactgaagctgatcgacgaattcggtcgtaccaaagagagctataaagtgccttatggcgctgtcatggcgaaaggtgatggcgagcaggttgccggcggcgaaaccgtggcaaactgggacccgcacaccatgccggttatcaccgaagtgagtggtttcatccgcttcactgacatgatcgacggtcagaccattacgcgtcagaccgacgaactgaccggtttgtcttcgctggtggttctggattcggctgaacgtactaccggtggtaaagatctgcgtccggcgctgaaaatcgttgatgctcagggtaatgacgttctgatcccgggtaccgatatgcctgcgcagtacttcctgccgggtaaagcgattgtacagctggaagatggcgtacagatcagttctggtgacaccctggcgcgtattcctcaggaatccggcggtaccaaggatatcaccggtggtctgccgcgcgttgcggacctgttcgaagcgcgtcgtccgaaagaaccggccattctggcggaaatcgcaggtatcgtttccttcggtaaagaaaccaaaggcaaacgtcgtctggtgattacgccggttgatggtagcgatccgtacgaagagatgattccgaaatggcgtcagctcaacgtgttcgaaggggaacgtgtagaacgtggtgatgtgatttccgacggtccggaagcgccgcacgatattctgcgtctgcgtggtgttcatgctgtgacgcgttacatcgttaacgaagtccaggatgtataccgtctgcagggcgttaagattaacgataaacacatcgaagttatcgttcgtcagatgctgcgtaaagcgaccatcgaaagcgccggtagttccgacttcctggaaggcgaacaggttgaatattcccgcgtcaagatcgctaaccgcgagctggaagcgaacggcaaagtgggggctaccttctcccgcgatctgctgggtatcaccaaagcgtctctggcaaccgaatcgttcatctctgccgcatcgttccaggagaccacgcgtgtcctgaccgaagcagccgttgcgggtaaacgcgacgaactgcgcggcctgaaagagaacgttatcgtgggtcgtctgatcccggcgggtaccggttatgcgtaccaccaggatcgtatgcgccgtcgcgccgcgggcgagcagccagcaacaccgcaggtcactgcggaagatgcatctgcaagcctggcagaactgctgaacgcaggtctgggcggttctgataacgagtaa

SEQ ID NO: 372348 - DNA, 4029 bp, Salmonella enterica
atggtttactcctataccgagaaaaaacgtattcgtaaggattttggtaaacgtccacaagttctggatgtaccttatctcctttctatccagcttgactcgtttcagaagtttatcgagcaagatcctgaagggcagtacggcctggaagcagccttccgttccgtgttcccgattcagagctacagcggtaattccgagctgcagtacgtcagctaccgccttggcgaaccggtgtttgacgttcaggaatgtcagatccgtggcgtgacctattccgcaccgctgcgcgtaaaactgcgtctggtgatctacgagcgcgaagcgccggaaggcaccgttaaagacattaaagaacaagaagtctacatgggcgaaattccgctcatgaccgacaacggtacctttgttatcaacggtactgagcgtgttatcgtttctcagctgcaccgtagtccgggcgtcttctttgactccgacaaaggtaaaacccactcttcgggtaaagtgctgtataacgcgcgcatcattccttaccgtggttcctggctggacttcgaattcgatccgaaggacaacctgttcgtgcgtatcgaccgtcgccgtaaactgcctgcgaccatcatcctgcgtgcgctgaactacaccactgagcagatccttgacctgttctttgagaaagtcgtcttcgaaattcgcgacaacaaactgcagatggagctgattccagaacgtctgcgcggcgaaaccgcgtcgttcgatatcgaagctaacggcaaagtgtacgttgaaaaaggccgtcgcattaccgcgcgtcacatccgtcagctggaaaaagacgatatcaagcatatcgaagttccggttgagtacatcgcaggtaaagtcgtctctaaagactacgttgacgaatccactggcgagctgatctgcgcggcgaacatggagctgagcctggatctgctggctaagttgagccagtccggccacaaacgtatcgaaacgctgtttaccaacgatctggaccacggcccgtacatttctgaaacggtacgcgtcgacccaaccaacgatcgtctgagcgcgctggtagaaatctaccgcatgatgcgccctggtgagccgccgactcgtgaagcggctgaaagcctgtttgagaacctgttcttctccgaagaccgctatgacctgtctgcggtgggtcgtatgaagttcaaccgttctctgctgcgcgacgaaatcgaaggttccggtatcctgagcaaagacgacatcattgatgtcatgaagaagctcatcgatatccgtaacggtaaaggcgaagtggatgatatcgaccacctcggcaaccgtcgtatccgttccgtcggcgaaatggcggaaaaccagttccgcgttggcctggtgcgtgtagagcgtgcggtgaaagagcgtctgtctctgggcgatctggataccctgatgcctcaggatatgatcaacgccaagccgatttccgccgcagtgaaagagttctttggttccagccagctgtctcagtttatggaccagaacaacccgctgtctgagattacgcacaaacgtcgtatctccgcactcggcccaggcggtctgacccgcgaacgcgcaggcttcgaagttcgagacgtacacccgacgcactacggtcgcgtatgtcctatcgaaacgccggaaggtccgaacatcggtctgatcaactccctgtccgtgtacgcacagactaacgaatatggcttccttgagacgccgtaccgtcgtgtggttgatggcgtggtcactgacgaaattcattacctgtctgctatcgaagaaggcaactacgttatcgctcaggcgaactccaacctggatgacgaaggccactttgtagaagatctggtgacctgccgtagcaaaggcgaatccagcttgttcagccgcgaccaggttgactacatggacgtttccacccagcaggtggtctccgtcggtgcgtccctgatcccgttcctggaacacgatgacgccaaccgtgcattgatgggtgcgaacatgcaacgtcaggcggttccgactctgcgcgctgacaagccgctggtgggtaccggtatggaacgtgctgtcgccgtcgactccggtgttactgcagtagctaaacgtggcggtactgttcagtacgtggatgcgtcccgtatcgttatcaaagttaacgaagacgagatgtacccgggtgaagcaggtatcgacatctataacctgaccaaatacacccgttctaaccagaacacctgtatcaaccagatgccatgtgtgtctctgggcgagccggttgagcgcggcgacgtgctggcagacggtccgtccaccgacctcggtgaactggcgctcggtcagaacatgcgcgtggcgttcatgccgtggaacggctacaacttcgaagactccatcctcgtttccgagcgtgttgtccaggaagaccgtttcaccaccatccacattcaggaactggcgtgcgtgtcccgtgacaccaagctggggccggaagagatcaccgctgacatcccgaacgtgggtgaagctgcgctctccaaactggatgaatccggtatcgtttacattggcgcggaagtgaccggcggcgacattctggtcggtaaggtgacgccgaaaggtgaaacccagctgacgccggaagagaaactgctgcgtgcgatcttcggtgagaaagcgtctgacgttaaagactcttctctgcgcgtacctaacggtgtctccggtacggttatcgacgttcaggtctttactcgcgatggcgtagaaaaagacaaacgtgctctggaaatcgaagagatgcagctcaagcaggcgaaaaaagacctgtctgaagaactgcagatcctcgaagcgggcctgtttagccgtatccgtgcggtgttggtgtccggcggcgttgaagctgagaagctcgacaaactgccgcgcgaccgctggctggaactcggtctgaccgacgaagagaaacaaaatcagctggaacaactggctgagcagtatgacgaactgaaacacgagttcgagaaaaaacttgaagcgaagcgccgtaaaatcacccagggcgacgatctggcgccgggcgtgctgaagatcgtgaaggtctatctggccgttaaacgccgtatccagccgggtgataagatggcaggtcgtcacggtaacaagggtgttatctctaagatcaacccgatcgaagacatgccttacgatgaaaacggcacgccggtcgacatcgtactgaacccgctgggcgtaccgtctcgtatgaacatcggtcagattctggaaacccacctgggtatggctgcgaaaggtattggcgacaagattaacgccatgctgaaacagcagcaggaagtcgcgaaactgcgcgaattcatccagcgtgcctacgatctgggcgccgacgttcgtcagaaagtcgacctgagcaccttcagcgatgatgaagtgctgcgtctggcagaaaacctgcgtaaaggtatgccgattgccacaccagtgtttgacggtgcgaaagaagcggaaatcaaagagctgctgaaactgggcgacctgccgacctccggtcagatcaccctgttcgatggccgtacgggtgaacagttcgaacgtccggtaaccgtcggttacatgtacatgctgaaactgaaccacctggttgatgacaagatgcatgcgcgttctaccggttcttacagcctggttactcagcagccgctgggtggtaaggcgcagttcggtggtcagcgcttcggggagatggaagtgtgggcgctggaagcttacggcgccgcctacaccctgcaggaaatgctcaccgttaagtctgatgacgtgaatggtcgtaccaagatgtataagaacatcgtggacggcaaccatcagatggaaccgggtatgccggaatccttcaacgttctgttgaaagagatccgctcgctgggcatcaacatcgaactggaagacgagtaa

SEQ ID NO: 372349 - DNA, 366 bp, Salmonella enterica
atgtctatcactaaagatcaaatcattgaagcagtatccgctatgtccgtaatggacgttgtagaactgatttctgcaatggaagaaaaattcggtgtttctgctgctgctgctgtagctgtagctgctggcccggctgaagctgctgaagaaaaaactgaattcgacgtaattctgaaagctgctggcgctaacaaagttgctgttatcaaagcagtacgtggcgcaactggcctgggtctgaaagaagctaaagacctggtagaatctgctccggccgctctgaaagaaggcgtgagcaaagatgacgctgaagcactgaaaaaatctctggaagaagctggcgctgaagttgaagttaaataa

SEQ ID NO: 372350 - DNA, 498 bp, Salmonella enterica
atggctttaaatcttcaagacaaacaagcgattgttgctgaagtcagcgaagtagccaaaggcgcgctgtctgcagtagttgcggattcccgtggcgtaactgtagataaaatgactgaactgcgtaaagcaggtcgtgaagctggcgtatacatgcgtgttgttcgtaacaccctgctgcgccgcgtcgttgaaggtactcagttcgagtgcctgaaagacacgtttgttggtccgaccctgattgcatactctatggaacacccgggcgctgctgctcgtctgttcaaagagttcgcgaaagcgaatgcaaaatttgaggtcaaagctgcagcctttgaaggtgagctgatcccggcgtctcagatcgaccgcctggcaactctgccgacctacgaagaagcaattgcacgcctgatggcaaccatgaaagaagcttcggctggcaaactggttcgcacactggctgctgtacgcgatgcaaaagaagctgcgtaa

SEQ ID NO: 372351 - DNA, 705 bp, Salmonella enterica
atggctaaactgaccaagcgtatgcgcgtgatccgtgaaaaagttgatgcgaccaaacagtacgacatcaacgaagctattgccctgctgaaagagctggccactgctaaattcaacgaaagcgttgacgttgccgttaacctcggcatcgatgctcgtaaatctgaccagaacgttcgtggcgcgactgtactgccgcacggtactggccgttctgttcgcgttgccgtatttacccagggcccgaacgctgaagcagctaaagctgctggcgctgagctggtaggtatggaagatctggctgaccagatcaagaaaggcgaaatgaacttcgacgttgttatcgcatccccggatgcaatgcgcgttgttggccagctgggtcaagttctgggtccgcgcggcctgatgccaaacccgaaagtcggtaccgtaactccgaacgttgctgaagcggttaagaacgctaaagcaggtcaggttcgttaccgtaacgataaaaacggcatcatccacaccaccatcggtaaagtggactttgacgctgacaaactgaaagaaaacctggaagctctgctggttgcgctgaaaaaagcaaaaccgagccaggcgaaaggcgtgtacatcaagaaagttagcatctccaccaccatgggtgctggcgttgccgttgatcaggctggtctgagcgcatctgcgaactaa

SEQ ID NO: 372352 - DNA, 429 bp, Salmonella enterica
atggctaagaaagtacaagcctacgtcaagctgcaggttgcagctggtatggcgaacccgagtccgccggttggtccagcactgggtcagcagggtgtgaacatcatggaattctgcaaagcgttcaacgcaaaaacggattccatcgaaaaaggtctgccgattccggttgttattaccgtttacgctgaccgttctttcaccttcgttaccaaaacgcctccggcagctgttctgctgaaaaaagcggctggtatcaagtctggttccggcaagccgaacaaagacaaagtaggtaaaatttcccgcgctcagctgcaggaaatcgcgcagaccaaagctgccgacatgaccggtgccgacattgaagcgatgactcgctccatcgaaggtactgcacgttccatgggcctggtagtggaggactaa

SEQ ID NO: 372353 - DNA, 546 bp, Salmonella enterica
atgtctgaagcacctaaaaagcgctggtacgtcgttcaggcgttttccggttttgaaggccgcgtagccacatcgctgcgcgagcatatcaaattacacaatatggaagagctgtttggcgaagtcatggtgccgactgaagaagtcgttgagatccgtggcggccagcgtcgcaaaagcgaacgcaaattcttcccgggttacgttctggtccagatggtcatgaacgacgcaagctggcacctggtgcgcagcgtgccgcgtgtgatgggctttatcggcggtacctctgaccgtccggcgccgatcagcgacaaagaagtcgatgcgatcatgaaccgcctgcagcaggttggcgataagccgcggccgaaaactctgtttgaaccgggtgaaatggttcgtgttaacgacggtccgttcgcagactttaacggcgttgtcgaagaagtcgattatgagaagtctcgcctgaaagtgtctgtttctatcttcggtcgtgcgaccccggtagagctggacttcagccaggttgagaaagcgtaa

SEQ ID NO: 372354 - DNA, 384 bp, Salmonella enterica
atgagtgcgaataccgaagctcaagggagcgggcgcggcctggaagcgatgaagtggatagttgttgccatattgctgatcgtcgcaatcgtcggcaactacctctatcgcgacatgatgctgccgctgcgtgcgctggccgtagtaattctgattgctgcagcgggtggtgtcgcgctgttgacgacaaaaggtaaagcaaccgttgcttttgcccgtgaagcgagaaccgaagtccgtaaggtcatttggccgactcgccaggaaacgctgcacaccacgctgatcgtcgctgcggttaccgcagttatgtcactgatcctgtggggactggatggtattctggttcgcctggtatcctttatcactggcctgaggttctga

SEQ ID NO: 372355 - DNA, 339 bp, Salmonella enterica
atgaggggatctctcagagccaagcgtctgctggacgtgctggataagcagttagctcaccacccgtatgtcgcgggagaagagtacactattgccgatatggccatctggccgtggttcggcaacgtggtgctggggaatgtctatgatgcagcggagtttctggatgccggaagttatcaaaacgtacaacgctgggcgaagcaggtagccgaacgtccggcggtaaagcgggggcgcattgtcaaccggaccaacggcccattgaacgaacagcttcacgaacgccatgacgccagcgacttcgaaaacaataccgaagataaacgtcaaagttaa

SEQ ID NO: 372356 - DNA, 711 bp, Salmonella enterica
atgcgaatactggctgcggggagcttgcgcgtcgtctggccgcagctaatggcggcatttcaggcggatgcggtatgtgatttcggtccggcggggctgttacgtgaacgcatcgaagcgggcgaagcgtgcgacttttttgcttcggcgaacctggcgcatccgcaggcgctgctggaaagcgggcgggcgctgcgggtcgcgccttttacgacgaaccgtttgtgcctgagcgtgcgggcacaggcgatgcgtgaaggcgaggactggctgtcgctattaacccggcgggatctgcggatcggcacctcaacagcaggttgcgatccttccggcgattatacgcagcagcttttttcgcggatgggcaaggagggcgaagcggtccgaaaacgcgcggtagcgctggttggcggcaggcagactttgccgttaccggcgggccggctggctgcggaatggctcatcaatcatgattacaccgatatctttatcggctatgccagctatgctcccaggctacggcaggttaattcgctgcgagtggttgatatcccggaaccttataatcccgtggctgaatatggctttgcctgcctgagcgagcagggaaaaacgcttgccgactttttactgtcagcacgggcgaggttgattctcatgcaacatgggtttagtgaagcgccgaatatgacacactcgcagaactga

SEQ ID NO: 372357 - DNA, 1053 bp, Salmonella enterica
atgaataaatttttgcgccagctctctctgctggcgttgcttttttgctggccgttaatgtcacaggcggcgcgtacttttaccgatcaacttggccgccaggtcacggttcccgacaccgtcgacagagtggtggtgctccagcatcaaacgctcaatctccttgtacagatgaatgccactgacaaaatcgttggggtcatggcgaactggaaacagcaattaggcgacggctatgcgcgtctggcgccggaactggcgcaaaaagcctcgctgggcgatctaacgcacgttgatcctgaaaaactggtggcgctgcgcccgcaggtggtgtttgtcacgaattacgctccgcaggagatgatcgacaaaatcagccgtcttggcattccggtggtggcgatttcgctgcgccatgatgttgctggcgagcgggctaaaatgaacccgaccctggccgatgaagagcaggcttataatcgcgggctgcgtgaaggaataacgctgattggcgatatcgtcaataaaccgcaggaggcgaaagcgctgattgaggcgatggataaaggtcgcaagatggtcagcgaccgtttgcagtcggttcctgaaaatgagcgggttcgcgcttatatggcgaatccggagctgaccacctacggttccggtaaatacaccggtctgatgatggcccatgcgggggcgctgaatgtagcggcatcctcggtgaaaggctttaagcaggtgacaatggagcaggtgatcgcctgggatccacaggtaatctttgtccagaatcgctatccaaaggtcgtcaatgagatcctgcacaatccccagtggcaggtcattgacgcggtgaagcatcatcgggtttacctgatgccggattatgccaaagcctggggatatccgatgccggaggcggtgggaatcggcgaactgtggatggcgaaaaaactctatccggaaaaattccacgatattgacatgcaaaaggccgctaacgactggtatcaacgtttttaccgtactgactatcagggcgtacagtga

SEQ ID NO: 372358 - DNA, 249 bp, Salmonella enterica
atgtgtattggcgtccccggtcaggtgctggccgtcggagatgatattcaccagcttgcgcaggtggaagtgtgtggcatcaaacgtgatgtcaatattgctctgatttgtgaaggtaagccagccgatctggtagggcaatgggtattggtacacgttggttttgcgatgagcatcattgacgaagacgaagcgaaagccacgttagatgcgctgcgccgcatggagtacgacatcaccagcgcgtga

SEQ ID NO: 372359 - DNA, 342 bp, Salmonella enterica
atgcatgagctgtctctttgccaaagcgccgttgaaattattcagcagcaggcagaacagcacggcgtggcgcgcgtcaccggcgtatggctggagataggcgcgctttcgtgcgttgaagagcgcgcggttcgtttcagctttgacatcgcctgccagggaactttagcgcaagggtgcgaattgcacatcgactacagaccggcccaggcctggtgctgggattgcagtcaggtggtggaaattctcaggcatgacgcgcaatgtccgcgttgtcatggcgatcgcctgcgggtggataccggcgattcgttgaaagtaaagagtattgaggtcgaataa

SEQ ID NO: 372360 - DNA, 489 bp, Salmonella enterica
atgtctgaaacgttttccggattcgacacggcgcccgtcgcccgggttcaggcggcgtttgaagagatagcccatcgttcgatgcacgatctttcgtttctgcatccgactatgccggtgcatgtctctgattttacgttgtttgaaggacaatggacgggcacggtaattacgccgtggatgttaagcgcattaatcttccctggcccggaccagatctggcccgggcgtaccatcggtgaaaaactcggtctgcaactgccttatggcacgatgacctttaccgttggcgaactggaaggcgtttcacaatatcttgcctgctcgttgatgtcgccgctttcccgtagcctgtcgccggaagagggcgtccggctggcggatgactgcgcgcggatgctgttatccctgccggtaagcaatcctgatgcgccgcagacaagccggcgtgcgttgctgtttggccgtcggagctgtgagaatgcatga

SEQ ID NO: 372361 - DNA, 495 bp, Salmonella enterica
atgcggatattagtcttaggggtcggcaatattttgctgaccgatgaagccatcggggtgcgtattgttgaagcgttagagcaacgatacaccctgccggatttcgttgagattctggatggtggtacggcgggaatggaacttcttggcgatatggcgagtcgggatcatttgatcattgccgacgccatcgtgtcgaaaaagaacgcgccgggaaccattatggtactgcgcgacgatgaagttccggcgctgttcaccaacaaaatctccccccatcagcttggactggccgacgtattgtcggccctccgctttaccggcgagtttccgaagaaactgaccctggtcggcgttattccacagtcgctggaaccgcacatcggcttaacgccaaccgtcgaggcgatgattgaacctgcgcttgagcaggttcttgctgcgctgcgagaatccggcgtcgaagcaattcctaaggagacggcgcatgtctga

SEQ ID NO: 372362 - DNA, 1704 bp, Salmonella enterica
atgagccagagaattactattgatccggtaacccgtattgagggtcatttacgcattgactgcgaaattgagaacggcgtcgtatccaaagcatgggcgtccggcaccatgtggcgcggtatggaagagatcgtgaagaaccgcgatccgcgcgatgcgtggatgattgtgcaacgtatttgcggcgtttgtacgacaactcacgcgatctcctccgttcgtgcggcggaaagcgcgctgaatattgatgttcccgtcaacgcgcagtatatccgtaatattattctggcggcgcataccacccatgaccacattgtccatttctaccagctctctgcgctggactgggtggacattacctctgcgctgaaagccgatccggaaaaagcctccgcgatgctggatggcgtgtcgagctggcacctgaacagcgcgcaagagttcacgaaagttcagaacaagatcaaggatcttgtcgccagcggtcagctaggtattttcgccaatggctactgggggcacccggcaatgcagttaccgccggaggtcaacctgattgcggtcgcccactatctgcaggcgctggaatgtcagcgtgacgctaaccgcgtggtggcgttgctgggcggtaaatcgccgcatatccagaacctggcggtcggtggggtggcgaacccgatcaatctcgacagcatcggtacgttgaaccttgaacgcctgatgtacatcaaatcgtttatcgataagctgagcgattttgtcgagcaggtgtataaagtggataccgcagtcatcgcggcctactatccggaatggctggagcgcggcaaaggcgcggtgaactacctgagcgcgccggaattcccgaccgacggtaaaaacggcagtttcctgttcccgggcggttacattaccaatgccgatctgtcgacataccgtccgatcacctctcactccgacgaattcctgattaaaggtattcaggagagcgcgaagcacgcctggtacaaagatgaagcgccgcaggcgccgtgggaaggcactacgatcccggcttacgacggttggtcggatgacggtaaatactcatgggtcaagtcgccgacattctacggcaaaaccgtcgaagtcgggccgctggcgaacatgctgtgtaaactggctgcaggtcgtgaatccacgcagaccaagctcaatgaaatcattgcgctttatcagaagctgaccggcaaaacgttggaaatggcgcaacttcactctacgctgggtcgtatcatcgggcgtaccgttcactgttgtgaactgcaaaacatattgcaggatcaatacaacgcgctgattgtaaatatcggcaaaggcgattacaccacgtttgtgaagccgaacattccggcgacgggcgagttcaaaggcgtgggcttcctggaggcgccgcgcggtatgctgtctcactggatggtgattaaagacggtattatcagtaactatcaggcggtggtgccatcgacctggaactcaggtccgcgtaacttcaacgatgacgtggggccgtacgaacagtcgctggtcggtacgccgatcgccgatccggcgaagccgctggaagtggtacgtaccatccactccttcgacccttgcatggcgtgcgcggtacacgtggtggacgccgatggcaatgaagtggtctcggtgaaggttttgtaa

SEQ ID NO: 372363 - DNA, 1179 bp, Salmonella enterica
atgagtcatgatccaaaaccgctgggcggaaaaatcatcagtaaaccggtcattatttttggaccgttaatcgtcctgtgtatgctccttatcgtgaagcgtctggtcttcgggttgggctccgtttccgacctgaacggcggtttcccatggggcgtctggattgcctttgacctgttgatcggcactggctttgcctgcggcggttgggcgttggcatgggcggtatatgtctttaaccgtgggcaataccatccgttggtgcgcccggcgttgctggcaagcttgtttggttactcgctgggcggcctgtcgatcactatcgacgtcggtcgttactggaacctgccgtacttctacattccaggtcacttcaacgtgaactcggtactgtttgagacggcggtctgtatgaccatctacatcggcgtgatggcgctggagtttgcgcctgccttgtttgaacgtctgggctggaaagtgtcgctcaagcgtctgaataaggtgatgttctttattatcgcgctgggcgcgctgttgccgacgatgcaccagtcctcaatggggtcattgatgatctcggcgggctataaagtgcatccgctatggcaaagctatgaaatgctgccgctgttctcggttctgaccgcgtttatcatgggcttctccattgtcatatttgagggttcgctggttcaggcaggcctgaaaggaaacggtccggatgagaaaaatttgtttgttaagctgacgaataccatcagcgtgctgctggcgattttcgtcgtcctgcgctttggcgaactgatttatcgcgacaagctgtcctatgcgtttgccggcgatttttactccgctatgttctggattgaagtcgtcctgatggtcttcccgttagtggtgctgcgtgtggcgaaactgcgtaatgactctcgtatgctgtacctgtcggcgctgagcgcgctgttgggctgcgcgacgtggcgtctgacctattcgctggtggcattcaacccgggtggcggctaccactacttcccaacttgggaagaattgttgatttctattggttttgtggctattgagatttgtgcatacatcgtactcattcgtctactgccgatacttcctcctttaaaacaaaacgatcataatcgtcatgaggcgagcaaagcatga

SEQ ID NO: 372364 - DNA, 987 bp, Salmonella enterica
gtgaacagacgtgactttattaaagcagcctccggtggagcattgctgttgggcgccgcgccgtctgtcagccatgcggctgcagaaaaccgtccgccgattccaggttcgctgggtatgctgtatgactccactctgtgcgtgggctgtcaggcctgcgtcacaaagtgtcaggatatcaacttcccggcgcgtaacccggaaggggagcagacctggtcgaacaacgacaagctgtcgccgtataccaataacattattcaggtatggcgtagcggcacgggcgtgaacaaagatcaggaagagaacggctatgcctacatcaagaaacagtgtatgcactgcgttgatcctaactgcgtttccgtttgcccggtgtcggcgctgaaaaaagatccgaaaaccggcatcgtccactatgacaaagatgtctgcaccggctgccgttactgtatggtcgcctgtccgtacaacgtacctaagtacgactacaacaacccgtttggcgcgcttcacaagtgtgagttgtgtaaccagaaaggcgttgagcgtctggataaaggcggtttgcctgggtgtgtggaagtttgtccggcaggggccgtcattttcggtactcgtgaagagctgatggcggaagcgaaaaaacgtctggccctcaaaccaggcagtgaatatcactatccgcgccagacgttgaaaacggacgacacctatctgcatacggtgcctaaatactacccacacctctacggtgaaaaagagggcggtggtactcaggtgctggtgctgacaggcgttccttatgaagatctggatctgccgaagctggatgacctttcaaccggagcgcgctccgagcatgttcaacacacgctttataaaggcatgatactacccctggctgcgctggcgggcttaaccgtgctggttcgtcgtaatagcaaaaacgaccatcacgatggaggagacgatcatgagtcatga

SEQ ID NO: 372365 - DNA, 1119 bp, Salmonella enterica
atgactggagataatactctcatcacttctcacggcattaaccgtcgtgatttcatgaagctttgtgcagcactggccgctactatggggctcagtagcaaagccgccgcagaaatggcagaatcggtatccaatccacagcgtccgcccgttatctggattggcgctcaggagtgtaccggttgtaccgaatcactgcttcgtgctacacacccaaccgttgaaaacctcgttctggagactatctctctggaataccacgaggtactttccgccgcattcggtcaccaggtcgaagaaaacaaacataacgctctggagaagtataaagggcaatatgttctggtggtggatggttctatcccactaaaagataacggtatctactgcatggttgccggcgagccgatcgtggatcacatccgcaaagccgctgacggcgcagccgcgattatcgctatcggttcctgctcggcatggggcggcgttgctgcggctggcgtaaacccaaccggcgctgtcagtctgcaggaagtcttaccgggcaaaacggttatcaatattccaggttgtccgccaaacccgcataacttcctggcgaccgtcgcgcatatcatcacttacggcacgccgccgaagctggatgcgaaaaatcgtccaacctttgcctatggccgtctgattcatgagcattgcgaacgtcgtccacacttcgacgcaggccgttttgccaaagaatttggcgacgaaggccaccgtcagggctggtgtctctaccatcttggctgtaaagggccggaaacctggggcaactgttctacgttacagttctgtgacgttggcggcgtctggccagtggcgatcggtcatccttgctatggctgtaacgaagaaggtatcggcttccataagggcattcaccagcttgctcatgtcgaaaaccaaactccgcgttcagagaaacctgacgtcaatatgaaagaaggcggcaatatctctgcgggcgctgtcggtctgcttggcggcgtagtcggtctggttgccggcgtcagcgtgatggcggtacgtgaactggggcgtcagcaaaagaaagataacgctgactcacggggagaataa

SEQ ID NO: 372366 - DNA, 288 bp, Salmonella enterica
atgaataatcattttgggaaagggttaatggctgggttgcacgcgccatatgcatatagcgcgcatcatgcggtgaatttctgttctgagtataaacgtggctttgtattgggttttacacaccgtatgttcgaaaagaccggcgatcgtcaacttagcgcgtgggaggccggaattctgacgcgtcgctatggtctggataaagaaatggtgatggatttctttaaagagaatcattccgggatggcggttcgcttctttatggtcggttatcgactcgaaggttga

SEQ ID NO: 372367 - DNA, 1644 bp, Salmonella enterica
atgcgtttgctgcaaaactttactattcgtatggtcatgctgacgatactgggacttttttgtctactctggtcgggggtggggttatacagcgtccatgctttatccgaagtttcggaaggaaatgatattgaccggcatcttgtgcggcaaatgacggtgctaagccagggtaacgatcaatatttccgctttgttacccgccttagccgcgcgatggatgtaaaaatcggcggcggcacgcccgattttgcgcccgcccggcagtcgctcgagaatatgcgtcagaagctggaggagatgaaagcgctatcgccagggccgatgaaccctgatatctcaagggaggtcttgtccaactggcaggccttgctggagaaaggcgtcgttcctcaaatgcaactggtgcagcaaggatcgctaaccgcctggagcgaacatgccagtacggtcacgcccgcactcagtcgcgcgttcggcgccagcgcggaacggtttagtcatgaagctggcgccatgctggataacacccgtgtgatggtcgatggtaaaacctataccatccgcatcctgcttatcacggcggtgattctgggcattgctatcctgatttttaccgatcgctatctggttgcaatgatggtgaaaccgctggagcgtatccgtcagcagtttcagcgtatcgcgcaaggcgatcttagccagccgattgaagcgttggggcgtaactgcgtaggccggttggtgccgctactgcgcgcgatgcaggacagtttacgcgaagccgtgagtacgatccgcgccggaagcgacaatatctggcgcggcgcgacggaaatttctaccggtaataacgatctctcttcccgaacggaagaacaggccgccgcgctggaagaaactgccgccagcatggaacagcttaccgcaacggtgaaaatgaacgccgaacacgctcgccaggcgagtcagcttgcggatgccgcctcgctaacggcaggaaaaggcggtgaactggtttccgatgtggtagaaacaatgaacggtatttccgccagttcgcagcagatcgcggaaattactaccgtaattaatagtattgctttccagaccaatattctggccttgaacgcagcggtagaagcggccagagcgggcgagcagggacgcggcttcgcggtggtcgccggtgaggtacgtaacctggccagccgcagcgcgggggcggcgaaagaaattgaagccttaattggcgaatcggtacgtcgcgtagcgcagggcgcgcagttggtccaggagaccggcgcgacgatggacgccatcctgcgcggcgtcacggaagtgacgacgattatgaaacagatcgcgtccgcctccgaagaacagagtaaaggtatttctcaggttggcgtggcgatcacgcaaatggatagcgttacgcaacaaaacgccgcgctggttgagcaggtttccgcggcggcggcggcgctggaacggcagacggaggatttgcaacgctccgtacagcagttccggctttccgctagtgagccgcaacaacgcgtaacggcgaaagcggcgcctggcgttcagagaatggcgtcggctcccgcacagtctactgatgaatgggtttccttctga

SEQ ID NO: 372368 - DNA, 495 bp, Salmonella enterica
atggaacgctttcttgaaaatgtaatgtatgcgtctcgctggctgctcgcgccggtgtattttggcctctctttggcgctgatcgctttagcgctaaaatttttccaggaaattctacacgttctgccgaacgtttttgccctggcggaggccgatctgattctggtgctgttatcgctggttgatatgacgctggtcggcggattgctggtgatggtcatgttctccgggtatgagaattttgtctctcagctggatatctctgcgggcaaggagaagctgaactggctggggaaaatggatgcgacgtcgctaaaaaataaggtggcggcatcgatagtcgctatctcttccattcacctgttacgcgtgtttatggacgcgaaaaacgtcccggataacaaattaatgtggtatgtcatcatccatctgacctttgtcctgtcggcattcgttatgggctatctggacagattgacgcggcataaccattga

SEQ ID NO: 372369 - DNA, 1797 bp, Salmonella enterica
atgataaagaaaagaggatttactctattagagatcaccatcgttttaggtataggttctcttattggttttatgaagtttcaggacatgaggaaagaacaggaagcagtaatggcacaggcggtaggctttcaaatgaaacaggttggcgaagcagttaaccgttatattagcattcgctataataagctttccacactgtcatcttcacgcagtcaaagtagcgatccgggaccaagaacctgtacggctaatggctgtgaaatcacttaccagacgctggtgaatgaaagtctcttgccctctacatatgcgggagttaatgcccaaaagtcttcttataaaatcctgttaaaacgatcaggcgtatcaccaaactatgttatcaatggtttgattgctacgacgataccttgggtcgaaggtggaaaaacgcgatacgacctgttaggaaaatcgatgcaatcagcaggtattgatagcggtatgacgaaatcgcctgctcaggcatcaggatataatggagtgtggacagaaaagtctactgattacccggcaattaataaagcaggattactggtttaccgtgtgggctatgatagttctatgtattctgtttacttgcgtcgcgatggaacattgcctatgactggaaatctcaatatgggcactaacgatattaataatgccaagaacattaccgcatcgggaacggggatctttggtggggatgtttcttccgcagggaaaataatcgcagcacaagaaataatagcgcataatggttatggtgatgccatacattttggcggcgatgctgttaataacgactatgaaataaccatgtctaaggataagaccttatctattcatatggcaagcaatcgaacagatctcactacgctgaaaattagtggagggctgtctacgattggtaatggaacgattagtggaacattagatacaggtaaaagtatcacatccggtggacaatttaatggtcataacggtggtggtgatagtttcagtattggtggtggagatgctaacgattatgagttcagattagatactgttaagccgctaaccatctggcgaaatggtggcaccagtactgaaacaaggcttcaggtttttgggaaacaaaccaaccaaggtgattttgctattactccggggacaggaagcactggtagtattgcagcatctggaaatattcagggacatactctacaacctacatcgacgaatacaactggtgggacatgtccaagtataggcctgatatctaaagacaacatgggaaatatattatcctgcgttaatggaaaatggtctgttgtcagtaacctgccagttggttcacctgttccttggccttcaaatacagcgcctgtaggttggttaatatgcaggggacaatcttttaatactgccctatatcctcagttagcaaaagcctatccaagaggaagacttcctgatttaagaggagtatttattcgagggctggattcgggaagaggacttgactcaggaagagttattaattcttatcaggatgatcagattcaaaatattacaggtcatatggcggctgatgtatcacagagtggaaacatcggtaaatatgtgagtggcgctttcgcggatagtggtgcgttaggtgaaggtgatgaaggtcataaaagcaatgaagtaaggaaatatacgtttgatgcttcgagagtcgttcgggcaggtaatgaaacaagacctaagaatgttgccatgaattatatcgttcaggcacaatga

SEQ ID NO: 372370 - DNA, 558 bp, Salmonella enterica
atggttttattaaatagtaaaagaaaaagcaaaaaaggtttctcattactcgaattattacttgttctggggattattgccgcattagtagtagcggcttttattgtgtatcccaaggttcaggcttcacaaagagcgcaagcggaaagtaataatattgccaccatacaggcaggtgtcaaagcactctatacatcagcatccagctttactgggctaacgaataccgtagctgttcaggcaaaaatcttccctgataatatgttaagtggaacaggcaatgcagctaaaccaattaacgcattcaaagggaacgtgacgctggctgcggcagctacaggtccgtcatctgcggcaggttcttctttcactatcacatatgacaacgtgccagcagcagaatgtgtgaaaataaccacagcggcggcaggcaatttttacactgctaaagtgggttctaaagtagtaaaagctgcagatggtacccttgatgtagcagctaccgccgcagcatgtaataacgctacaagtaatacattagtattcacgtctatttaa

SEQ ID NO: 372371 - DNA, 306 bp, Salmonella enterica
atggataatgaaactaaaagatcaagaacagaaaaaacattaaaacaaaaggtggcatttgctcaacttgaacttaaccgtttaaagtcaatggagaaatcagaacaaaagaaagttgaaacaaggcttaagattattcttggggcagaagtagccaaggctatgaattgtggtatcgaacaggtggataaggaacttgttatggggattttactttcagcatctgagttgaatgatattgaaagagtcaaatatataaaagcagggagatggtttcttgctcaaatggatggcagacaaaaataa

SEQ ID NO: 372372 - DNA, 1521 bp, Salmonella enterica
atggcgatttttcatctggattttaaaattgtgaaacgaagcgaaggcatgacttccgttgcgaaggctgcctaccatacccgtacacgtattacagatgatcgcatcggtgaaacatacgatttcagccacagaacagatctacatggtcatattatattggcacctgtttccgcacctgctcatattgttgaaagctcctcagcattgtggaatgaagttgaaagagtggaacgccagaacaacggacaaacagcgcgttattttgatgtcgctatccccgtagaactcagcaatgatgacaagaaaaaattagttgccgaatactgccagaaaaactttgtcgataaggggatgattgctgatatcgcatttcatgatctggacagtaaaaacccacatgctcacgtcatgttaaccctgaaaaccattggtccagaaggcttcggcaaaaaagacagaagctggaatgataagaagatggttgttcagtggcgtgagtcgtgggccacgatgtcaaacagctaccttgagaccgcaggccgtgaagaacgtatcgatcaccgttctctcagaactcaatgtgctgatgcccttgcccaagcagaagaagcattcagcgctgaagaaaaagccttctggcttgccaaagcaaccgaaacaaaccgtccagcaatgcaacgagttcatcgtgccaagtggaataacaccgagtcacaggaacagcgagctacagaacaagctttacgtgatcagcaaatagaggaagcgaagaaggtctacaacacattcagtgagctaccactggagatcgtggttgatgtcagaagctttacgattacacatcttgctgaacccgaagaaatcgttatccctgacttcccggctacaactaaacagcaacctgttatgacgacacacgccacaagcagaagaccagcaacaaaatcttaccgtaatcccaataaggtcagtaaagtaaatgtatcagggaagaaatctcccgttctgattgttcctgaaccaactgcatccactaaattgaaaaccccatctattcaaaacaccagagcgaagaaccgcgctccgatgaggagtaggaaacagaccaagccccgccagaatggtttgtttaaacgtttcacgctactgatagtaggatatataagagagaaatttatatgggccagaaggaaacccgataccactgatgctgaccatgataagcgtatcgcagagaactatgtctatgatgaagtgctgggtatcaatgttccacgctcggagtttgaaaaacgcgctaaatttaacaatgaccagacatcaccagaagcaagcatctatggcaatgaatcagaccatgacaaaaccgttcgttttccaagtcgtccgaaagatgtacaaacagagattgataaatacatagatctcataccatcaagcccctcagagtattcaggaaagtcccatgtttcaaagttgagaccactggcatatcgtaataataattataatgaatag

SEQ ID NO: 372373 - DNA, 846 bp, Salmonella enterica
atgaatacaatctatcattattgcagccctgaatctttcttcagtattattcagaatcagcgattatggctaagctctatggatcatatgaacgattacatggagaaaaagtggttttactctacacttaaaaaatatttatataaaaacttagatgctaactgcgttgaccagtttatagcacatttggatgacaatatatctattggaacaccatttgcttgttgtctatctaaatctggggatattttaagtcaatggcgtgcgtatgcaaaagatggctttggtgtatccatcggattcgacagagaaaagctcgatgtctatgatgggattataggtaataaccttgatcctaaacaccgactaactcttagcgatatatcttatatggatattaacgtaattgaatgcttagctgaaaggatattatcaagatattcattcataaaaaaatactatatgaatgaaattatatcgacatcaaaatttaaccgctacgacaaatgcatccttgaattaatttccaatattattcacttaaataccacgactaaaaacccagcatttaaggaggaaaaagaagtacgattagtttatcaaactcttgatacaggaagatatgaatacccagaatcatcatcaattaaagatctgaaatatagaatatccaataatcaaattatatcatattacgaattaggtttcccaaaagatgccgtttcagaattgatattaggtccaaacaataaatttaaagaaagcgatattgttaactttttgcagtataatggttttgaacacagcataaaaatattgaaatcaaaggccagttatggagcttaa

SEQ ID NO: 372374 - DNA, 264 bp, Salmonella enterica
atggaaaacaataccatcaaatgcccgttctgtttcaaagagagccagcgtggggttcacgtttgcacaggttgcttagcgactgtgttatgtggcacttatcccggctggtatgctgctgttgttttgttgttgacttttggtttatcgacgttgatcggtatggcaggagctactatcagccttccgataattgctatcgtagggtttgttgctggcaaagttatttttgctgataatgtagtgtttaggcgaagaatgtaa

SEQ ID NO: 372375 - DNA, 531 bp, Salmonella enterica
atgaagaagattttactcgttgctggcgcggctctggcgctggcgggatgtggtgagaaaggtgagtttgagaaagcgatcaatgccaagattgggcaggacaaatactgcttctcgctggataacaataacaccagcttcccgatccgtcttgccaagccacggcttgattcgactggcacagggacgaattcagtgatcctcgacggttttattgagcagggcctgatggtttttgaacagggctatgactcgaacgtattagggataacagaggaaggcaaaaaagccaaagtctggagcacaacagacggtgcctgtgttggtcgtcgtgctgttgacgagattaaggaatggactgagccgggaaacggtaatcagaaagtagttcgtgtgtcttatacgtggaagctggttgacgttccgaactggattgacaaaaaggcattcgccagtgttaaaggaatgaatgaacctgctgatggtgcaatgaatctctttaagaccagcaatggctggaaagccaattaa

SEQ ID NO: 372376 - DNA, 402 bp, Salmonella enterica
gtggaagcaacaggtatcgtatttttagtggtgctcttcgtcattatcatgaccgcagcagatatacagaagaaaaagcactacaacagctttacggaagttctggacggcgacattctttcgtatgaatgccagcagacaggtattgttattgatactcaaaaacatactgtccgtattttcaataaagataaagacagcacatatacttttgatgaaatccgggaaataaattatacgctttcagagggtggtaagttttacggcaatggaacattacgaggtatgaataatgcggctattgctaactggagagaacaactttcagctaataaacggtctggtctaaatattttaccgatgatattaaaaatcccatgtggaaagttaatgttcccctga

SEQ ID NO: 372377 - DNA, 378 bp, Salmonella enterica
atgaaaaaattattatttgctatttttatcatacttccgcttggtggctgtaccgttcatggtaataaatctctaactgatgaaaatcatcagacggttaaattaaaaatcgtcaagggtaaaactacccaacgagaaattcttgctgcctttggagaacctcagacacgcgctacgaatgatggacaggagatgtggaactactcaagtatgacgggagaaagccaattatctaactacatacccggccttgccctattgaccaatagcagcacggcacacattaaatcactggatatctggtttaaaggtgatgttgtggaacgttataattttagtcagacagccagtaaagttacacgaggtatgattgattag

SEQ ID NO: 372378 - DNA, 291 bp, Salmonella enterica
atggaaaaaacactgagatggaaatacaaagcaaaagacaccaatatgtatatggatatgttggtgcttgatgaatgtcgttacctatacgattggatgccttcacttgatatgttttatagtgggatgatggatatcgagaggcaatttagttttaggtttattcttgatgctgtagctaagcatcgaatggtttataataatgaattcttttatgggactgcatctgttagtaaattcgaaactgattatgttgaaaaagtattgagtgttagaaagaatataatctaa

SEQ ID NO: 372379 - DNA, 297 bp, Salmonella enterica
atgaatacatttaaaaataaaactactgaaatcttttatgttgtgtccttgcatatctatgcggagctttttaactcaaaggataaaacaaccagtaatatgattatgacgcatgtaatggatcatgagtttgtctgtaggctaatcgatctggcaatgaggaatgctgagaagcatcttctgaaaaaagcatggaaaaaaaacgctgctgaaaaactgtcagaggtggattttaaaggggttaagcaggcattagccaaaatgcactacaccgttctggcagagtcaatatgttga

SEQ ID NO: 372380 - DNA, 291 bp, Salmonella enterica
atgaagatagaacttattacaacaaaacagtttattgaacaagccgaatgttatttcaggaactatatggacggattgcggaggaatgcaccagatgatttttattattttctcaacaataaatacaatatgaatgacattatggaaagtatcattaaaaaaacgagatattatttttatgatgacaccgaagaaggcaaaaggaatcggatttatggagaagtaagtcactgtaaggtaaagcaacatcttcgtcagctttggattatctataagtgtgtataccgctaa

SEQ ID NO: 372381 - DNA, 219 bp, Salmonella enterica
atggttaaaagagaaataaaagcaaagacaacgtttatccgtttgccagaagtaataaaacgcaccggatttggtaaaacgtggatttacgaactgattaaggccgggcgttttccatctcaggtgaaaacagggataagagcagtggcattcattgaaagtgagattgatgaatggattgaagcgactattcgaaactcacgccagaacgcagcataa

SEQ ID NO: 372382 - DNA, 876 bp, Salmonella enterica
atgacaaaaagattgcctgtcgcggagatagtggaagcattaagcaaatggtttgatgttagccgctatgatgcgctgaaaaacctcactctggaacaaatttatgcggaactggaaaggcgcatgtttgcctacaaagccagacaacaatgggaaacactggatgataagcatcgtaatgccgttattcaccatgatgcgatgatccactctggcagggtcttgctggaggataaatggatctctgatagccacatgctggctcatagctatgccgtcaggccaatgacaagggattcactgtttaactatggacgggcaatgtatcgactggagaatacacctccagaagaaaatgtttcagtgagttcggattacatatctgaatacctgaaacagggagggctgaaccctgctaacaagatgctgattgaaattgatttggaagaagccagtagcgacgatctggctgaacacctgaaagtgcttatcaatcaatggcagaagcacctgaaagtgcctaaaccaccggaaaaagattttcgttttggtcataaaacattccagaagatactcgattacaagattatccctctgatggacctcatagcttgggaacagctcaacaatcagaaaatcaaataccctgtattggctggtatcctgcaccctgatatgcgttatgccagaggtagcgagcaaatcaaagacactgattatccgcttgcccacggttttttaaacaatgacaattatttcaagtcactgaatgattttttcataaaaaacaatctggtgaaaaactcacctattcttgatgtcatcgcaatgaatgacaaaccagaaacaaaaaagaaaacaagggacatccactaa

SEQ ID NO: 372383 - DNA, 525 bp, Salmonella enterica
atggcattaaccgataccgctggcggcacgcagaccgatccgggtacaggaaaaccgtcagaaaatccacccgccgatccaccgtcagatggtcccgcttctgaaaaaccacacgacccacccgccgatcccaataagcccactccaccgaaagaagaaacgccgcccggcgcgccggagaaatacgcgttcaccgcccctgaaggtcaggaactcgataccagcgcgctggcgcagttcgaaccagtggcgcgtgaactgaacctgacgcaggagcaggcgcagaagctggtggacgtctatccgaaagtgctggcgggagtgcaacaacagcaagcggagtcatggcagaagcaaacagaagactgggctgcggcagttaaagccgataaagacattggcggtgacaagctggcgtctaatcttggcgcagctcagcgggctatcgacacgttcggtaccaaagaactgaaagagtatctcgatggtacctgcgccagatctctggtcaatgctgcaccgtga

SEQ ID NO: 372384 - DNA, 699 bp, Salmonella enterica
atgggcaagttaggtggtgaaatgaaggcactggcaaagcactgtggcggtagccataaaacggtgaacgattgcattcatatcgtgcagcgtttcgatcatcacttacgggctttgaacgtccatatgcagcgggttgcgcagattaaggtgcgccacattgaaagctatattcatgaaaggttggcgcaggggatcggcaaacgcacgctgcaaaatgaaatggcctcgctgcgcgctgttctgcaacaggccgggcgtaaacaggtggcagagcatgagtggctgactaataaatcgctgggtctggctggtgcatcgcgcagcgggacgcgacaggcgatcacgccggaacattatcatcatgtgctggagacggcccgcatgaaagatccgggactggcggcggcgctggaactggcgaggctgatgggcttacgttcacaggaagcggtgcagagtgtgcaatggatctggggcatggggacgggcgtgggcggtatgtggcgcaggtgtatgggcaaatttgacagctggctaagagcgagcagcggatggagcaggttaccaccgttcacagttagtgaaagactgggcggaggtggtaaatatcaggctgcattaccttcccccttacagtccaaacctgaatccgatagaacgaatgtggaaattaatgaacgaacatgcccggaataa

SEQ ID NO: 372385 - DNA, 1734 bp, Salmonella enterica
ttgaagaaaatattcataacaattatagtttcattatattgcgcgaatatatgtgcaaaacaatcccccagtacagaatccaaacccgttaatttcatcgcccaaattgaaaatatcgattttaataaaaccgccattagcagtgacctgaaacttttactcgccgaccgttattattttaaagataaaacaccctgtaatactaataccctttctgcgcgcgcagaatcaatgggactgacgacagaagaatatattaataaaatacgcagtttaagaccggctattctcgatgaccgttatttttacctgacggtcgatcagtgcgatgctggcggcacgcccatgctgactggaatcgagctatgtaccgaagcgctgtgcggtgccgaatacatgaaaagatcgtctgacttgtggctggatgatgaactgcaaccgacggttaaacgtcaggcaacaacagtagtccatatgcccctcccctatgacaaagagaaaaaattatggaaagtcaccggctggtatctggaatcctcagaagaaacaggggaggtgatgcagagtaaacagatagcctttgaaggctataccaacgaagaaaacttcgctaaccgacaacgtgtttctgtatttaaatctttctatgaaagcggcaatctcaaaaatatttatcattataatgcgcaaaataagcgtgacggaaaagctgaaacttactttgatgaaaaagacaaaatagcggaaacgctgacgtttaaagatggtcaacccgaaggggaatacatcgtataccatgaaaacggagccgttgaaagtaaacgttactttgcccaaggtaaaattaaagatggcgaatgcccacatttttatgataacggcgttttaaaacaaaaacacagctatttaaatcagaaactggaaggcccggcatttgaatatttccctgatgggaaaataaaggggaaatattcatacagaaaaggcaccattgtcggcaccagtacggaatattattctaccggtaaaattcgtggtgtttaccacagaaataaccaaggtgaaaacgacggaacgttcgaacaatacagtgaagagggcaaactcctttctaaagcgacttataaaaatggcaaacagctttctgctcagagctggtatggaaatgggcatcccaaagaagaatcctcttttgatagtgaaggccgtaaacatggtgcggtcaaagaatggttcagcaacggaaagcctgcctcatccaaaatgtataaacatgatgtgttagacggggattccgaaaagtggtacgaaaatggtcaccgcgaatcagtctatccctataaaaacggtatgctaaatggggatgctaagcactggaatgaacagggcaaactcacctataccaccgaatataaagacgataaaaagcagggagccgatcgccgctggagcgaacgtaccggtaaacttgttgaagaggttatgtttgctaatgatgaaagaaacggcctgaaaagagagtttaacgatcgtacgggtaaggtcttaagtgcgctgccctatgtcgatggcgacaaggaaggtacagaagaagcctatgatgaagacggcataaaatacatccgttgttaccacaacgatgaagagctttcagagctatatgcgccgactgacgtcaccaataaggcaaagcagggtgctgagagatcccctcataatttccccaaagcgtaa

SEQ ID NO: 372386 - DNA, 846 bp, Salmonella enterica
atgagtcgtatattaaatacagaaattatcatttcggttatcgaaaaacttgtaaaaaaagcttgttatgaactggatgataatctcatgtgttcttttcgtaaagcatatgataaagaagagtcaaagatcggcaaggaaaccattaagatattaattgataatggagagtatgcaaaaaaagaacaacttgcatgctgccatgataccggcacttgtatcgttataatggaaattggacaacatgtatgctgggaaggtaagccgcttaaagatcaggtgaaccagggtgttcgccagggctatgaaaatggatacttaagaaaatccatggttgcagatccattagaacgtattaatactaatgataatactcctgcaattttacatactgaaattgttgatggtgaccgagtgacaattaccgttatgccaaagggcggcggtagcgaaaatatgggaacttttaaaacattgcttcccggcgatggtattgatggtataaaagattttgttctggaaactgtccgtcgtgtaggaggcaatccatgccctccttatattattggtatcggcgttggcggtacaatggatcactgttcgtggatggctaagaaagcattattacgccctcttggtgagttcaatgctaaaccactttatgcccagctcgaagctgaattattagaggccgtgaataatacagggatcggccctttaggtatgggcgggcgtattacggcgttaggcgtgcatgtcgattactatccttgccatatcactgcactgccagtcgcaatcaatttccaatgtaatgcaagccgccacgctagtgaaatcatttaa

SEQ ID NO: 372387 - DNA, 546 bp, Salmonella enterica
atgatggaattaacattaccattgactaaagagaaagcgaaaactcttaaggtcggcgatatattatttctcactggatttgcttacacctgccgtgacgccgcgcataaaaaaatcgaagtagcgcttagtaacggagaaaaatcaccggtcgattttcaaaaccaaacgatttactatgctggcccctgccctgccagacctggtttacctattggctccaacggtcctacaacggccgcgcgtatggacccatttgtagaaatgatgtttcaacaaggggcaactgcgtttcttggcaaaggcgatcgtgctgattatgtcgctgagctttgtaaaaaatacggtggggtttcgctactcgggattggaggagcgtctgcaattaatacaaaacatgttaaatcagtagaaattgttgcctacgaagaattaggaacagaatccattaagaagttatattttgaccgctatagagtcattgtaggaattgattcggaaggaaatactctccagaagcaggaagtacccaagtacgccaaataa

SEQ ID NO: 372388 - DNA, 1053 bp, Salmonella enterica
atgaattatcagaacgacgatttacgcattaaagaaatcaacgagttattacctccggtcgcgctgctggaaaagtttcccgccacggaaaatgcagcaaataccgttgctcacgcgcgcaaagccatccataaaattctcaaaggcaatgacgatcgtctgctggtggtgatcggtccttgttcaattcatgatccggcagcggcgaaagagtatgccgcccgtttgctggcgctacgtgatgagcttcaaggcgagcttgaaattgtcatgcgcgtctattttgagaaaccgcgtaccaccgtcggctggaaagggctgattaacgatccgcacatggataacagcttccagattaacgacggtctgcgtattgcgcgcaaactgctgctggatattaacgacagcggcctgcctgccgccggcgaattcctcgatatgatcacgccgcaatatctggccgatctgatgagctggggcgccattggcgcgcggactactgaatcccaggttcatcgcgaactggcgtctggcctctcttgtccggtcggttttaaaaatggtactgatggcacgattaaagttgccattgacgccatcaacgccgccggcgcgccgcattgcttcctctccgtcactaaatggggtcattcggcgattgtgaataccagcggcaacggcgactgccatatcattctgcgcggaggtaaagcgccaaactatagcgcgcaacatgttgctgaggtgaaagaaggcctcatcaaagcgggactgacgccgcaggtcatgatcgatttcagccatgccaactcctgtaagcaatttcaaaagcagatggaggtttgcgccgatgtctgtcagcagatagcgggcggtgaaaaagcgattattggcgtgatggtagagagtcatctggtagaaggaaaccagagtctggaaagcggtcagccgctgacctacggtaaaagcattactgacgcctgtattggctgggaagataccgatgcgctgcttcgtcagttgtcggcagcggtaaaagcccgtcgcggctaa

SEQ ID NO: 372389 - DNA, 387 bp, Salmonella enterica
atgaaaatgacaaaactgactacgcttttactcaccgctaccctcggccttgccagcggcacagcgttagctgctgaatctaacgcgcaatccagtaatggccaggcgaactcggcggcaaatgccggtcaggttgccccggacgcccgccagaatgtggcgccgaatgatgtgaataacaacgacatcaataccaacggcaatactaacagcacgatgcagcatccagacggttcaaccatgaatcatgacggaatgaccaaggatgaagagcataaaaataccatgtgtaaagacggtcgctgcccggatattaataaaaaagtggaaaccggtaatggcgtcaataatgacgtgaataccaaaaccgacggtaccacacagtaa

SEQ ID NO: 372390 - DNA, 939 bp, Salmonella enterica
atggcgcactcacactctcatgccgattcacacctgccgaaagataataatgctcgtcgcctgcttttcgcctttatcgtcactgccggatttatgctccttgaggtggtgggcgggatactctccggctctctggcgttgttggcggatgcgggacatatgctcaccgacgcggcggcccttctttttgcgctgctggcggttcaattttcccgtcgtcccccgactgttcgccacacttttggctggctaagactcaccacactggcggcttttgtgaatgccattgcgttggtggtcattacccttctcattgtctgggaagcgatagagcgcttttacacgccacgtccggtggcgggcaatctgatgatggtaattgcggttgcgggtctgctggcgaacctgtttgcgttctggatactccatcggggaagcgatgaaaaaaacctgaacgtgcgcgctgccgcgctacatgtgatgggcgatttgctgggttccgtcggcgcaatagtcgccgcgttgatcattatctggacgggctggacgccagcggacccgattctctctattctggtttcggtactggtactacgcagcgcctggcgtttgttaaaagatagcgtcaacgaattgctggaaggcgcgccggtttcactggatattaatgccttacagcgccatttaagccgggaaatccccgaagtccgcaacgtacaccatgtgcatgtctggatggtcggcgaaaaaccggtcatgacattgcacgctcaggtcattccgccacacgaccatgatgcgctgctggaacgtatccaggatttcctgatgcacgaataccatattgcgcacgctacgattcagatggagtatcaagtgtgtcacggcccggactgtcatctgaatcagacgccatccgggcatgttcatcaccattaa

SEQ ID NO: 372391 - DNA, 720 bp, Salmonella enterica
atggatttttttagtacgcacaacatactgattcatattccgattggcgctggcgggtacgatctctcgtggatcgaagcggtaggaaccatcgccggcctgctctgtatttggcttgccagtctggagaagatcagcaactacttttttggactggttaacgtcaccctgtttgcgattattttctttcagatccagctttatgccagcctgttgctgcaactctttttctttgccgccaatatttatggctggtatgcgtggtcgcggcaaacaaaggataatgaagccgagcttaaaatccgctggctgccgttgccaaaagcaatggcatggctggcgatatgtgtgatagctatcggtttgatgacgcgatatatcgatcccgtattcgccgtcctgacgcgcgtggccgtcgccattatgcagatgctggggttacaggtgacaatgcctgtactgcaaccggacgctttcccgttctgggactcttgcatgatggtgctgtctatcgtggcgatgattttgatgacacgcaaatatgtcgaaaactggctcctgtgggtgataatcaacgtaatcagtgtggtgatttttgctttgcagggcgtctatgcgatgtcgctggaatatctgatcctgacatttatcgccgtgaacggtagtcgcctgtggataaacagcgcgcgggagcgaggatcgcgcgcgctttcccgttaa

SEQ ID NO: 372392 - DNA, 1044 bp, Salmonella enterica
atgagcgtaatgtttgacccacaagccgcaatctacccgttcccgccgaaaccaacgccgttgaacgacgatgaaaagcaattttatcgtgagaaaatcaagcgtttgctcaaagagcgcaatgccgtcatggtggcgcactactacaccgatccggaaattcaacagttagcagaagaaaccggcggctgtatttccgactcgctggaaatggcccgtttcggcgcgaagcacgccgcatccacgttactggtagcgggcgtacggtttatgggggaaaccgccaaaatcctcagcccggaaaaaaacattcttatgcctacgctggcggcggaatgttcgctggatttaggctgcccaatagacgaatttagcgctttttgtgatgcgcaccctgacagaaccgtagtggtctatgctaacacctcggctgctgttaaagcgcgtgcggactgggttgtgacctccagtatcgccgtagaactgattgagcatctggatagtttgggggaaaaaattatctgggcgccggacagacacctggggaattacgtgcaaaaacagaccggggccgatgtactgtgttggcaaggggcgtgtatcgtgcatgacgagtttaaaacccaggcgttgacccgtttaaaaaaaatctatccctatgccgctcttctggttcaccctgaatcgccgcagtccattgtcgagatggccgatgcggtgggctccaccagtcagcttattaaggcggcaaaaacgctgccgcacagacagcttatcgtggcgaccgatcgcggcatcttctacaaaatgcagcaggcggtgcctgaaaaagaactgcttgaagcgcccacggctggcgagggggcgacctgccgtagctgcgcgcactgtccgtggatggcgatgaatggcctgaaagccattgctgaagggctggagcagggaggcgcggcgcatgaaatacaggttgatgcggcgctacgcgagggcgcattactgccgctcaaccggatgctggattttgcggctacacttcgggcgtaa

SEQ ID NO: 372393 - DNA, 531 bp, Salmonella enterica
gtgcaggtcaccggcggcaacggcgccggaaaaaccaccctgctgcgcctgctgaccgggctggcgcgcccggacggcggggaggtgtactggcagggcgagcccctgcgccgcgtgcgcgacagcttccatcgcagcctgctgtggatagggcaccagccggggattaaatcccgcctgacggcgcgggagaacctgcactttttccaccccggcgacggcgcgcgtctcccggaggcgctggcgcaggccgggctggcgggatttgaggacgtgccggtcgctcagctctcggccgggcagcagcgccgggtggcgctggcccgcctgtggctgacccgcgccgcgctgtgggtgctcgacgagccgttcaccgccattgacgttaacggcgtggcgcgcctcacccggcggatggcggcgcacacggcgcagggcgggatggtcattctcaccacccaccagccgctgccgggggccgcggacaccgtccgccgcctggcgctgaccggcgggggggccgggctgtga

SEQ ID NO: 372394 - DNA, 657 bp, Salmonella enterica
atgtggcgtgtcttctgtctcgagctgcgcgtggcgttccgccacggcgcggacatcgccggcccgctgtggttcttcctgatggtcatcaccctgtttccgttaagcgtcgggccgcagccgcagctgctggcgcgtatcgcgccgggcatcatccaggtggcggcgctgctggcctcgctgctggcgctggagcggctgtttcgcgacgacctgcaggacggcagcctggagcagctgatgctgctgccggtgccgctgccggcggtggtgctggcgaaggtgctggcccactgggcggtgaccggcctgccgctgatgatgctctccccgctggtggcgctgctgctggggatggacgtgtacggctggaaaatcatggcgctgacgctgctgctcggcacgccggcgctggggtttctcgccgcgccgggcgtcgcgctgacggccggcctgcggcgcggcggcgtcctgctgggcattctggtgctgccgctgagtgtcccggtgctgattttcgccaccgcggcgatggacgcggcatcgatgcatttacccgttgacggctatctggcggtgctgggggcgctgctggcgggcagcgcgacgttaagcccgttcgccaccgcggcggcgctgcgcctcagcgtgcagtag

SEQ ID NO: 372395 - DNA, 747 bp, Salmonella enterica
gtgacaacgatgtggaaaacccttcatcagctggcggcgccgccccggctgtatcagatttgcggcaggctcgtgccgtggctggcggcagccggcatcatcgcgctggccaccggctgggtccggggctttggtttcgccccggcggactaccagcagggggagagctaccgcattatgtacctgcatgtcccggcggccatctggtcgatgggtatctatgcggcgatggcggtggcggcgttcaccgggctggtctggcagatgaaaatggccagccttgccgtcgcggcgatggcgccggtgggggcggtgtacaccttcatcgcgctggtcaccggcgcggcgtggggcaaaccgatgtggggcacctggtgggtgtgggacgcgcgcctgacctcggagctggtgctgctgtttctctacgccggggtcatcgccctgtggcacgcctttgacgaccgtaaaatggccgggcgcgcggcgggcattctggtgctggtcggcgtggtgaacctgccggttatccactattccgtcgagtggtggaacaccctgcaccagggctcgacgcggatgcagcagagtatcgacccggcgatgcgctcgccgctgcgctgggccatcgccggcttcctgctgctctttatgacgctggcgctgatgcggatgcgcaacctgattttactgatggaaaaacgccgcccgtgggtgagcgaactgatactgaaaagggggcaccggtga

SEQ ID NO: 372396 - DNA, 174 bp, Salmonella enterica
atgggcgggtacgccttttttgtctggctggcggtggcgatgaccgtggcgccgctggtgctgctggcgctgcacacggtgctgcagcgccgggccattctgcgcggcgtggcgcagcagcgggcgcgcgaggcgcggatgcgtgccgcacaggcgcaacaggaggccgcgtga

SEQ ID NO: 372397 - DNA, 480 bp, Salmonella enterica
gtgaacctgcgacgtaaaaaccggctatgggtggtctgcgcggtgctggcgggcctggcgctgaccaccgccctggtcctgtacgcgctgcgcgcgaatatcgacctgttctatacccccggcgaaatcctctacggcaagcgcgagacgcagcagctgccggcggtgggccagcgcctgcgcgtcggcgggatggtgatgcccggcagcgtcaggcgcgacccggactcgctgaaggtgaacttcagcctctacgacgccgaagggtcggtgacggtgagctatgaggggatactgccggacctgttccgcgagggacagggggtggtggtgcagggcaccctggagaagggcagccacgtcctggcgcaggaggtgctggccaagcatgacgagaactacaccccgccggaagtggaaaaggcgatgcaggaaaaccaccgccgcccgcaacgcgctgataaggacacctcatcatga

SEQ ID NO: 372398 - DNA, 1932 bp, Salmonella enterica
atgatgcctgaatacggccacgcgctgctgtgcctggcgctcggcgtggcgctgctgctgtccgtttacccgctgtggggcgtggcgcgcggcgacgcgcggatgatggcgtcggccggggtgttcgcctggctgctgttcatctgcgtggcgggcgcgtttttcgtgctggtgcacgcctttgtggttaacgacttcaccgtggcctatgtcgccggcaactcgaacacgcagctgccggtgtggtaccgggtggccgccacctggggggcgcacgagggctcgctgctgctgtgggtgctgctgatgagcggctggaccctggcggtggcggtgttcagccggccggtgccggcggatatcgtcgcccgggtgctggcggtgatggggatggtctgcgccggttttctggcgttcatcctgttcacctccggcccgttcgcccgcacgctgccggcctttccggtggaggggcgcgacctgaacccgctgctgcaggacccggggctgattttccacccgccgctgctgtacatgggctatgtcggcttctcggtggccttcgccttcgccatcgccgcgctgctgagcgggcgtctggacagcgcgttcacccgttttgcccgcccgtggacgctggcggcgtgggtgttcctgacgctgggcatcgtgctcggctcggcgtgggcctactacgagctgggctggggcggctggtggttctgggacccggtggagaacgcctcctttatgccgtggctggcgggcaccgccctgctgcactcgctggcggtcaccgaacagcgcgccggctttaaggcgtggacgctgctgctgtccatctgcgccttctcgctgtgcctgctgggcaccttcctggtgcgctccggggtgctggtgtcggtgcacgccttcgcctccgacccggcgcgcggaatgtttatcctcgcctttatggtgctggtcaccggcggctcgctgctgctgttcgccgtgcgcgggcacagggtgcgttcgcgggtgaacaacgcgctgtggtcgcgcgagtcgctgctgctcggcaacaacgtcctgctgatggccgccatgctggtggtgctgctgggtaccctgctgccgctggtgcacaaacagctggggctgggcagcatttcggtgggggagccgttctttaacaccatgttcacctggctgatggtcccctttgccctgctgctgggggtggggccgctggtgcgctggggccgggaccggccacgtaacatcaggaaactgctgtgggctgccgttgtcactaccctggtgctgtcggtacttttgccgtggctgctggaagataaaatcatcgccatgacggcggtggggatggcgatggcctgctggattgcggtgctggcggtggccgaagccgtacagcgcgtgtcccgcggcacgaaaacctctctcagctactggggaatggtggcggcgcacctcgggctggcggtgacgattaccggcatcgccttcagccagaattacagcgtggagcgtgacgtgcggatgcgggcgggcgacagcgtgaccattcacgactaccgcttcaccttccgggaggtgcgggacatcaccgggcccaactaccgcggcggggtggccctcatcggggtgacgcgccacggcgagccggaggcggtgctgcacgcggagaaacggctctacaacaccagccggatggtgatgaccgaggcggcgattgacggcgggctgacccgcgacctgtacgccgcgctcggggaggagctggacaacggcgcgtgggccgtgcgcctgtactacaaaccgtttgtccgctggatatgggccggggggctgctgatggcgctgggcgggctgctgtgcctggtggacccgcgctaccgccgccgtaaaccattgccggaggccggatga

SEQ ID NO: 372399 - DNA, 558 bp, Salmonella enterica
atgaaacgcaacgtactgttattaccgttactgatttttctgctgattgccgcggcgctgctgtggcagctgacgcgcaacgcgcagggggatgacccgacgaatctcgaatcggcgctgaccgggaagccggtgccggcgttccgcctggaatcgctggagacgccgggtcagtactatgaggcggaggtgctgacgcaggggaaaccggtgctgcttaacgtctgggccacctggtgcccgacctgccgcgccgagcatcagtacctgaaccagctttctgcgcagggtatccgggtggtcgggctgaactataaggacgaccgggcgaaggcggtggcctggttaaaggaactgggcaacccgtatgcgctgagtttatcggacagcgacgggatgctggggctggacctgggcgtgtacggcgcgccggaaaccttcctcatcgacggcagggggattatccgctaccgccatgcgggcgatttgaatgcccgggtgtgggagagtgaactgaaaccgctgtgggacagatacagccgggaggcggcgcaatga

SEQ ID NO: 372400 - DNA, 1044 bp, Salmonella enterica
atgagactgttaccgggcatggtgatgctgatgctggtgctggttatctccgggtcagcgcgggcgaccaccgacgtgatgccgtttaaagatgaagcgcaggagcagcagttccgccagctcacggagcagctgcgctgcccgaaatgccagaacaacagcattgcggactcgaacgcgatgatagccaccgacatgcgccgcagggtgtatgacctgatgcaggaggggaagagccgccaggaaatcatcgattacatggtggcgcgctacggcaacttcgtcacctacgacccgccgctgaccccgttgacggtgctgctgtgggtgctgccgctggccgccatcgtagcgggcgggtggataatcgttgcccgcacgcgccggcgggtgcgcctgcgccgggagccgctgccggcggacaccccggtttgcggcgcgcgcgccgggtggggcgtttacgtgccgggggccgtcattgcgctggcggtcggcgccggcagctacgccctgaccggcagctatcagcaggtcagggcctggcagcaggcaacggcgcagacgcccgggctgctggcgcgggcgctggacccggcggcgcagccgctgaatgaagaggagatggcgcggctggcgctggggctgcgcacccgcctgcagaatgatgccggcaatgttgagggctggctcatgctggggcgcaccggtatggtactgggtaatgccggtaccgccaccggggcgtatgcgaacgcctaccgtctggccccgaaaaacagcgatgcggcgctgggctacgcggaggcgctgacgcgctcgtccgacccggaggataaccgccgcggcggggagctgctgcgtcagctggtgagccgcgaccacacggatatccgggtgttaagcctgtatgcgtttaacgcctttgagcagcggcgctttggcgaggcggtggcggcctgggagatgatgctgaaactgttgccggcagacgatacccggcgggcggtgatagagcgcagtatccggctggcgcaggagaaataa

SEQ ID NO: 372401 - DNA, 597 bp, Salmonella enterica
atgggtgaggtacagaccaaagccccgctggacagtctggcactgaccggtacgccaacggcaccaatgccggaaaccacagctgcaggtattgaaattgccacggcagcgtttgtggctgcgaaagtggcgcagttggttggttctgcgccggaagcgctggacaccctgcaggaactggctgacgcgttgggaaacgatccgaactttgccatcacggtactgaataaactggcgggcaagcagccgctggacgaaaccctgacggcgctgtcaggaaaaagcgctgatggttttatcgaatacgttggtttacgggaaacgataaatcatgccgccgatgcgttacataaatcacagaacggtggcgatattccggaaaagccgctgtttgtacaaaatatcggagcgctccctgcatcaggtacggctgttgcagcgaacagactggcatcacgcggcgggcttccggcactgactggtacgacaagaggcagtgatagcggcctgataatgggcgaggtttacaataacggttacccaacgcaatacggaaatattttgcgtctgaccggaaccggtgatggagagtattaa

SEQ ID NO: 372402 - DNA, 285 bp, Salmonella enterica
atgtttcgtgatggttcattcctgcaaattggctggccgtccataaccgttttttcttcgtcggattacaagcgggtggcgctgaccgactatgaccgtttccctgaagatatcgatggcgagggagatggtttttccctggcatccaaacgtaccaccacctttatgtctgcgggggatgacaccggcagagagttcgcctggtcgggaaatcaccgatgtgaaatggcggcgttcttcgccgcacgaggccccacccacgacaggcattctttctctttataa

SEQ ID NO: 372403 - DNA, 180 bp, Salmonella enterica
atgacggggaataaatatggctccgcagcggcagtacgccgggaggttgctgaatatctcaggcctccacgcagaatgccggtagcggaaggaataaaacaatttatgtttgttccccgcggtgccaatacggcggttccttgggatgacacgttagcgtctcagtccttcccgaaatga

SEQ ID NO: 372404 - DNA, 492 bp, Salmonella enterica
atggacggcgaactgaagaacctcaaatgcaatatctgtcagcttgccgctattacagggttacatcgacagacggttgtcagtcgcctctcgggcgttcccctggcaccgggaagcaatgaaaaaaacaagctgtatctcctgacggatgtgatccgcgtactgatggaaacgcccgtttcccaggctgctgaacatcaggacccgaataaaatgactccaaaagagcgtaagaactggtttgactccgaaaaggggcgtttctggctggaaaaagagatgaagcaggtcgtcccgttgccggaagtccgtcaacaaatggcggcgatagtcaaggccattacgcaggtacttgaagtctggtcggataaactggaaagggataagggatggtctgcggatcagctaaacgaggcccaggatgtggtggatgaggccagaatactgttagttaaggcaatacaggagaccgcagacgatgacggggaataa

SEQ ID NO: 372405 - DNA, 168 bp, Salmonella enterica
atgaaaaacatcatcactattatcgtagccattattatcgttttttatgcaggtatgtggtcgcagaaattcctgatggaagatgagtgccttgattcaggtggttcatacaatgaaaatggaatttgcaatattgcaggcagtcatcaggatgttccccctaagtaa

SEQ ID NO: 372406 - DNA, 534 bp, Salmonella enterica
atgaatctgttatctgctcttctgaaaagatactggttgcagctggtgtttattttgctgatggctggtgcgtttatcgccggtaatgtctggagtgacaggggctggcaaaaaaaatgggcagatcgcgacagcgctgaatcctctcaggaagtcaacgcccagaccgccgcccgtattattgaacagggccgcgttattgcccgtgatgaggctgtgaaagatgcacaagcgcaagccgctaaatctgctgccactgctgctggcctgtctgccactgttagccagctgcgtaccgaagcaaaaaaacttgccacccgcctggacgccgcaaagcacaccgcaaatcttgccgctgccgtcagaagcaaaacaaccaacgccgacgccagaatgcttgccaacatgctcggagatattgcagaagaagctaaacattatgctggaatcgctgacgagcgctaccgggcaggaatgacgtgtgaacgagtatatgattcggtgagagagtcaaataattacaggaggcattga

SEQ ID NO: 372407 - DNA, 231 bp, Salmonella enterica
atgaacggcaagaaagctttcgcaccacgttcggcgaagatcaggattaccgggctggagaattacaccagatgtggcgttgcactgaaactggatctagtggcgaatccaggacagcttgagctagaacgtcatgccgcccgatccgcagcgtggctttttgtgactaaagggtgtctgaaatattccggcgacctggtacgtgttacgcagatcatcaacggagggtag

SEQ ID NO: 372408 - DNA, 654 bp, Salmonella enterica
gtgcctgataacaccccaacaacccatgaagaaaatgcagcaaggcttagtcaggcgggcaaatgtctgcgggatattgaggcagggagatttcagtgtgatgaagaaaaaccgcaaccgacaggcgaactggcagatgaaccagcaacgcctgaagcagtggaacaggacacaactgaacatcatccggccccacagccgctggagaatgaaccacctgtaagccagacagaagcaggctaccagaaaatacgggcagaactgcacgaagcacgtaaaaacattccacccaaaaacccggttgatgttggtaaacaactggcagccgcgcgcggtgaatatgtcgaaggcatcagcgacccgaacgatccgaagtgggttcataacaattacagcgcctcaaatcagggtgaaaaagaagaagtggtgcaggaggaaaaacaaccagcagcagagccggaggctgtcaccagaaacgcggacgggactttcgatgtatcagcgctattcccgcccccctcaaaccagaccgaaaaaacggaagccagaacagaaagagatggagaaacgccgaaagagagcaaccagcaggaaacggctggcgatacaggacaggaaattacaacggacggtggatcaggtacaacttcatag

SEQ ID NO: 372409 - DNA, 570 bp, Salmonella enterica
gtgtccgcatggattgatcgctatgaggttttattacagcgccggagtctgtcggttaatacctacaagattcgcagtaatcaattagcgaccgtacgcgaaaaaatgggggaaatgatactggcagaggtgaccacgcggcatattgctgagtttctggagtcatggatcgcggaaggtaaaaacacgatggcgggggcgatgaggtctgtactatctgacatgtttcgtgaggcaattgtggaaggaagaataacaacgaatccggttgagccaacccgagcacctgaaattaaggttgccagggaacgcctgcaactggaaacatataacgccacgcggacggcggcagaatatctgcctgtgtggtttcctcttgcgatggatctcgcgctggttactggccaacgccgtgaggatatagttaacatgaagtttagtgatatcgttgatggtcgcctacacgtaacccagataaagacaggaatgaagatagcattccccctatccctgacccttcaggcgccagggttacgtccgggacggttatcgatcgctgccgactggtaa

SEQ ID NO: 372410 - DNA, 927 bp, Salmonella enterica
atgacgccttacctacagtttgatcgcagccagtgggctgcgcttcgcgattctgtgccgatgaccctgaccgaggatgagatcgcgcagttaaaaggcattaatgaagatttatcgctggaagaagttgcagaaatatatttacctctctcccgtttgctaaatttctatatcagttcaaatctgcgtcgtcaggctgtcctggaacagtttttgggcactaacggccagcgaatcccttacatcatcagtatcgcgggcagcgtcgcagtgggtaaaagcacgacagcacgcgttctgcaagcgttgctgagtcgctggccggaacaccgccgtgttgaattgattaccactgacggcttcctccacccaaaccaggtgttgaaagaacgcgggttaatgaagaaaaaggggttccccgaatcgtatgatatgcaccgactggtgaaattcgtttctgacctcaagtcgggcgtaccgaacgtgacggcgccagtctattctcatttgatttacgatgttattcctgaaggggataaaaccgtcgctcaacctgatatattgattcttgaaggtttgaatgttttacaaagcggtatggattatcctcacgatccgcatcatgtatttgtctctgatttcgttgatttctctatttacgttgatgcgccagaagaacttcttcagacgtggtatatcaatcgcttcctgaaattccgcgaaggggcgtttaccgatcctgactcttatttccacaattatgcgaaattatctaaagaagaagctgttaatacagcgacttcgctttggaaagaaattaactggttgaatttaaaacaaaatattttacccacgcgagaacgtgccagccttattatgactaagagcgctaaccatgcggtggaacaggtaagattgcggaaataa

SEQ ID NO: 372411 - DNA, 963 bp, Salmonella enterica
atgaaagatactaccgttcccctgacgctgatctcactacttgccgacggagagtttcactcaggcgagcagttgggtgaacggctgggaatgagccgcgcggcgattaataaacatatccagacattacgcgactggggagtagatgtatttaccgttcccgggaaaggatatagcttaccggaacccatccagttactggatgctgaccgtattcatagccaactggatagcggaaacgtggcggtattgcccgttatcgattcaaccaatcagtatttacttgatcgaattggcgagctgcgctcaggcgatgcctgtgtagcagaataccaacaggcggggcgtggtcgtcgcgggcgtaaatggttctcaccgtttggcgcgaatctatatctttcaatgtactggcgtctggagcagggccctgcggcggcaataggcctgagtctggtcattggaattgtgatggcggaagtgctgcgtgaactgggcgcagataaagttcgtgtgaagtggcctaacgacctttacctactggaccgcaaactggcgggtattctggtcgagttaaccggtaaaacgggcgatgccgcacaaatagtgattggcgctggtattaacatggcaatgcgtcgcgtagaagaggacgtgataaatcagggatggatcacactacaagaggccggaattacgctcgaccgcaatatgctggccgcaaagctgatttataagctacgtgctgcgcttgagctttttgagcaagaaggtctttctccttatctttcgcgctggaaaaaactggataattttattgatcgcccggtaaaactaattattggtgacaaagaaatatttggtatttctcgcggcattgatactcaaggcgcattattgcttgaacaggatggcgtgattaaaccctggatgggcggagaaatatcgctgcgaagcgccgaatag

SEQ ID NO: 372412 - DNA, 1029 bp, Salmonella enterica
atgacccactccctaaaaccctggaataccttcggcattgatcattgtgcaaagcacatcgtatgcgctgaaaacgaacaacaactactgagcgcctggcagcaagcaactcgtgagggactgccggttatgatcctgggtgaaggaagcaatgtcctgtttctggaaaattacgccggcaccgtgatccttaaccgcctgaaaggcattgaggtgaatgaaaccgcggacgcctggcacctacacgtcggcgcaggcgaaaactggcatcagctggttcgctacgcgctggacaacaacatgcccggcctggagaatctggcgctcatccctggctgcgttggttcctcgcctatacagaatattggcgcgtatggcgtagaactacagcgcgtctgcgactacgttgactgcgttgaactggaaacgggaaaacgtctgcgtttgtccgcggcggaatgccgtttcggctatcgtgacagtatcttcaaaaatgaatatcaggatcgcgttgcgatcgtcgcggtgggtctgcgtttgtcaaagcaatggcagccggtgttgacctatggcgatcttactcgtctggacccgaaaacggtcaccgcgcaacaggtgtttgatgctgtatgccatatgcgcaccacaaaattgccggatcctaaagtgaatggcaatgcgggcagcttttttaaaaatcccgttgtcgcagccgatatcgctatggaactgttagaacgatttcccaacgcgccgcattaccctcaggcagacggctcagtaaagctggcggcaggctggctgatagatcaatgtcagttgaaaggcgtcaccattggcggcgctgcggtgcatcgccaacaggcgctggtattgattaatgcgaatgatgcgacaagtaaagatgtggtggcgctggcgcatcatgtccggcaaaaagtgggtgaaaaatttaatgtctggctggagcctgaggttcgctttattggtcggtccggagaggtgaacgctgtggagagcattgcatga

SEQ ID NO: 372413 - DNA, 891 bp, Salmonella enterica
atggaaattagacaattagaatattttgtaagcgcttctttgttaggtaacttaaccagagttgctgagcggcattttgtttctcaacctaatatcaccattgctattaagaagttagagactgaattaggggtgacattatttgatagaaagaaaaataaacttgtccttactgaggagggcatgtttttcttacaaaaaattgaacctatccttattgcgttaaaaaatagcgtagcggaaatgaaagattatcgtaatgaaaatggtggcatagtaactttggggatcccaccgatgataagtttgtttcttttttcaccgctcttcaagcatttccgagagatttatccagagatggaactctctcttgttgaagaggggacttttggtttacatgataaactttctgctggagagctggatcttgctattgttattattaatgactgtccaaaagaattagttacggtaccattaatgactcagcagcacgtggtatgtatgtcagataaacatcccctggcaaaaaaggatagtatcgattgggaagatctacaatatgagccattgatactaatgaaaaaagattcctggcatagaaaaacgattattgaagaatgtacaaagcgaggaattcatacacatatttttctatcatcaaacagggttcaaaccaacatagatctggttgctaaaaatgaaggaatttctttcattttggacgctgtcgatcttaaagccgaaaaagtaataaccaaggccatgactgagccgacttatgttacgattggtttggcctggaagaaagataaatatttatcatatgcaaccagagcgttaattaaatttattgaggattatattaaagaacattttacaattaaataa

SEQ ID NO: 372414 - DNA, 927 bp, Salmonella enterica
atgcaatatcggcatcacctcgaactaacatggctcgaagactgtctggctctaaaagaaacgttgaatttctcaaaagcgtctgcctcaagatatgtgactcaacccgcatttagtcgtcggatacaatctctcgaagaatgggtgggtacgcccctttttgaaagaagtaaacggggagtcacccttaccaaggccggagaagtatttacagaccagcttcccgaactgatccactccttgtacacattgaaaagtgatacccttgaggctgcaggtaataaacaacctagtcttgttttttcagcaacgcatgctttgtctttctcttttgtaccgcacttgttaaagcaaagtgataaaattgcaaaatttggttcatttcgtcttttatctgactcattgaatgcgtgcgaaaaaatgatgcggcagggagattcacaatttttgctgtgtcaccatcacccacatatgcatctaaatttaaataaaaataactttatgagcattcgtcttgggtttgatacattaattccattcagtaaaccagactcagaaacgttaaaaccgttgtggaatataaataataagattcaattcccttacctttctttttcatcacaatcaggtctgggaagaataatagcaaatacagcgtctattaacagaattacccataatataaatgttgcctttgtggccgatctggcagcaacactattggcaatggtcagatctggcgatggtgttgcctggatacctcaaagccttgccaggcaagatatagaggctaaaactattgttactgcagcggaaaaagaaagcaatttatgggtacccatagaaataagactttatagaccagccaagagaatgcctccagatgccgaagagctatgggaaatttttgttgaagaacaaatataa

SEQ ID NO: 372415 - DNA, 1044 bp, Salmonella enterica
atgtcaccagcgattattactttgttggttttagtggttgcaataattatctttgttagcgatcgtcttcctatgggattagttgcatttatggtcccaatggcactttattttaccggtgttatcgatgctaaggatatttttgcttcaatcgtaaatgcgaatgttattcttatcgtcgccatgtgtttactcggtgcggcattttttaaaacaggtttggcatggcaatcaagtaaaattttactaaaatatgctaaaacagaaagaagccttagtgtattgatttttcttattggtggagttatgtctgcctttgtttctaatagcggaacagttgctgtgctaattcctattgttttaggtattgccgccagtagtcagattaagcctattaaacttcttatgcctctggtttttggggcaacaatcggtgctgatatttctattatcggttcgccaggaaatctgattgctaaaaatactattgaaacttttagtaagggaagtctgtcggtgccatttttcgaatacgctaaaattggtattcctttgctgattgcatgctctatatttctctatttcttcggttcaaaactcatcgcagatcgtgatggaaatacacaatctgattctcaaatggattatagccaaattccggcctggcatagaaatttaactttagccgtttttattctgtctatcgctggaatggtggcaactgattatattaagtttctgcctccaatgcatattattgcgtgttgtgcggctattgttcttgtatttgctggcgttttgacacaaaaggaaacttttaattcttttgaaacactaactgttttcatgcttgcgtttatgatgcctttaggagccgcgctgaattctactggtgctggagaaatgattgctaatgccgttatttcagtaaccggagattctggcgttatgattattatggcgtcattgtggatacttacatgggctttgactcaagttatgagtaacactgcagcatgtacgttgttatgcccggtaggatga

SEQ ID NO: 372416 - DNA, 249 bp, Salmonella enterica
atgaatagttcggtgctattaggtgaaggcttcaccctgatgttcctcggcatggggttcgtgctggcgtttctgttcctgctgattttcgccatccgcggcatgtccgccgccgtcaaccgcttcttccctgaaccggctccggcgccaaaactggcacctgccgccgccgcgcccgcggacgactttgcccgcctcaagccggtgattgccgccgctatccaccaccatcgccgccttaacccttaa

SEQ ID NO: 372417 - DNA, 285 bp, Salmonella enterica
gtgcgtcgtatcggtgccgcgcgagcgtttgatggcgcagttactatcggctgtgatgataatccgtggacgacggcggagtttatcgtctggctggagtctcagggcgcattcaatcacccttactggatgtgtcgtggctcctggtcttacgcttataacaaaatcatcacggatactggctgcggtactatctgtctcgctggcgcagtgattgaggtaatgggagtgcgtggcgcgatgactattcgggtgacaacgtcccattcagtatctggttggtga

SEQ ID NO: 372418 - DNA, 189 bp, Salmonella enterica
atgctgatgacgaggcggctgccgccgttctggctgtgtcagccgacgccgcgctggctgatgcctccccggcttttgtggtcgccgtacctgcgctgctctccgcagatgctgcggatgaagctgccgaccaaaattccccttgaaaaccagcctgtcagggctggttttttttatgcctacaattaa

SEQ ID NO: 372419 - DNA, 558 bp, Salmonella enterica
atgaagagaatatttatatatctattattaccttgtgcattcgcatgttctgctaatgataatgttttttttggcaagggcaacaagcatcagatctcttttgctgcgggagaaagtataagaagaggaggggttgagcacttatatacggcttttctgacatacagtgaacccagcgattttttctttttacaggcaagaaataatctggagttaggaggatttaaggctaagggtagcgatgattgcagtaaacattctggcagcgttccctgcaataaatataaccagggcgtattgggtatctcgaaggatgtggcgctggttcatttcgctggtatctataccggtattggtctgggggcttatataaaatctaagtcgcgagatgatatgcgtgtcaattctgcatttacctttggagaaaaagcgtttcttggctggaactttggggctttttctacagaagcttatatccggcatttctcgaatggatcacttacggataaaaattcagggcataattttgtaggtgcttcaattagttataatttctga

SEQ ID NO: 372420 - DNA, 648 bp, Salmonella enterica
atgcctgaagtaacaccttttcaggtgcttattgtggacgaccatccacttatgcggcgaggtattcgtcaattactggaactggacccggcttttcatgtcgttgccgaagcgggtgacggggcgagtgcgatcgatctggcgaatcgcattgagcccgatctgatcctgctggatctgaatatgaaaggtctgagcgggttagataccctgaacgcgctacgccgggatggtgtgacggcgcaaattattattcttaccgtctcggattccgccagcgacatctacgcgctgatcgacgccggcgccgacggttatctgctcaaagatagcgatccggaagtgctgctggaggccattcgcaaaggcgctaacggcggtaaagtctttagcgatcgggtcaatgaatatctgcgtgagcgcgaacggtttggcgcgcaggaagatccctttagtatcctgaccgaacgagagttagatgtcttgcatgagctggcgcaggggctttctaacaaacagattgcgtcagtactgaatatttctgagcagacggttaaggtgcacattcgtaatctacttcgcaagctaaacgtgcgctcacgcgtcgcggcgaccattctatttttacaaacacgcggaatacagtaa

SEQ ID NO: 372421 - DNA, 387 bp, Salmonella enterica
atgcggaaaataaaaacaaagatctatatacctacaactttaacaggaaacatgggtagacactatatccctgttttagaggatttaagaaaaacaatatacagcgacagaatattatcaaggcttgcagatagcggcaatattgttatccacagttcagttgggtatccggttgctaaatataaaaacacggggattagcataggcatagaaccattaaatccaatgataagacaagatctaactcttggatatatcgtggtaatcagaaacggaaaagcatcacaggaagttaatggtttacttaacaggtcattgccaaaagcgataagcacttttaaggaccatattaatgaatatgaagcagcaaaaagtaaaatgctataa

SEQ ID NO: 372422 - DNA, 963 bp, Salmonella enterica
atggaaggtcagttaattttttgttccgattcaatactacggtttcagtccgattacgatgaaaccgctgccgttccattgctatccatccagaacgtcatagccgataccgatccgttctttcttctccgtttcttccaccataccgttctgattgaagaaggaacaacgctggcaagtatctttctggcaatagaaccgtggaaggctttgttagcggcttatctggacagagatgttggtgcttatatagatgaggtaagaaaaccgtccgggccaacgacatgggatattgaatggattgggattgatcgccgtagcatggtttaccgcgcttataaacgtcaggagatgcaggatggagaggatttttctgactatttaaaccgggaacgcgttctgacagatgaatttgagattgaaagtggctgtgaggcttctggcttcattaaaggtgataaagaacgatggagcatcagtggtgatgttcacgagataaagaatctgcctgtaatcctctatagcaaacagacattgatgacttcaccgaaagacggtttgttgaagaaaaacatatcgggtgtgaagagttcgaagcacagttgcttcatttatggcgatacctcgttttctttcagtgaggttatggaagccatcttcattagcgggctgttcttctatgcaccaaaagacgccgccagcagtcttgatgagctgaaagcgagtctggctgaactggaagaagaacgcgctgaaaatccaaatgcggagtcgactggcaatgaaacagatgaagaacctaccatcgttgtagccgaaggtgcatttgattcgctcgctgctcacatggagtctgaaaaagcggagtggcaatccattaagaagttatgccagcaagaaggtgggctgcccatacgcattggcaacattaaaatgtctgagtctattcagattataccttag

SEQ ID NO: 372423 - DNA, 864 bp, Salmonella enterica
gtggcgaatattacccgcctcatctttcaccgttaccgtcagcgtatagtcgccatcagtccacgcgctgccgggtacaaaacgccactgcccgttagtctgcgtcagctccacctcctcgctgtgaccatcgcgcatcacctgcacgacgacctgagtcacgtcagaatcaataccgccgataataaaacccggcgttttaacgttagtcttattatcgttggcggtgccgctatcatctgcgctatccagcgtgatggtcggtgtcgacaatgtggtatcaatgataaaattgagcgtttccgtcgccgtgttgcctgcaacatcggttgctttcactgtcagggtatacgtattttcgaccagatctgtcggccatatatactcccaaacgccgtcagacgtcagcgttgcgttaacccagttgatgccgccatcaagactcagttgcacagagttcacgtccgtcggtaccgtaatatgaaactgtggacgtgcttcattggtcaggttatccccgacaatacccgtgtcattaagaagctcaatgcgatcaatagacgtttgcgtatcgatagtcaccgtcagcggcgcagaataatttgtattacccgccttatcttctacctttaccgtcaacgtatagtcgccatcggtccaggctgcgcccggcgtaaagcgccacacaccgccgttcttaatcaactctatctgttggttcttaccatcatgcgccaccgtcaccaccactttggtcacgtcggcgtcgatattaccgagggtaaagcctggcatcttaacgttggtgatgttatcgccagcggcgctatcatccgcgctgtccagggtaatagtcggttctga

SEQ ID NO: 372424 - DNA, 768 bp, Salmonella enterica
gtggtcagcagatttgaactgctcaggacgctcgcgtatgacggatgggaggaaaacattcattccggcctgcacggggaaaactacttctgtattctggatgaagacagtcaggagatattatcagtcaccctggatgacgtcgggaactataccgtaaattgccaggggtacagtgaaacacatcacttaaccatggcaacagaaccgggagtggaacgcacagatataacttacaacctaaccagtgatattgatgctgcggcctatctggaggaattgaaacagaatccaattataaataataaaataatgaatccggtagggcagtgtgagtcattaatgactcctgtaagcaattttatgaatgaaaaagggttcgataatattcgttatcgaggtatatttatctgggataaaccaacagaggaaataccaacaaatcattttgcagtggttggaaataaagaagggaaagactatgtgtttgatgtttcagcccatcagtttgaaaatagaggtatgagtaatctgaatggcccattaattctttcagcagatgaatgggtgtgtaaatatagaatggcaacaagaaggaaacttatttattatactgattttagtaattcaagtatagcagctaatgcctatgatgcattaccacgagaattagaatcagaatctatggcagggaaagtttttgttacatcaccgagatggtttaatacctttaaaaagcaaaaatattccttaataggtaaaatgtaa

SEQ ID NO: 372425 - DNA, 249 bp, Salmonella enterica
gtggagatcgacaacaacatctgtgaaaacgccttacggtgcgtggcgctgggccgacgtaactatctgttcttcggctcagacaggagcggcgaggcagcggcgatcatctacagcctgctgggtacgtgcaaactaaacggcgtagagtccgaggcatggttacgcgacgtgctgtggaaaatcagcgactggtcatcgaaccgggtgcacgaactgctgccctggaacctcgaaaccgtaaaataa

SEQ ID NO: 372426 - DNA, 627 bp, Salmonella enterica
atggttacgctttggggaaattatgaggggatctctcagtatctggcatatctggccgacgaagccgatcgtaatattgcttatgaccctcagcctataggccggtataacgtggcgcccgggactaaagtcctgctattgagcgaacgcgacgagcaattacatctcgacccggtgatttggggttacgctcccggatggtgggataaagctccacttattaacgcccgtgtcgcgacagcggcctccagcagaatgtttaagccactatggcagcatggccgggctatctgttttgccgatagatggttcgagtggaagaaggaaggcgacaaaaaacagccgtatttcattcacagaaaggacgggaagccgatattcatggctgccattggcagtacgccgtttgagcgcggtgatgaagcagagggattcctgattgttacctccgcagccgataaaggtctggtagacattcacgatcgtcgcccgctggcactgacaccggaaactgctcgggtatggatgcgccagttcctggaaccacattctaagtcaataacataccgcgtcatacctgcgctcacacgtcccatgatgcgaaaagataccaatccatgccaatag

SEQ ID NO: 372427 - DNA, 1077 bp, Salmonella enterica
atgagcgccacctacggccacccggccaccgaagcgctggtggcgacgttggcaggtactgagcatgacaccgggctggatatcctgaagctggaaaatatcgccgcgtacttccgcgaggtgcgcaaaaagtaccacgcctttgaaggccagctgaaaggctacgacagccgcatcctggtggcgcaggtgccgggcggaatgctcactaacctcgaaagccagctgaagcagcagaacgcggcggacaaactcgaccaggtgctggcggaaatcccccgcgtgcgcgaggacctcggctttattccgctggtgacccccacctcacagattgtcggcacccaggcggtgctcaacgtgctgacgggcgaacgctacaagaccattgccaaagaaacggcgggcattctgaaaggcgaatacggccacaccccggtgccggtgaacgccgcgttacaggcccgcgtgctggaaggaggcgctccggtgacctgccgcccggcagacctgctgaagccggaactggctgaactggaagcggacgtcaggcgccaggcgcaggagaaggggattcagcttgcgggaaacgccatcgacgacgtgctcaccgtggcgctgttcccgcaaatcggcctcaaattcctcgaaaaccgccacaacccggcggcgtttgagccactgccgcaggcggaagccgcgcagccggtgacaaaagcagagaagcctgccgcttccggtatctacaccgtggaagtggaaggcaaagcctttgtggtgaaggtcagcgacggcggcgatatcagccagctcactgcggctgcacctgctgcctcttctgctcctgccaccgccccggcaggcgccggcaccccggtcaccgcgccgctggcgggcaacatctggaaggtgattgccaccgaaggccagacagtggccgaaggcgatgtgctgctgattctggaagccatgaagatggaaaccgaaatccgcgccgcgcaggccgggacggtacgcggtatcgcggtgaagtccggggacgcggtttccgtgggcgacaccctgatgacgctggcgtaa

SEQ ID NO: 372428 - DNA, 882 bp, Salmonella enterica
atgtctataagcaccacaatgtcaaatatcaacagaatacaaaaagacattgctagtctacaaaaacaactttctgatgagcagcgtaaagaggcccaactttcaggaaaaatcaatcaaataaagcgtagcgtcactaagtcaacgtctttaagcacattgaattccaaaatgtcagagatctctcgtcataaaaatgatatttcaagatgtaactctaaaaaagcagatattaataaaaaaataacagcaaaaactggagacttacaccgttatcaattacaactcattaaagagcaagagaatgaccagaaaaaaagaattgctgcacagaagaaacttgaaaaagaacaattagattaccagaagaaaatcacacgagaattgaaatcgcagaaaagggcaatatctccaagccataaattcaatcgtccagtcatcaacaaatctgatgagacagaagatattacagagagttatgatgtttttatctctcatgcaacagaagataaagatagttttgtccgtccccttgctgagttgttaagagcaaaagggataaatgtatggtatgacgaattctctttaggctggggtaaaagtctacgtaagacaatcgattatggattagcaaattctcggtttggagttgttgttttatctaaatcctttatcaaaaaggactggacagagtatgaattaaatggtttgactgctagagagatgagcggtgaaaaccaagtaatactgcctatctggcacgaagtatctaaatctgatattttaaaattcagccctacactagtagataaaatggcattaaatacatcgataaataccattgatgaaattgctgaacagcttgaatcattattgaaatga

SEQ ID NO: 372429 - DNA, 1209 bp, Salmonella enterica
atgtgcgaactcgatattttacacgactctctttaccaattctgccccgaattacacttaaaacgactcaacagcttaacgttggcttgccacgcattacttgactgtaaaactctcactcttaccgaacttggccgtaacctgccaaccaaagcgagaacaaaacataacatcaaacgaatcgaccgattgttaggtaatcgtcacctccacaaagagcgactcgctgtataccgttggcatgctagctttatctgttcgggcaatacgatgcccattgtacttgttgactggtctgatattcgtgagcaaaaacgacttatggtattgcgagcttcagtcgcactacacggtcgttctgttactctttatgagaaagcgttcccgctttcagagcaatgttcaaagaaagctcatgaccaatttctagccgaccttgcgagcattctaccgagtaacaccacaccgctcattgtcagtgatgctggctttaaagtgccatggtataaatccgttgagaagctgggttggtactggttaagtcgagtaagaggaaaagtacaatatgcagacctaggagcggaaaactggaaacctatcagcaacttacatgatatgtcatctagtcactcaaagactttaggctataagaggctgactaaaagcaatccaatctcatgccaaattctattgtataaatctcgctctaaaggccgaaaaaatcagcgctcgacacggactcattgtcaccacccgtcacctaaaatctactcagcgtcggcaaaggagccatgggttctagcaactaacttacctgttgaaattcgaacacccaaacaacttgttaatatctattcgaagcgaatgcagattgaagaaaccttccgagacttgaaaagtcctgtctacggactaggcctacgccatagccgaacgagcagctcagagcgttttgatatcatgctgctaatcgccctgatgcttcaactaacatgttggcttgcgggcgttcatgctcagaaacaaggttgggacaagcacttccaggctaacacagtcagaaatcgaaacgtactctcaacagttcgcttaggcatggaagttttgcggcattctggctacacaataacaagggaagacttactcgtggctgcaaccctactagctcaaaatttattcacacatggttacgctttggggaaattatga

SEQ ID NO: 372430 - DNA, 186 bp, Salmonella enterica
atgctgcggtggtccggaaactgctggccggtaaccctgatgccgactgatgataaaggcaccatacaggccggagatatcctcccgctccgtgcgctgattctcctgctgctgaccagcgtctttatctccggctttctgaccggcgtcctggccatgctctggcttatctgccgtggggcatga

SEQ ID NO: 372431 - DNA, 303 bp, Salmonella enterica
gtgtgtcagcgagtcactcaccgacagcgcatcagggctctggtccgtcacgtaaagccgcagaggttttttctcctgcgccaccatcagggcatgctctccccgcccccgggcaaggccttcaaaaccggcattgtcgctgtgcctgttcacatccagcgtcaggctgtatgttgccggcgggaggacggtcgtgctgctgtcaatgcagtgggtggtgagcgtccgttcccgctcccgggacagggcatagcggttcccgccgaggtattcgatggcctcaaaatcgtgatcgccgtctga

SEQ ID NO: 372432 - DNA, 549 bp, Salmonella enterica
atggataataatatattagaagggcaattaagagaatgctatggaagggtcgtttacacacataaaactcacgagaaatgtgcagatatccttcaaaaaaaactaggctgcatgaaaaatttacagttagttcttttagcaataactaccggtagttttataactacagtggtgggagatgctaaaacaggtgctataattgggtcagtactttccgctatcctcctatttttaaactcatatttaaaggattatgatttaggctctatagctcaaaaacacagacaagctgctggggatatgtggttaatcagggaaagatatttatctcttctcacagacttgaaaatgcaaactaaaagtatcgaggaaattcttaaagaaagagacgccttgatgattgaactttctgcaatttatatcggagcaccatccacgaattacaaggcatattcaatggctcaaaaggcactgaaggaacttgaggatatgactttctctgatgaggaaattgataaatttcttcccactgaattgaaacggaaatga

SEQ ID NO: 372433 - DNA, 276 bp, Salmonella enterica
gtggcttctgtttctatcagctgtccctcctgttcagctactgacggggtggtgcgtaacggcaaaagcactgccggacatcagcgctatctctgctctcactgccgtaaaacatggcaactgcagttcacttacaccgcttctcaacccggtacgcaccagaaaatcattgatatggccatgaatggcgttggatgtcgcgccagtgcacgcattatgggcgttggcctcaacacggttttacgtcacttaaaaaactcaggccgcagtcggtaa

SEQ ID NO: 372434 - DNA, 378 bp, Salmonella enterica
atggacgaacagtggggctatgtcggggctaaatcgcgccagcgctggctgttttacgcgtatgacagtctccggaagacggttgttgcgcacgtattcggtgaacgcactatggcgacgctggggcgtcttatgagcctgctgtcaccctttgacgtggtgatatggatgacggatggctggccgctgtatgaatcacgcctgaagggaaagctgcacgttatcagcaagcgttacactcagcgcattgagcgacataacctgaatctgaggcagcacctggcacggctgggacggaagtcgctgtcgttctcaaaatcggtggagctgcatgacaaagtcatcgggcattatctgaacataaaacactatcaataa

SEQ ID NO: 372435 - DNA, 207 bp, Salmonella enterica
atggatgaggatatgaataatgttcatttagcgctatccgatctatcggctactgataaaaagattattgccaatactaaagagattagtgctgaaatggttagctaccgtgatacctatatgccattaatggaaaaaataacatctatgcatcaggaaatagtaaagcaacgtttgttaaacaaggaggaaaaaaatgaagattaa

SEQ ID NO: 372436 - DNA, 405 bp, Salmonella enterica
atgagtgaagctctcaaggcactgaacaatattcgtacacttcgcgcacatgctcgtgaaacagatctggcaactctggaagagatgctggaaaaactctccgctgtcgttgaagatcgtcgtgaggaagaaagtgccgtccgtaaggaacaagaagaacgtcaggctaagctggaagctttccgtcagaaactgttagaagatggtattgacccggcagaactccttgctgctgttggctcatcccaacctaaaaccaaatcgacccgcgctccacgccctgccaaatacaaatatacagatgaaaacggcaacgagcagacttggacaggtcagggtcgcactcctaaagcgatcgctgctgctatcgaagcaggtaaaaaactggaagacttcgcactctga

SEQ ID NO: 372437 - DNA, 138 bp, Salmonella enterica
atgctccacgctgaccgtaacgcgaacggcatcatcatcaatatgctgcagggcaaatgtcggctgggtgctattcgtcatgttatcgccctggacaccggtatcgtccgcgctattcagtacgatgaccggcactga

SEQ ID NO: 372438 - DNA, 300 bp, Salmonella enterica
atgacaaaaccagcatcaaccaccaaaaagccacgcaagcagcacacgcctgaatttcgtcaggaagccctgaaactggctgaacgcattggggtggccgctgccgcccgcgaacttaacctgtatgaatcacagctctacaactggcgaagcaaacagcaaaatcagctctcttcttctgaacgcgagcaggagatgtccgctgagatcgcccgtctgaaacgtcaactggcagaacgggatgaggaactggccattctccagaaggccgcgacatacttcgcgaagcgcctgaaatga

SEQ ID NO: 372439 - DNA, 225 bp, Salmonella enterica; identical to SEQ ID NO: 133446

SEQ ID NO: 372440 - DNA, 198 bp, Salmonella enterica
atgcaggcgtttctcgaccatgccggccgtgaagaaggccttctcgaccacgtcggtttccttcatcaccatggccagcgcccaggcccgtgtcagctcatggccgagggggcccagcaggctgacatggtacttgaccatccggtcaccttgcggcagtacgtgccggatggcctggtccacgcccattgtctgtga

SEQ ID NO: 372441 - DNA, 144 bp, Salmonella enterica
atgcgggccggaggccggataagtatcactgaaagttattttatgatgctcatgaaatttatttattacgcctgtctggccgtcgtcatattaatggctgtggtcttttgtgtgtcagtgctttttattctggaaaattcatga

SEQ ID NO: 372442 - DNA, 192 bp, Salmonella enterica
atgaaacagttacctctgtccggagtcattatagtctcgattgaacatgtcattgccactcccttctgtacccgacagtttgctgattatttctcgcgggtaactataatagaatgccaagaaaacagggacttttcctgcaattatgatgaacggcttaaaaatgatttgtgtatattctttttcatctga

SEQ ID NO: 372443 - DNA, 717 bp, Salmonella enterica; identical to SEQ ID NO: 370391

SEQ ID NO: 372444 - DNA, 282 bp, Salmonella enterica; identical to SEQ ID NO: 370388

SEQ ID NO: 372445 - DNA, 270 bp, Salmonella enterica
atgatcagtgccggaatcaggaaaaatagcccgaccgggaatattcacccggatgggctgacaaagaaatttgtaaaagccagaaaaatttcagacgttaaatgtagtgataacccaccgacatttcacgagatccgtagcctgctcgggcggttgtacaaagacgaacgcggcgaggaattcgctcaaaaactcctgggccacacctcagagaacaccacgaaactctatctcgatgaacgcgataataaagcttacgtgatgctctga

SEQ ID NO: 372446 - DNA, 597 bp, Salmonella enterica; identical to SEQ ID NO: 372401

SEQ ID NO: 372447 - DNA, 2637 bp, Salmonella enterica; identical to SEQ ID NO: 370273

SEQ ID NO: 372448 - DNA, 948 bp, Salmonella enterica; identical to SEQ ID NO: 369602

SEQ ID NO: 372449 - DNA, 1500 bp, Salmonella enterica; identical to SEQ ID NO: 368895

SEQ ID NO: 372450 - DNA, 1740 bp, Salmonella enterica; identical to SEQ ID NO: 368890

SEQ ID NO: 372451 - DNA, 879 bp, Salmonella enterica; identical to SEQ ID NO: 368889

SEQ ID NO: 372452 - DNA, 1341 bp, Salmonella enterica; identical to SEQ ID NO: 368731

SEQ ID NO: 372453 - DNA, 546 bp, Salmonella enterica; identical to SEQ ID NO: 371027

SEQ ID NO: 372454 - DNA, 1497 bp, Salmonella enterica; identical to SEQ ID NO: 371026

SEQ ID NO: 372455 - DNA, 1716 bp, Salmonella enterica; identical to SEQ ID NO: 370279

SEQ ID NO: 372456 - DNA, 2529 bp, Salmonella enterica; identical to SEQ ID NO: 370384

SEQ ID NO: 372457 - DNA, 2334 bp, Salmonella enterica; identical to SEQ ID NO: 371341

SEQ ID NO: 372458 - DNA, 810 bp, Salmonella enterica; identical to SEQ ID NO: 371271

SEQ ID NO: 372459 - DNA, 699 bp, Salmonella enterica; identical to SEQ ID NO: 370936

SEQ ID NO: 372460 - DNA, 1023 bp, Salmonella enterica; identical to SEQ ID NO: 370938

SEQ ID NO: 372461 - DNA, 1350 bp, Salmonella enterica; identical to SEQ ID NO: 371720

SEQ ID NO: 372462 - DNA, 1677 bp, Salmonella enterica; identical to SEQ ID NO: 371719

SEQ ID NO: 372463 - DNA, 1221 bp, Salmonella enterica; identical to SEQ ID NO: 371717

SEQ ID NO: 372464 - DNA, 1212 bp, Salmonella enterica; identical to SEQ ID NO: 369474

SEQ ID NO: 372465 - DNA, 1236 bp, Salmonella enterica; identical to SEQ ID NO: 369440

SEQ ID NO: 372466 - DNA, 867 bp, Salmonella enterica; identical to SEQ ID NO: 369439

SEQ ID NO: 372467 - DNA, 936 bp, Salmonella enterica; identical to SEQ ID NO: 368724

SEQ ID NO: 372468 - DNA, 1287 bp, Salmonella enterica; identical to SEQ ID NO: 368723

SEQ ID NO: 372469 - DNA, 402 bp, Salmonella enterica
gtggtggagcgtctgagcgacacggtacagaacgggctgattaatatcgtcaccatcttcctcgggctgtcggtgggcgcgaagctggtggcggataagttcctgcagccgcagacgctgggcattctgctgctgggtgtgattgcgttcggtatcgggacggcggccggggtgctgatggcgaagctgctgaacctgtgcagtaagaacaaaatcaacccgcttatcggttcggcgggggtgtcggcggtgccgatggcggcccgcgtatcgaacaaagtggggctggaatcagacccgcagaacttcctgctgatgcacgcgatgggcccgaacgtggcgggggtgattggctcggcgatagccgccggggtgatgctgaagtacgtgctggcgatgtaa

SEQ ID NO: 372470 - DNA, 1113 bp, Salmonella enterica; identical to SEQ ID NO: 370867

SEQ ID NO: 372471 - DNA, 897 bp, Salmonella enterica; identical to SEQ ID NO: 370864

SEQ ID NO: 372472 - DNA, 264 bp, Salmonella enterica
atgcaatatactgatattcaaatttggcagcctggcattctgcgcaacaccgattatcttaaccccggtcccgctaagctgctggccgccactctggataaagacatcaaaatctttaaagaggggggcgttctgccagaattatggcactggctctattttcttcctgtcgaccgccagtcagatctatctgctgatggtcatccgataaaaggtcattttataccccctgttggcgctggtttattgaggaaaaaattatga

SEQ ID NO: 372473 - DNA, 1164 bp, Salmonella enterica
atgaaaagtattgaaagggataaatatcaggatattcgtgatgcggttcgttcattatgtagtgaatttgatgataaatatcaccgtaagatagatgaagcaaaagcctatcctgaagagtttgttaataaactaaccaaagctggttggctggctgcgctcatcccggaggaatttggagggtcagggcttggtttaactgaagcatctattatcatggaagagatcaatagatcgggtggaaactctggagcctgccatggtcagatgtataacatgaatacgttgttacgtcatggatccgataaacagaaagaattctggctgccacggatagctactggtgaatggcgcctgcagtcgatgggcgtcacagaacccacagcaggtacagataccaccagaattaaaactacagctgtaaaaagagaagaccggtatgtgataaacggacaaaaagtctggatttcacgtgttcaacattcagactggatgattcttctggttcgaactactccgcttgcaaatgtaaaacgtaaatccgaagggatgtctattttcatggttgatattaaagaagctatgaaaaatggaatgacagtacgacctattcccaatatggtcaatcatgaaaccaacgagctcttttttgacaacctggaaattcccgaagaaaatcttattggtgaagagggtatgggttttcattacatacttgatggtttaaatgcagagcgtaccttgattgcggcagaatgtataggcgatggatattggtttatggatcgtgttacccgctatacctgcgagcgtgaggtttttggtcgtcccattggtcagaaccagggggtgcagtttcctattgcagaagcatttattgcagtggaagcggctaatctgatgcgttttaaagcgtgcgagctttttgatcagcatcttgattgtggagcacaggctaatatggcgaaataccttgctgcgaaagccagctgggaagcagccaatgcctgcctgcaatttcatggtggatatggttttgcctgtgagtatgatatcgaacgaaagtttagagaaacacgtttatatcaggttgctcccatatctaccaacctgatcctgagctatatcgctgagcatgtgctggagatgccacgttcattctga

SEQ ID NO: 372474 - DNA, 1686 bp, Salmonella enterica; identical to SEQ ID NO: 370639

SEQ ID NO: 372475 - DNA, 498 bp, Salmonella enterica; identical to SEQ ID NO: 370636

SEQ ID NO: 372476 - DNA, 264 bp, Salmonella enterica
gtgattgcgttcgggattgggacggcggccggggtgctgatggcgaagctgatgaacctgtgcagtaagaacaaaatcaacccgcttatcggttcggcgggggtgtcggcggtgccgatggcggcacgcgtatcgaacaaggtgggcctggagtcggacccgcagaacttcctgctgatgcacgcgatgggcccgaacgtggcgggggttatcggttcggccattgccgcgggcgtgatgctgaagtacgtgctggcaatgtaa

SEQ ID NO: 372477 - DNA, 1389 bp, Salmonella enterica
gtgaaatatataaatcattaccgctatttgtttgtctgttttttccttgctatactcccttttttcgctttatcttttcccggtataagagagtatgtttttgataactttatggtttctgcaatttacaatggggtcattattgccatttatattacaggttctttgtgtgcattattcactattcttaaaaatatttcagcaaaagacatattaatagctcaggacgccagtagaaaaaatagcattctttctaacctcaatcaggttttgtttgccggggaacccaaacagtgtgatttcaatttgctgatggaattagatgacaatgtgtctaccgcccgtaatcaacgattgtcatttattatgagctgtagcaatgtgtcgacgcttgttggcctgttggggacgtttgcgggtctgtctattacgattggttcaatcgggaacttattgagctcgccatcagatgttggcggtgataatgcaagtaatacactcaatatgatcgtgacaatggtagcgtcgctttctgaaccattgaaagggatgaataccgcatttgtatcttctatctatggtgttgtttgcgccatactcctgacctcacaaagtgtttttgttcgcagctcctattcccttgtttctacggaaatcaaaaaattaaaaatcataagcaacagatccaataataaacaacgaagcctgcgggttgaatcagagacgcttgtagaatttaaagagttgtttaaagcgttttttgataactacctgacagttgaaaacttacggacgcaggatgaagaaaagaaacgagtgatgctatcagatagctttgtcactttgcaaaaccgactattggataactcagcaaaactggaacaactttctacgctgattgatggttatctggtaagcaataacgaaaataccaaaaaattagttgacggtgtaataacaattacctctcgtttatctgaaggtaataccctgcttgctgataataatgcacgactggaggcaatgagtacaatacaaaatattatagataaaaagaatgattcaataatgacatcagttgataaatgttatcaggaatctctttcacatggtaagaccataaacgatattgccgctggcagtgccgatatttctcatactctcgatgggctgagaaaagaaatggatgaggatatgaataatgttcatttagcgctatccgatctatcggctactgataaaaagattattgccaatactaaagagattagtgctgaaatggttagctaccgtgatacctatatgccattaatggaaaaaataacatctatgcatcaggaaatagtaaagcaacgtttgttaaacaaggaggaaaaaaatgaagattaa

SEQ ID NO: 372478 - DNA, 1320 bp, Salmonella enterica
atgaagattaagatgttttttctgacgactgcttttattacacaaagcacatacgccagcgagcttccggtcattcctctaagagatttagttaatgccgcattaacgcatcagccctctgttgctgtttcatattatgagactgaaaagaaaaacagtgacttagatctttcacgggcagcactttatcctaccctggatctaacatctggccttaataataacaggaaagagtcatcaggtaccgagaggaacgttgaaaataaggtgtctttatcataccgaataacggattttggagtgaggggggctaatatcaggaaatctgaatatgaaagagataatagtaaaactgactatgaaaaaacaaagaatatagtgtctcaggaggttgtgacaacctattacaacatcagtaaatatcgtgaaatgattgatggcgtaaatctggagaaagagttttataaaaagatgctggaaactttttcgttgctggtatcttccggtgtagctatgcaatctgatatgcgtaaagtacaagtatctatcgatgcattaaataccagaagcattatgtatcagtcgatgttggatgatgaaatgtataaaatgcagaatatgactggtctgaatttatcgccagttcagattcaaagcgatgaaaaattcaacctcttcaaaaaatatatctttgtcgaaagccctgaaaaacttatggacatggtgatgaaatacaacgatgactataagatgcttgtcaatacccgaaaagccgcgaccgaagatattaatgccgcaaaatcatcctattttccgactgtagatcttgtttccagctatgtacagaataacccgagcggtagtgccaaaaaaagtgattatgaagatgaatttaaaacgggtatcaatgtcagtttcaacatttttaatgggttcagaaattcagcccaggaaagaaaaatggtggcaagttattcgcaggctaagctgcaaattgacgattttttgattaaaacgcgttataacattgattcacaactttcaagatacgccgctgcaaaagagacttactcagtggcggaacgttcacatacaaacgcgttacagcttactgaattatatgagcaggagtttcagttagggcaaaaaagtttgcttgatttaatttcaagccgtaatgaagcatttcaggcatatgtaagcatgatcgacagcaaatatagcctgtatattttaaagctacagcaactctcattgatttttcatttaatggattatttaaaaggaaatactgaaagtgagttaaatgtaatgaaatga

SEQ ID NO: 372479 - DNA, 1278 bp, Salmonella enterica
atgaatagaagacaaagcgatcatctcatgatgataattatttctttgacgatcttaattattatccttacctactttatagaaattaattcagtggttcatggtcagggcgttatcactactaaagataatgctcagttaatatctctttctaaaggagggacgatacaagatatttatgtagccgagggtgatactgtaaaaaaaggagaactccttgcaaaggtcgttaaccttgatctgcaaaaagaatatcaaaggtatagaactcaaaaagggtatctggataaagatgttaacgaaatatctttcattcttgataaagaaaatgagagtgggttgattaccctggatggcacccgttctttaagcaataaagaggtaaaagcgaatattgaattagtgcatagtcagataagagctaaagagttaaaaaaaacctctcttgattctgagattagcggattacaagagaagctgagttcgaaagaaaaagaactcgcattgcttgccgaagaaataaatattctttccccactggtaaaaaaaggaattagcccatataccaattttcttaacaagaaacaggcgtatataaaagttaagtctgaaattaatgatattgaaagtagcatcactttaaaaaaagatgatattgagttggttgttaatgatattgaggcgcttaataatgaattgcgactatctttatctaaaataatatctaaaaatcttcaggaacttgaggttgttaactctacattaaaagtaatagagaagcagataaatgaggaggatatctattcaccggttgacggtgtaatttataaaatcaataaaagtgccactactcatggtggtgtgattcaggcggcggacttactttttgaaataaaaccaaaagtaaggactatgctggccgatgtgaaaatattacccaaataccgtgaccaaatatatgtagatgaagccgttaaactggatgtgcagtcaattatccaaccaaagataaaatcgtataatgcgactatcgataatattagccctgattcctatgaggaaaataccggaggaacaattcagcgttattataaagtaattattgcattcgatgttaatgaagatgatttacggtggttaaaaccaggtatgactgttgacgccagtgtaattaccggaaaacacagcattatggaatacctgttatctcccttgatgaaaggcgtggacaaagccttttcagaaccagttaatactaaacgattagatacaccttga

SEQ ID NO: 372480 - DNA, 594 bp, Salmonella enterica; identical to SEQ ID NO: 370796

SEQ ID NO: 372481 - DNA, 1404 bp, Salmonella enterica; identical to SEQ ID NO: 372016

SEQ ID NO: 372482 - DNA, 1389 bp, Salmonella enterica
atgttgagaataaaacagttctgtttatcgattttattaatgctggcaccagtgttagctctggcctgttccggcattccatatgctttgtttcactatcagccgtgggggcagggaacgaaatatgtagttgaagaagattatgattatggtattaattttaaagatattgaaattcgagaggtaaaatttagtcaactacggcacgttcctgaccgcattgttaatgaatataatgaccgtggaaaaatgagtaatgattttgttcatgtcgccgctttttcatcgctaataaaaaatgatttctggcagttttattggctaaccgacggccagcatattttatgggttgggaaaatcgtacaaaatccaccgggtaagccgccagtggatgcagcgacttttcgggcgtatggacgctttgccgctgataaagatagtctttacttcgacggcgagcgcacagatgataatcatggtgaaaaaagggtcgatatagattcgttgcagcaggtcggcggcaacatcaaattaaacgactccggcgatgtgcttaaagacaggcgcaacctctactttcagggacgctggctggctagtgcgcagggatattccatcctgggcgttaaatcctgggagcagcgtaatattctgttttcgccgaccagctgcgatactacatctaatcctggcccgtgggacactattctgcgtaccgccacgcaggtttttgttaatggtgtggcaattgatgccgatccgaactcttttcatgttgtgcgctgggtcgctggcgtgcagttactctatcgcgacaaagcaggcgtaaaacgctattacttcggcaaagactgtctcaatacgtttaatgtacagcgggataaggtgacatggatgacgcgagaggcatcgcgccgaggcgatgactgccgaatagcgactattcccaatgttgatccagaatatttccatcccattcattacaattggacggtagcacagtacaaagatctattgtaccaggtgaagtatgtctctccggtcgacagggtattaaccatcacccgcttgcctgatccgcaggtacagctgaaagctggcgctaatttggtgggtaaacagatctattttatcggcgatgggggcgtgcagattatcgaccctattggaccattggtgtggtttaaaaatcccgatggttcattttctgatgtttttgctcatgacgatcgttatctctatttcttcggtgatacgctggtggatagcgggcaacggcgtaacgtaacgcggacgctggatactgcgcatatcgacaagagcggttattatctggtcactgaggaggggaaatatgaggttattaataatgcattcacctctcgctaa

SEQ ID NO: 372483 - DNA, 330 bp, Salmonella enterica
gtgggcgcgaagctggtggcggataagtttttgcagccgcagacgctgggcattctgctgctgggtgtgattgcgttcggtatcgggacggcggccggggtgctgatggcgaagctgctgaacctgtgcagtaagaacaaaatcaacccgcttatcggttcggcgggggtgtcggcggtgccgatggcggcccgcgtatcgaacaaagtggggctggaatcagacccgcagaacttcctgctgatgcacgcgatgggcccgaacgtggcgggggtaattggctcggccattgccgcgggcgtgatgctgaaatacgtgctggcgatgtaa

SEQ ID NO: 372484 - DNA, 1008 bp, Salmonella enterica; identical to SEQ ID NO: 372118

SEQ ID NO: 372485 - DNA, 2622 bp, Salmonella enterica; identical to SEQ ID NO: 372119

SEQ ID NO: 372486 - DNA, 687 bp, Salmonella enterica
atgaaaaaaaacgtaccgattttccttcgattattgctactgctgtcggcggccggcctgtcgtttgccgtgcaggcgggaggcattgcgctgggcgcgaccagggtgatttatccgcagggaagtaagcaaacctccttgccgattattaattcttctgccagcaatgtttttttaattcagtcatgggtcgccaatgccgatggttcacgctcgacggattttatcattacgccgcctctctttgtgatccagcctaaaaaagaaaatatattacgtattatgtatgtcgggccgtcattaccgaccgatcgcgaaagcgtattttatttaaacagtaaagcgataccctctgtcgataaaaataaattgaccggcaactccctgcaaattgcgacgcaaagcgtgattaagctatttatccgcccgaaaaatctggcggaggcgccagctcatgccccgtcgacgcttcgctgccgtaacgagcgcggccagctaacgattactaacccttcgccgtactacgtttcgatggttgaactgtacagcgcggggaaaaaactgccgaatactatggtaccgccgaaaggcgcgatcactctcccggcgacgcccggccaggtatctttgcgcacggtaaacgattttggcgcaacgacgccagcacgcgtttgtccagcttcatga

SEQ ID NO: 372487 - DNA, 2100 bp, Salmonella enterica; identical to SEQ ID NO: 372194

SEQ ID NO: 372488 - DNA, 672 bp, Salmonella enterica; identical to SEQ ID NO: 372018

SEQ ID NO: 372489 - DNA, 2538 bp, Salmonella enterica; identical to SEQ ID NO: 372021

SEQ ID NO: 372490 - DNA, 699 bp, Salmonella enterica; identical to SEQ ID NO: 372384

SEQ ID NO: 372491 - DNA, 1791 bp, Salmonella enterica; identical to SEQ ID NO: 371860

SEQ ID NO: 372492 - DNA, 819 bp, Salmonella enterica; identical to SEQ ID NO: 371859

SEQ ID NO: 372493 - DNA, 561 bp, Salmonella enterica; identical to SEQ ID NO: 372156

SEQ ID NO: 372494 - DNA, 969 bp, Salmonella enterica; identical to SEQ ID NO: 372158

SEQ ID NO: 372495 - DNA, 1038 bp, Salmonella enterica; identical to SEQ ID NO: 372159

SEQ ID NO: 372496 - DNA, 1563 bp, Salmonella enterica; identical to SEQ ID NO: 371452

SEQ ID NO: 372497 - DNA, 1143 bp, Salmonella enterica; identical to SEQ ID NO: 372323

SEQ ID NO: 372498 - DNA, 180 bp, Salmonella enterica
atgatattatcccctatatatgagataataaaggaatcaaaatttaaagacatagagaaatatctagaaaaagtcggtgttcttgaaaatagtttaaaacgtctccgagactccgaaagaaaaacattttcaatggatgaactggaaaataacgactataatgcaataaatgccgattaa

SEQ ID NO: 372499 - DNA, 243 bp, Salmonella enterica
atgactaatgcagctctgctattaggtgaaggcttcaccctgatgttcctcggcatggggttcgtgctggcgtttctgttcctgctgattttcgccatccgcggcatgtctgccgtgattactcgcttcttcccggaaccagtcgccgcgcccgcaccgcgcgccgttcccgtcgtggacgacttcacccgcttaaagccggtgattgccgccgccattcaccatcaccgccttaacgcttaa

SEQ ID NO: 372500 - DNA, 1686 bp, Salmonella enterica; identical to SEQ ID NO: 371458

SEQ ID NO: 372501 - DNA, 1563 bp, Salmonella enterica; identical to SEQ ID NO: 371457

SEQ ID NO: 372502 - DNA, 738 bp, Salmonella enterica; identical to SEQ ID NO: 371455

SEQ ID NO: 372503 - DNA, 891 bp, Salmonella enterica; identical to SEQ ID NO: 372413

SEQ ID NO: 372504 - DNA, 1044 bp, Salmonella enterica; identical to SEQ ID NO: 372415

SEQ ID NO: 372505 - DNA, 480 bp, Salmonella enterica
atgagaaaagtaaaaacagacaacagtgatttaatcgaatacgtaaatacagtcaaagaactaaaaaatcatatttcgatagatgaatacaggaatgaatatcgtaggctacgctctgatgacattccattggttaagtctcaaaaatttaagtctgcacatactgagcttcgcagacttgaaaagaagagagaatctcttattgaatactttattgacgagttaaatcctattagcagttcaaaagctaacacatcagcgagatcaactggtaatctcgatttatttaacgaacgcgtgttataccgtaaagcactttcagaaaaaagcgatgaagaaataattgccttagtcataaaacagcgtacagaagccgctgttgagttcaagcgttccatagaacaaagcctgaatcaactctctcacatctcgtcagagttcgccccatcaagccagaagcgcaggaaaatgtctctttaa

SEQ ID NO: 372506 - DNA, 864 bp, Salmonella enterica; identical to SEQ ID NO: 372423

SEQ ID NO: 372507 - DNA, 885 bp, Salmonella enterica
gtgagggccgttagccacattcgtcagccaggtgtaatcccagacgcccgacgtcgcgctctgcgtggcgtcaaaccacgttttgccgccatcaatactcagtcttacaccgttaacatccgccggtactgtcacctgaaagtgcgggcgcgcttcattggtcagattatcgccggggataccgctgtcgttaaccagttcaatacggtcaatggcgatatgcgtatctactgtcaccgtcaacggcgcggactgcttcacatttccggccctatcttctaccttcaccgtcaggatatagtcgccgtccgcccagtcgctggtcggcgcaaagcgccactgtccgccggtctgaaccagtggcacctcctgtttaatgccattgtgcattacctccactatcacccggctgacatcggtatcaatattgttgagggtaaagcccggcgttttaacattggtgatattatcgcccgcgatgccgctgtcatctgcgctgtccagcgagagggtcggcacagacagagtggtatcgatggtgaaatcaagttcctgcgtcgtcttgtttcccgccttgtcggtcgcctctaccgtcagggtatagcctccgtcggccacatcatccggccagatataatcccaggcgcccggcgtcgcgctctgggtagcgttgaaccacgtcttgccgccgtcaatgctcaggcgcaccacgttgacatccgtcggtaccgtcacctggaagtgcggacgcacgttattagtcagattatcgtcgggaataccgctgtcattgaccagttcaatgttattaatggcgatttgcgtgtccaccgtcaccgtcaacgatgcagaatggctggtgttccccgctttatcttcgactga

SEQ ID NO: 372508 - DNA, 138 bp, Salmonella enterica; identical to SEQ ID NO: 372437

SEQ ID NO: 372509 - DNA, 1077 bp, Salmonella enterica; identical to SEQ ID NO: 372427

SEQ ID NO: 372510 - DNA, 435 bp, Salmonella enterica
atgcaggcagcatgtggtctggctcagttggagcgcgtagaagagtttgtagagcagcgtaaagctaacttttcctatctgaaacagggcttgcaatcttgcactgaattcctcgaattaccagaagcaacagagaaatcagacccatcctggtttggcttccctatcaccctgaaagaaactagcggtgttaaccgtgtcgaactggtgaaattccttgatgaagcaaaaatcggtacacgtttactgtttgctggaaatctgattcgccaaccgtattttgctaatgtgaaatatcgtgtagtgggtgagttgacaaataccgaccgtataatgaatcaaacgttctggattggtatttatcctggcttgactacagagcatttagattatgtagttagcaaatttgaagagttttttggtttaaatttctaa

SEQ ID NO: 372511 - DNA, 504 bp, Salmonella enterica
atgccgggcaactgcacgcattatgggcgttggcctcaacacgattttacgtcacttaaaaaactcaggccgcagtcggtaacctcgcgcatacagccgggcagtgacgtcatcgtctgcgcggaaatggacgaacagtggggctatgtcggggctaaatcgcgccagcgctggctgttttacgcgtatgacagtctccggaagacggttgttgcgcacgtattcggtgaacgcactatggccacactggagcgtcttctgagcctgctgtcaccctttgacgtggtgatatggatgacggatggctggccgctgtatgaatcccgcctgaagggaaagctgcacgtaatcagcaagcgatatacgcagcgaattgagcggcataacctgaatctgaggcaacatctggcaaggctgggacggaagtcgctgtcgttctcaaaatcggtggagctgcatgacaaagtcatcgggcattatctgaacataaaacactatcaataa

SEQ ID NO: 372512 - DNA, 495 bp, Salmonella enterica
atgaaaatatttggtttaatgttttttatttatactgcggtattacaagcattatggccagtatgtgctgaattacgagtgaaaatgcagtggagaaagttgcatagaatcattttcctaaatattattggtggggtattttttgttggtcttggtacgttattcatttatgttttaaaggattatatctatagcataattgctaacggtatagattataatattagtggggctgtttttgttttactggctgtgtattttagtataagagtttggtgtgatacatttgctatgttacttcaaagtatgaaccaattaaaaattctttggctcatagttccgtgtcaggcattaattggtggtgtgactcaatggtattttgcagagcattatggaatagttggtattttatacggactaattttatcgttctcgctaactgttttttggggattgccagtgtattatatgtataagagtaaaaggctagcataa

SEQ ID NO: 372513 - DNA, 237 bp, Salmonella enterica
atgtgtataatcgattattgttttatgtatacgatatggtgggaaatgagtaatactacagattggattaatactatatctaatgtgatgatcgccggttctgcgatttatggcgcttttaaggctaagagctatttcaaaagtaaaaatgacattcattttaatgatattaatgcaaatttcataatgaaggggaatgtatccattaagaatattggagcaaaaatgaccaactaa

SEQ ID NO: 372514 - DNA, 402 bp, Salmonella enterica
atgtttgcggtaactgaccggacggaaccggcgcgaggctttcgcccgccgcccctgccgacgcaggctggccgccacggttttcacgttgaactggtaaccctgagcacgaagctcatccgtcaggcgtggcgcaccatagcgttgttttgcgtcactgaatgcttcccggacgacgttatcacagacaaggcggaaccgctgacgctggtttatctgatgacgacgctgatgccagacgtaccagccgctacgggcaatctgaagtacacggcacatggctttgatattgaactcagcctgatggttttcgatgaagacatacttcatttcaggcgcttcgcgaagtatgtcgcggccttctggagaatggccagttcctcatcccgttctgccagttga

SEQ ID NO: 372515 - DNA, 300 bp, Salmonella enterica; identical to SEQ ID NO: 372438

SEQ ID NO: 372516 - DNA, 303 bp, Salmonella enterica
atgagcagaaaaacccaacgttactctaaagagttcaaagccgaagctgtcagaacggttcttgaaaatcaactttcgatcagtgaaggcgcttcccgattatcccttcctgaaggcactttaggacaatgggttaccgccgccagaaaagggctcggtactcctggttcccgcacggtggctgaactggaatctgaaattctgcaactgcgtaaggcgttaaatgaagctcgccttgagcgagatatattaaaaaaagcaacagcgtattttgcacaggagtcgctgaaaaatacgcgttaa

SEQ ID NO: 372517 - DNA, 360 bp, Salmonella enterica
atgcaactgagcaggctgacgctgagaagtaaaaagccggagcttgtggagcaagagctgtggggtgtcttactggcttataatctggtgagatatcagatgattaaaatggcggaacatctgaaaggttactggccgaatcaactgagtttctcagaatcatgcggaatggtgatgagaatgctgatgacattgcagggcgcttcaccgggacgtataccggagctgatgcgcgatcttgcaagtatgggacaacttgtgaaattaccgacgagaagggaaagggccttcccgagagtggtaaaggagaggccctggaaataccccacagccccgaaaaagagccagtcagttgcttaa

SEQ ID NO: 372518 - DNA, 372 bp, Salmonella enterica
gtgctggatgctctggagcaggcgttatgggcccgtcgaccgtccggcacggtccatcacagtgataaaggttctcagtatgtatcgctggcctacacacagcggcttaaggaagccggattactggcatcaacaggaagtacaggcgactcgtatgacaacgcgatggcggagagcatcaatggtctttacaaagcggaggtaatacaccgtaagagctggaaaaaccgtgcagaagtggaactggccacactcacgtgggtggactggtataacaatcgacgattgctggaaaggctgggccatatccctccggcagaagcagaaaaagcttattatgcttccatcggaaacgatgatctggcagcctga

SEQ ID NO: 372519 - DNA, 174 bp, Salmonella enterica
atgaatctgggctacgaaccgttatttcccgcagaaatggcggaagtgaatccggcaatcctcgccgcgctttcgccgaatgccgatgaaaatcacgatttcttttccggttcaggctcctcttatgtgatggggaaagcggttgaaacagaagatgaagactggaatttctga

SEQ ID NO: 372520 - DNA, 129 bp, Salmonella enterica
atggagtgtggacagaaaagtctactgattacccggcaattaataaagcaggattactggtttaccgtgtgggctatgatagttctatgtattctgtttacttgcgtcgcgatggaacattgcctatga

SEQ ID NO: 372521 - DNA, 2409 bp, Salmonella enterica
atggcggccagtatcagccgacgaagcctggtgaaaacctccgctatcggtagccttgcgcttgccagtagcgctttcacccttccgttctcccgcatcgcacacgccgcagcagacctcgcatccggcaatgtggcagaaaaagcggtctggagttcatgtaccgttaactgcggcagccgctgcctgctgcgccttcacgtaaaagatgacaccgtatattgggttgaatcagataccacgggcaacgatgaatatggcaaccatcaggtacgcgcctgcctgcgcggccgttctattcgtcgccggatgaatcatcccgatcgcctgaaatatccgatgaaacgcgttggtaaacgaggagaaggcaaattcgaacgtatcagttgggatgaagcgttggataccatcggcgataacctgaaacgtatcctcaaggactacggcaacgaagcggtacatgtcctttacggtaccggcgtggacggcggcaatattaccaattctaacgtaccgtatcgcctgatgaacgcctgcggcggctatctcagccgttacggtagctacagcaccgcccaaatcagcgcggccatgagctatatgttcggcggcaacgacggcaacagtccggatgatatcgccaatacaaaactggtggtgatgtttggcaataaccccgcggaaacacgtatgagcggcggcggcgtgacatactatgtcgaacaagcgcgcgagcgctccaacgcccggatgatcgtgattgacccgcgttataacgacactgccgccggccgcgaagacgagtggctgccgattcgccctggtaccgatggcgcgctggcggcggcaatcgcctgggtgctgattaccgaagatcttattgataaaccgtttctggataaatactgcatcggctacgacgaaaccactctgcccgcctcggccccgcgtaacgcgcactataaagcctatattttgggtcagggcgacgacggtattgctaaaacgccgcaatgggccgcgcagattaccagtattccggcggaaaaaatcattcaactggcgcgggaaatcggctcggcgaaaccggcttacatttgccagggctggggaccgcaacgccactctaacggggagcagaccgcacgcgcaatcgccatgctgtctgtactcaccggtaacgtcggcataaatggcggtaattccggcgtgcgcgaaggcacctgggatctgggcgtcgaatggttttctatgctggagaacccggtaaaaacccagatttcggtctttacctggaccgacgctatcgatcatggcgcggaaatgaccgccacacgcgacggcgtgcggggaaaagacaagctcgacgtgccgatcaaatttttgtggtgctacgccagtaatacgctgatcaatcagcatggcgacatcgcccacacccacgaggtgcttcaggacgacagtaaatgtgaaatgatcgtcggcatcgagcactttatgaccgcgtcggcaaaatattgcgacattctgctgcctgatttaatgccgaccgagcaggaagatctgatttcccacgaatccgcaggcaatatgggctatgtcattcttggtcagcccgccacctcgccgaaatttgaaagaaagcccatttactggacgctcagtgaagtggctaaacggcttggtccggacgtataccagaccttcacagaaggccgcacgcagcatgagtgggtcaaatacctgcacgcaaaaaccaaagcgcgtaacccggaaatgccggattacgaagagatgaaacagacagggattttcaagaaaaaatgcccggaggagcactacgtcgctttccgctcattccgcgaagaccctgccgccaacccactgaaaacgccgtccggtaaaatcgaaatctattccgagcgtctggcaaccctcgccaacacgtgggagctgaagaaagatgagattatccatcctttacccgcctatacgccaggctttgacggttgggacgatccgcttcgtcagcgctacccgctacagctaaccggcttccactataaagcgcgtacccactccagctacggcaatatcgacatcctgcaacaggcgtgtccgcaggagatctggatcaacccgattgatgcgcaagcgcgcggcattcagcatggcgacaccgtgcgggtctttaaccagaatggagagatgctcattccggcaaaagtcacgccgcgcatattgcccggcgtcaccgctatcggccagggcgcctggttaaatgccgacatgtttggcgacaaagtcgatcgcggcggctccattaacattctgacgtcgcaccggccttccccactggcgaaaggtaatccgtcacacagtaatcttgttcaggttgaaaaggcgtaa

SEQ ID NO: 372522 - DNA, 1242 bp, Salmonella enterica
atgaatactaatgtctatgagaacaccgacagcgaaactatcaccccgctcaacaagcggcgtattttgcctgttttcctgcttgtcggcctttacgccgccagtacagctgctgtaatgtcggtactgcctttttatatccgcgagatgggcggttcgccgcttatcattggaatcatcatcgccactgaagcttttagccaattttgtgcggcgcccctgattggccacctttccgatcgcgttggccgcaagcgaatactgattgtcacgctggctattgcggcgataagtttactattacttgccaacgcgcaatgtatcctgtttatcctgctcgcccgcacgctttttggcattagcgccgggaatttgtcagccgccgcagcctatattgccgattgtacgcacgtcagaaatcggcgccaggcaatcggtatcctcacaggctgcattggtttaggcggtattgtcggggcaggcgtttccgggtggctatcgcgtatcagtctgggtgcgccgatctacgccgcctttatacttgtccttggggctgccctggtcgcgatttgggggttaaaagacccttccacaacatcacgtaccacagataaaatagcgtcgttctctgcccgcgctattttaaagatgccagtccttcgcgtcttaatcatcgtaatgctttgtcatttcttcgcctatggcatgtactcttcacaattacctgtttttctttctgacaccttcatctggaatgggcttccctttgggccaaaagcgttaagctatctgttaatggcggacggggttattaatattttcgttcagctatttctgttaggttgggtgagccaatatttttcggagcgaaagctaattatcctcatcttcgcccttctttgtactggatttctcactgcgggtatcgccacgaccataccagtgcttatttttgctatcgtttgtattagcatcgctgatgcgctagccaaacccacttatcttgccgccttgtccgtccatgtatcgcctgcccgacaaggtatcgtcatcggaacggcgcaggcattaatcgcaatcgctgattttatatcccccgtattgggcggatttgtcctgggttatgccctgtatggcgtctggatcggtatagctatctctgtcgccattattggtctggtgacggcaatgatttacctttcaaaaagttcagtgctaatagtgaaaccagaaacagaatag

SEQ ID NO: 372523 - DNA, 489 bp, Salmonella enterica
atgtcagaaaataaaaatgtgcaagatacacatatttccgagcaaatgaaggcgcttcacggtgcgttgattcgcgtggtgagcgcgcttaaccggcctcgtaatgatgagaaattaattgcagaggcggggattcaactcgatcgtgcgctattttcgatccttattagtatcgaacgtttagggccgattggcgttgttgagttagccgaacgtgccggtcgtgattatacgacggtaagccgacaggtcgccaaactggagaagctggggttgataatacggcagcataatgccatcgatcgtcgtatacgcgaggccgttatctcccgtacaggaaaggcgatgacggagcgtatagacgctgcgcgagagcaaatgggcaaagttgtttttaaagactggcctcaggatgaacttgatgtctttgttcggttaatgcaaaagtttgccgatgcaatggatagcgatgcttcaatgccggaataa

SEQ ID NO: 372524 - DNA, 1080 bp, Salmonella enterica
atgcttaccgaaaaatatgattttcgcattaccgatcagatgactatcccactcagacctcattggatagccaatgattcatacagggaaaagtgtaaaatgcttgtcctcaaccggagtaaaggggaaattcataaggtagactttagtaaagtaactgattatatcaaagaaggtgatgtaatctgttttaacgacagtactataataaaccatatgtttatctgtaaaacaagacggaatagattaattaaaattgttttagaggggtttttaccaaataataggataattatttccggacttttaaaagaaaggcttaacgcgaatgatgttttctatttggttgataaccctgaaatttccattaaggtagagcaaaagtttagcgaagagagccagtaccgagccgtcgtagaaaatcatgaggccttaatttgctatttagccagtcatggtgagcgtcttgatgagtatgtggactccagcttgttttataaatatccagatgcttaccgttccgttttttctaaaaagtatggctctttggaaataccttctgccggcattcattttacctgggatcttatccaaagaatcaaagataaaggtgggttaatatccttcatcactttacatgttgcatcaacagaaatgctgtccaacagaaaaatacaaacaaaatgtgtagaggaagtgactatcaacgaagaatactacgaggttccgcaagcaacagcggatatcattaatactgcgaagcaaaatggcggacgtatttttgccgtaggaactaccgttacacgatgcctggagtccgcgtattcgagggagcacaattgcctcaaagcaagttctggctggactgcgctttatatacatccaggttatcaactgaaagtggttgactgcctgctaacgaacttacatcagccaaaaacgacgcatatggtgttaaccggtcagtttgctggggttgatctactcatgaaggcctatgcctcagaagatatccagtcatgtcagttcgatatgtttggtgattgcatgttaatcatacaggatgaagggcagggatga

SEQ ID NO: 372525 - DNA, 390 bp, Salmonella enterica
atgacgcaacgtatcgcgttttttcctgccgaccgccattctctgtatgaggaacacgggtattccgcagccatccgttctggtgatttactgtttatttcaggccaggtaggcagtcacacagacggaacgccggagcctgattttcaaaaacaagtgaggcttgcttttgaaaacctgaaagcaacactgactgcagcaggatgcacattcgatgacatagtggatgtcaccaccttccataccgatccagagcaacaacttaacgacgtgatggcggtgaaacaggagatatttgcccatcccccttatcctaactggaccgctgttggcgttacctggctggccggctttgatttcgaaataaaggttattacccgaatcccctga

SEQ ID NO: 372526 - DNA, 285 bp, Salmonella enterica
atgacttataagctggcatttaacgaatcagcactaaaagagtggaaaaaactgggtcataccatacaggaacagtttaaaaaaaagctaagggaacggcttgaaaaccctcgggttccggcttctcaattacatggaagaaaggatcagtacaaaattaagctgcgtggtgcaggatacagactggtgtacagcgtcgaagatgaaattatcacggtaactgtcattggtgttggaaagcgtgaaaatgatgccgtctacaaaatgacacgacacagaagctaa

SEQ ID NO: 372527 - DNA, 249 bp, Salmonella enterica
atggcatttcaaattttaacgactactgcagcaagcattacagaactgaaacgtgatccaatgggaactttcaatgccggagagggcgctccagttgccattcttaaccgtaatgaaccggctttctactgtgtgcctccggcactttatgctcatcttatggatattcttgaggatgaagaactcggtcgtattatcgatgagcgtgcgaatgaacgcgtcattgaggtcaacattgatgacttataa

SEQ ID NO: 372528 - DNA, 333 bp, Salmonella enterica
atggtaagtgatactcttgaacagcggatttatgaactggtaagaagccatgatggaatttacctttttaagaaaaaagaactgacaccgtcaacagatttggattcagatctacagctggaagatgatgaagtactggcattgatggatgatttttttacgacattcaatgtagataaagggaatttctcgatcacaacatactatccgccagaaccaccgctaaaacatttgcttaatccgtttcgcaaaaacgatattcctcaggtgccggatttcacgataggtatgctcattgcgtctgccagggctggttgctggttgtatgactga

SEQ ID NO: 372529 - DNA, 315 bp, Salmonella enterica
atgcccacttataaacaagttgtgaaccatgttaagaaacatgtattgtggaaagaagagtattttgaacgctattatcggctcaatcctgaactggttcagaagcgtttggataaaatttatcaagctgaagatgatctaatggtgcttatcagtactcaattattttgtttcttgcaggctaatggcacgctctattttgatggttgctataaatttgtatcagctcgccagtacaaggccgcctgtaacgaggctgatgaattttcggcgcgcgttatctgcgagggatccagattccggcttttatcatga

SEQ ID NO: 372530 - DNA, 384 bp, Salmonella enterica
atggctatacatgacgccgggatgttcaccgtgaaaggaatcaaccgcctcaaaatccttcaggatgccatcgaccgcaatttacatcccggtcaggctgctgagatgctcggcattacgccacgccattgcagacggctgctgaaacgttatcgccaactcggaccacttggcatgaacaaccatagtcgtggccgcgttggtaaccgtctgttgccaacttcactgatagatcaggcactctgtataatccgggagcactaccgtgattttggccccacgctggcgctggaaaatctggaggaagttcacggtctggttcttggcaaggaaactatccgacgcctcatgataaaagccggaatctggatccctcgcagataa

SEQ ID NO: 372531 - DNA, 909 bp, Salmonella enterica
atgcagctgaatatgctggaagccatgaatatttatgtcaatgtggtagagcaagggagctttatccgcgcggcggaagtgcttgagctgcaccgccctgctgttacccgcgccgttcagaatctggaacatgatctgggcgttaagctcctgcatcgcacaacacgacaggtcagtatgacggatgaaggggaagagttttaccagcgttgcctgtcgctcttaagcgagctggacgacgtccggcgattattttccagcacgcaaccgccgaaaggccgcctgcgccttgacgtccctattacgctcgcccgggcagtcatcattccggctcttggagattttcagaaccgatacccggatattgagattgtacttggcacgtccgatcgcaagattgatttgattgccgagcgtgtggactgcgtcatccgatttggtgagcttaatgactccagttttgttgccagacgtctgggaacggcagccatggtgacctgtgctgcgccatcttatcttgcgaagcatggcacgccgcactctatcgatgagctgatgaagtcccaccgggctgtaaattttttcagtaatcacagcctgcagataatggagtggaaattcacggttgatggcagtatcgagtcaataaaaattccctccagcatcctggtagacaattcagaagcgtttctttcatgcgggctggcggggttgggtgttctacacggattgcgtccgtctcttgcaccctttattgccagtggagagctgacagagatcctcactgatttcccacccccgccaaaaccggtttcactgctttacccggaccgtcggtatctggcacctaaagttcgcgtattcatcgactggctgtgcgaggtttttggtccggatgcacatctctga

SEQ ID NO: 372532 - DNA, 981 bp, Salmonella enterica
atgaagtacaaccgtatctgccagatcctgggtatcgaaaaacctgttatacaaggcccactgtcctggcttaccgatgcaagactggttgcagccgtaagcaacgccggtggtttgggtgtgcttggcccaaatgcgggcttaacagcggaaactgctgtatcaacgcctgaagaaacagcaggaaaaatgcgtgaagaaattcgtaaaaccaaaaaacttaccgaaaaaccattcggggtgaaccttattccaacccctgaaaacgacatctggactccgcctatcctacaggtaataaaggaagagggagtaaaagctgttgtttataccggttacggagaaggagctattatcacttcgctgtttaatgaactaaaagagtcgggtattgcaattatttaccgcgatattaatccgacacctgaaaatacacgtttagcggaaaaagccggcgccaacattattgttgcaactggttttgatgaaggtggcacattgcctggcaccgcgcttggtaccttttcgatcgtaccgctgattgcggactcggtgaaaagtgttcccgtcatggctgcaggcgggattaccgatagccgtaccgcccgtgctgctcatgcgttgggagcagagggtgtctttgctggttcggtgtttattgggacagaagaaagccgtgtgccgcagtcagtaaaggataaaatcattaatgctaacggcctggatttgctgcttttccgtaccctgccagattactaccgctcacttcctggcaagctggctgacaagctcgtgtcgatggataaagctggtgcaagcaatgaagaactggcccagacgatgggaggtttacgcgggttgcgtatcggcatgctggaaggtaatacagatgaaggatacattgcgctgggcacgggcatcggaaatatccgcagcatcaagagcgtagctgaggtcgtgaacgagctgaccatttgttaa

SEQ ID NO: 372533 - DNA, 1464 bp, Salmonella enterica
atgagtagtattacaaaaagcatacagaatgaatatgttttattgatggaaaacgctttttctgaaaaatataaatatgcattcagaaatttagaactaaaagaattacgtagattcatcctgaaagagctaattagctctcccgagttagataatcaacttacaaacctaattgtgttgctaaataaattttgggatactcacgccgcggcgcttataacagaagttcgggcgtctaaaagttatcgattattacttccgattcaacgctttggttataacatatctaatcatcttagatctcttggaatttattttgatagcatcataatggttgatccattacattttccttctcttagctctctgcattcatttttgtcattgccaccagataatagttatgtccgcatgcgcaggttggtattacttgaacatgtttccaatctatttcgcgccatcccatttatgactattgatgatgattatccaatttttctaatcgttcctgaattactggattttgataaagaacgcaatcatgaacaatctgccgcttttctaagccagctcttttttaaagatagaaaaatggattacgctacttatttagcgtttcttgagcactttgggagaaatgaagaaacattccagaagatcctaataaataaagaattattaaaaacattacttaataatttcaataacatcgaaaaagaagtctgggtttacgatacagatttaaagagttttacaacaagagaggtagatcttctggattacgatctgccgtcagctatagcaaccttactgggtaaggttgaaggtgcaatttatgcacaacgatcaactcaattatcggcaacactattgggcattgatccggttatttatagtaaccatatgtttttacatgaatggactacggagcagttggtcaaggattatggtaaattaaatcctctttcttctgaagagcaagcgattacaatgggcctttcagccgcggaagtaaaattccttactgcgctttccgatctggaattaaaaaagattagagaaagaggtcaactggaatccttaaggcatgaactaagaatctcaaggcatgacttgcaaggaaaaacaccagatcaaatgcaagatgcggcaaataatttttcaaaacatttaatcaatgtggtcgaagagtatggaaagtcgcatgaatcagccattaagaattcaaagaaaaaaaagatctcatctggattgatttttgcaggaacagccacgttaggtatagcttcacttgccatgccgcaattgacattactttcagcagcagcaacgggaattggcctggcctttggaggtaaaagtctggcagatatttttagtgaacataaagcacataaaaatgaaatccagatattagaaaaaacacccgtatcgcttttgtatggggcatataaaaagaaatag

SEQ ID NO: 372534 - DNA, 1452 bp, Salmonella enterica
atgagtgcatcacaaaacaagaagaaaacgctgtcattgggtttagcgctaatcccagtcatctccatgttgttattgttgattatcggttacggcatcatggggctacgtatcgaaccgctccttctgtgctctgcggcggtagcggcaggcattgcatggtggcaaggatactgttgggaagacatcatcaactcagtggtggataagctggctaaagcaatgccggttatcatgatcctgatctgcgtgggcggtttgattggcacctggatgtttagtggcaccattccctacatggtgtactgtgggctaaaactcataagcccggaatatattttgattgcagccttctttttaaccagcgtggtctccgtctgtaccggtacatcgtggggatccgccgggacggttggcgttgcgttaatgggggttgccgccgggctggacgtgtctcttgcagcagcagctggcgccgtcgtttctggcgcttatttcggcgacaaaatctcaccgttgtccgactcgactaactttgccgcgattgtcgcagacactactctgtttgagcatattcagcatttactttggacgaccctgccaagtttcctgcttgccgccgtggtttatcttatcgccggacacagtaatatgctgggcgaggtggccacgccgcagcgcgttacggacatcatccactcgctggagtcgctataccattttaatattgttcttattttgccgccggtgatcgtactgtggggcgcaattcgcaagaagcctgtcatcccattaatgttaagcgcctgcgtacttgccttgttcctcggcgtcatcatgcagggactgagcatcaaacagggactggacgctttcattgatggatttgatatcgccatgttcccacaaggcgcagaaggtgtcgtggccgatgttccgcgcctgctaaaccggggcggaatgttctcgatgatgggaacaatactgttagttttctgcgctttttcatttgccggagcgctaacgttaaccggcgcgttaacgatcatcattaaccgactgctgaccattattcatagcgttggtcaactcattgccgccactatcggcaccacaattttggtcacaggagcgaccagcgacggtaaactggcattgttagttcccgccgaactgtttaaagatgcctaccgtcgtatggggctggatactaaaaacctttcacggacgatagaagatgccggtaccgttatcgaacctctcctgccgtggacctcggctggcgtctacatggcaaccacgctgggcgttagcacgcttgatcttctgccctgggctatccaatgctatgcggcaatcttcttcgcattaatttatggttttagcggaattggtattgccagaactgcctccgcctcagaaaagtcgccgcaatcgtcagtgacggaataa

SEQ ID NO: 372535 - DNA, 2529 bp, Salmonella enterica
atgatcccaactgcaacgtatcgtcttcagtttcgtaatggcatgaccttcgatcgcgctgcggcgctggtgccttaccttaaaaatctgggtatcagccatctttatgcctcacccatctttaccgccaccaaagcgtcaacgcatggttatgatgtcaccgatgcgaatgagattgagccttctattggcgggcgcgaaggatttgaaagactggtggccgaacttaaagcgcaagggctgggattgatcatcgatattgtgcctaatcacatggccagctcgctggaaaacgcctggtggcgcgacgtgcttgaatatggcaaggagagccgttacgcgcgccatttcgatattgactggtcgcgccgactgacgctgccttttttaggcgacacgtttgacgccgtgctggaaaacggagaaattgcgatcaagcccgatcccgctacgggtaaacccgcgttcgcctattatgataactattatccgcttgcgccggcgacatggcaggggcgcgaggccgaaatactggcgcttaccgataaagccgctattgctgatttgcatgagcgccagccgtggaaattaatgtcctggcgcgaggccgctcgctcgctttcatatcggcgtttctttgaggtcacagggctggtaggaatgcgggtggaagataaaaccgtcttcgacgatacacatcggctgattctggagctggtcagaacgggggcggttgacggtttacgtatcgatcatatcgacggccttgccgatccgaaagcctatcttgcgcgtttacgtcaggaagtggggccggcgtgctatatcaccgtggaaaaaattctcgctaaaggcgagcaacttcctgatgactggccggtttccggcaccacaggctatgaatttatcgcctcgctggcggaggtgctggttgacgatgagcagatagacaatctgcgccaggcttacgagaccgttaaaggcgcgccagtggatatgcgggcggaattacgggcagctaaattgctgatggtcgatcgcaatttcgagggggaatttacccggctgctcgcgcttgcgctgtcgattgccagcgagctacagatcgcacaggaagagagcatcgttcggcaggcgttacgcgagttattaattgcctttcccgtatatcgcacttacggcacggcagaagggctaccgccgaccgatatttgcctgttacaccgtattgtggaacgggtaaagacgcttgaaaaccctccgcagccagaagcgcttacatttctgagccgtcttcttaccggcgatgttcccgcctccagccaggaggaggcgacacagtttcgcgttcggttccagcaactcaccggtccgctgatggcgaaatcggtagaggatacgcttttctttcgtcaaaacatgggactggcgttaaatgaagtcggcgccgagcccgtcacgcatcacttctccatcgaacgctttcaccatgagatgaaaacccgacaggcgcgacagcctgatgcgttatccggtacgtcgacccacgataccaagcgaggcgaggatgcgcgagcacggctgtatacgcttaccgaagcgccggagcagtggagcgaatgccttgcccgctggcggcagatgaaccagacccatgtcaaatttttgaatgatggcactgcgccaaaatcggcggatacgtggatgttatatcaggcgctgaccggcgtctggcccccgacgctacaaccacaggacgaaacaggtttaaacgcgctgaaaacacgctttgaagcctttgtggagaaagcgctacgcgaagcgaagctgcgtaccgattgggtggacagtaatgaggcttacgaaacggcaatgcttgattacgcccgttatttactggcgccggataatcagacatttttgcaggatttttatcgttccttgcaacccttcatccgcgcagggctggttaacagcctgacgcagaccgttatcaaattaaccgcgccgggagtacctgatatctatcagggaagcgaggcgttgaattttagtcttgtcgatcccgacaaccgccgcgaaccggatttcgccacgctggcgcagcagttagaccaactgacgccgggagttttctcgcgcgaagagagttggctggacgggcaggtgaatcagtatgccaccgccgccttactgcgtttgcgtcagcagaatcatgagctcttccgttttggcgactatataccgctgcgggctgttggtcagcgtgccgacaaggtcatcgcttacgccagagtcaatcatgatgatgcgctgattgttgttgcgccccgactggtgttcgccgaatgtgacggcttattgtcacaatcgcatagcggtttctgggcaggaaccgacattattatacccggacagcttaatcagcatcattatcgcaatgtgcttacccaggagaggttaatgcctggtgaacgcctgtcgttggcctcacatcagggcggcgtactggttttaatgagcgactga

SEQ ID NO: 372536 - DNA, 771 bp, Salmonella enterica
atggtaaaatgcgtatcttctttcctcctgttcagcctgttgtccgttcaggcaatgtcagctgaaaaccatattgatctccaccagccaaaagactttgtcgatattactacggtcgcccccgacgtacaggtagacgtgcgatacttcagttcccataactttattggtcgccccattaaaggctataacgcgcctgtttgcctgttaacacgaccagccgcaaacgcagtgaagcaggtcgccgatcgtttacgccccttcggacttaccttaaaaatatatgattgctaccgtccgcaaagcgcagtgaacgactttatcgcgtgggccaaagatccttctcaaaaccaaatgaaaaacgaattttatccgcaggtagagaaaaagcgtctgtttgaggaaggttatcttgccgccagatccggccacagtcggggaagtacgcttgatctaacgattgttccacttgacagtaaaataccgatataccatcccggacgaccactggtgaattgtactgcgcccgcggcgcaacgctcgccagataatagtctggattttggtaccggctttgactgttttagtccgttatcccatcccgataatgtcatgcttaccgctcagcaacgcgcaaataggttgttattacaaacattgatgcgtgatgcgggctttacgccactggatactgaatggtggcacttctcccttactcatgaaccatacccgaacacctggtttgactttcccgttaagcagagaccctga

SEQ ID NO: 372537 - DNA, 399 bp, Salmonella enterica
atgaagaaatcagatggtgaaattcacgaaaagacagcatcctggggcattttgcagtcagaatggctaagaaaatgtggacggctattattgctgttactttaccgtttcgttatcggatgggcttttttccagttacttgccatgatcgtggcagggatatttttgttaggcgtcttattatttcatcccataatatttgtacagactatcgcaattactgagaagttaaatcatgcttcgcttgatttatggcatatccttaagttatgcctgtggcattacggtatcatcgcagggtttatttttatggcggagtgtacgttaagtaaaagtatacggcaggttcagcgcttgtccaaaaaatttggggcacaggatttttcttcacgcccgtga

SEQ ID NO: 372538 - DNA, 174 bp, Salmonella enterica
atgttgcctctccgcctgacgcgcaacgtttatttgatttattttgtgcgttatatgaattatcatcaccgtcatgcagaggaaatttccattttcagcactataaagatgctgagtgtcagtatacaaatctctgtattaaagatggcgaagatattccgttatgcattatga

SEQ ID NO: 372539 - DNA, 1206 bp, Salmonella enterica
atgatgaaaactcatcacctcattcgggtagtggcctcgctggcaatgttggcaacatcaggcctggcttatgctgaagagtacaaagccagcacggacgaaaaagcaataaaaatgacgaacgtagcctctctggaagcgcgcgttcaggccagaatggagaaaggggcatttggttatattcgcggtggagccgaagatgagaataaccttcgcagcaacaccgaaagctttgacaaaaaatatattatgccgcgcgtattacagggcattgagttaaaagagatcgatttatcaacgcagctactgggtattccgcttaaaacgcctataatccaggcaccgatggcggcgcagggcctggcccacgcctccggagagttggcgacggcgaaaggcatggcgcaggtcggttcgattttctcgttgagcacttatggcaacaagaccatcgaagaggtggctaacgtttccgggaaaaacccgttcttcttccagctttatatgagtaagaataatcaatttaacgaatttattcttgcacaagcggtaaaacatggcgctaaagcgattattctgaccgtagattcacctgtcggcggttatcgggaagaagatattaaaaataacttccagttcccgctgggttttgcaaacctggaaatgttcgccaggaaaaatgacgatggttcaaaaaccggcaaaggggcagggataagtgaaatttacgcgcaggctaaacaagcctttacgccggaggatattgcctatgtacatcgtatttccggtctgccggttattgtaaaaggcattcagtcgccggaggatgctgaaattgctatccaggctggggccgcaggaatatgggtttctaatcatggtggccgtcaattagacagcgggccgtcctcattcgatatgcttcctgcgattgcaaaagtcgtcaacaagcgagtgcctgttatttttgacagtggagtacgccgtggttcgcacgtattcaaggcgttagccagcggggcggatattgtggcggttggccgacctgtattatacggtcttaatcttggcggcgctcagggtgtggcatcagtgattgaacagctaaacaaagagctgacaattaacatgatgttgggtggcgccaggaatattgaacaagtgaaaacgacacgcttgttaactgaaaaagatctgccacagtaa

SEQ ID NO: 372540 - DNA, 1344 bp, Salmonella enterica
atggcgaacaccatcacggcagatgagattcgggaacacttttcgcaggcaatgtcggcaatgtaccagcaggaagttccgcagtacggtacgttactggaacttgtggctgacgtgaatctggcggtgctggaaaataatcccaaactgcatgagcagttggctaatgccgatgaactggcgcgattgaacgtggaacggcatggcgccattcgtgttggcaccgcagaagaactttctaccttgcgtcggatattcgccatcatggggatgtacccagtaagttattacgatctctctcaggcgggcgtgcctgtgcactccacggcatttcgtcccattgacgaggcttcgctctcgcgtaatccctttcgcatgttcacttcgctattacgcctggagctcattgaaaacgcggcattacgccagcgggcggcggaaatcttatcgcagcgtgatatttttacatcgcgctgccgacaattgctggatgagtacgacgagcagggcggttttagtgctgctcaggccgaagagttcgtccgtgaaacgctggagacttttcgctggcatcgtcaggctaccgttgatgaagaaacgtaccgcagcctgcatcgtgagcatcgtttaattgccgacgtggtctgttttccgggatgtcacattaaccatctgacgccgcgtactctggatatcgaccgggtacaggccatgatgccggagtgcggcattacgcctaaaattcttatcgaaggtccgcctcgccgcgaagtgcctattctgttgcggcaaaccagtttcaaagccctggaagagcaggtgctcttcgttgatgaaaagcagggtacgcacacggcgcgcttcggcgaaattgagcaacgtggcgtcgcgctgacgccaaaaggtcgtcgattatatgacgaactgttgcacaaggcgggaacgggtaaggataacttcacgcatcaactccatttgcgggaggtctttaacgcctttccggatagcgaatttctgcttcgccagcaggggcttgcctggttccgctatcgcttaacgccttccggcgaggcgcatcgtcaggcgatccatcctggcgacgatccgcagccgcttattgagcgcggttgggtgatcgcgcagccgattacctatgaagattttcttccggtcagcgcagccggcatttttcagtcgaatttgggaaatgaaacgctggtcagaaggcacggtaatgccagccgcgacgcctttgaacaggcgctgggatgtgcagtacgggatgagttttcgttatatcaggaagcggaagaacgcagtaaacgccgttgcggtctgctttaa

SEQ ID NO: 372541 - DNA, 762 bp, Salmonella enterica
atgttatccaaaaaatttggcttatcgatgatagtgttgggaataatgtcgtcttcagcgtttgctgatagcatcgttgaagggagaacgctcaatgtcgcagtatcaccagcctctccccctatgttatttaaaagtgctgatggcaaattgcaggggatagatctggagcttttttcgtcttactgtcagtcacggcattgtaagctaaacatcaccgaatatgcctgggatggaatgcttggcgcagtggcgagtggtcaggcagatgtcgcattttcgggaatttcaattacagataaacgtaagaaagttattgatttctctgaaccttattacatcaactctttttatctggtcagtatggccaatcataaaataacgctcaataacctcaatgaattaaataaatattctattggataccctcgaggaatggcttactccgaccttatcaaaaacgatctggagcccaaaggatactactcgttaagtaaagtaaaattgtatccaacctataatgagacgatggctgatctaaaaaatggcaatcttgatctggcttttatagaagagccggtttattttaccttcaaaaataagaaaaagatgccgatagaaagccgttatgttttcaagaatgttgatcagcttggcattgcctttaagaaaggctctcccgtgcgcgatgatttcaacttatggcttaaagagcaagggccacaaaaaatatctggcattgtcgatagctggatgaaatag

SEQ ID NO: 372542 - DNA, 801 bp, Salmonella enterica
atgaatacaacgccatttccggcgctctctgcggaaacattgctggcggtgaataccgtcggacagtggctggcgcaaaatgatttttccggcgaacaaccttattcgtcggattgcgtcgtcctggcgggcaatgcggtgatccccactatcgacgcggcctgtcgcatcgccaaagcgcaaggcgttcctttactgattagcggcggtataggtcattcgacgccgtttttgtacgccgtgattgcccggcatccgcgctaccacactattcgcacaagcggacgcgctgaagccgcgatcctcgcggatatcgcgaaccagttctggcatattccggctgagaaaatttggctggaagatcggtcaactaattgcggcgaaaatgcccgtttctcctgcgcactgatccgtcaggcgaaagaaaacattaacacggctatcgttgtgcaagaccccaccatgcagcggcgcactatcgcggcattccggcgcgtgacaaacgacgacaccgatgcgccgcgctggctgagttttcctggttttgttccggtactgcgccaccttaacggcggtacacgttttgccaacgttgaagagggcatctggacggtggagcgttatctgtctctgattgccggcgagctgccacgtttgcgtgacgatgaaacagggtatggaccgcgcggtaaagattttatcattcacgttgatatcccacgcgatattgaaaaggcatggcaggtattgcaggcagatactacgttgcgcagtgcgttaggacagagagctttacgctaa

SEQ ID NO: 372543 - DNA, 936 bp, Salmonella enterica
atgcaagaaattcaaaagaatacaaagaaagagcaatacaacctcaacaagttgcaaaagcgcctgcgccgtaacgttggcgaagcgattgccgattttaatatgattgaagaaggcgatcgcattatggtttgcctttctggcggcaaagatagctatacgatgctggaaattttacgtaatttgcaacaaagcgccccgatcaatttttcactggtcgccgtcaacctcgatcaaaagcagccaggtttcccggaacatatcctgccagcctaccttgagcagctgggcgtagaatataaaatcgtcgaagaaaacacctacggcattgtgaaagagaagattccggaaggaaaaaccacctgctcgctgtgctcgcgtttgcgtcggggtatcctgtatcgtacggcgactgaactgggcgcgaccaaaatcgccctgggccaccaccgcgacgatattctgcaaaccctgtttctgaatatgttctatggcggaaaaatgaaagggatgccgccgaagctgatgagcgatgacggcaaacatatcgtgattcgcccgctggcttactgccgcgagaaagatattgtccgttttgctgaggccaaagccttccctatcattccttgtaatctgtgcggttcgcaacccaacctgcaacgccaggtgattgccgacatgctacgcgactgggataagcgctatcctggacggatcgagacgatgtttagcgccatgcagaatgtcgtgccgtctcacctttgtgacactaacctgttcgatttcaaaggaatcactcacggttccgaggtcgtcgacggcggcgatttagcgttcgatcgtgaagagattcccttgcagcccgctggctggcagccggaagaagatgacacctccttagaggcgttgcggcttgatgttatcgaagtgaaataa

SEQ ID NO: 372544 - DNA, 1155 bp, Salmonella enterica
atgttaagaaatatcagcgtcaggacatgcattattctattcatggtatgtacgtttcttttggtggatactttacaaataacctttctgcacgatctccctattttaattacgtgtaatatcatttatctgatctcgacattactgctttggtggtatatgacctgctatctggtagtgccgattaataccgtgaagaaaagtattgaagaggtcgcagcaggaaacttgtctattcatatctccgaatttggcaataattgcgccgggcgactcatccccggaattaatagcctgtcggagaatatttccgcgctggtacgcgaaatcagatcctcttcgcaaacggcaatgaccctttccgaacaactggcggcgcgcagtatgtcgctatccgtaaagacggaacagcagtcggcctcgttaattcaaactgccgccagtatggatgaaatggcggcgagtaccaaaaacaatgcggataatacccgaatggcgagcatacaggcggattgtgcaacccaatgcgcccgtaaaggcggtgaattaatggtgcgggttacagaaaatatgcgttctattaccgactgtgcctcgcagatgacggagattatttcattgattgacggtatcgcattccagactaatattctggcgcttaacgcggcggtagaggctgcgcgggcgggcgatcatggaaaaggtttctccgtggtggccggggaagtgcgtaatctggcgcatcgtagcgctgaggcggcaaaaaatatcaaggcgctgatcgacgttacgcatgacaatgtgcggcagggggccgccatagcgcaggaggctgaaaaaaatatgcaggagattgttggcggctccgggcaattaaacgtgctgatgagtgaaatttccaccaccacgcgggagcaggaaaaaggcattaaccagataacactggcgttgagcgatctggaaagcgcaacccatagcaatgtcttaatggttgaagcgctatctgcttcttcggatgttttaaaggcgcaggtgatcgagttacagactaaaaccgacaaatttcgtttaagccagccgggttacagtgaacatgcgctgtcgcgctctcatgtatcacctctttcgaccatcaccaggcgcggccaggcctga

SEQ ID NO: 372545 - DNA, 768 bp, Salmonella enterica
atgccaagaggactaatctcaggccgagactattcggaatgcgatatctttgaccatactttatatccaagaatgaaggaggaacctcttcttaatgaagatgactgtattgttgtccctgtaagaaatgagattactccccatttcagaagagtaggaaatccatctttcggcaaaaggttaggtagagccgaagataatccaactcacgataattgcgtaaattatttatatgatgagttaaataataaaaatattgaagctgttaagttctctacatatgtttttgcagaggatcgaacatatgaagagcaagtaatttttagtccgctgaaagatagtgattttgggtggtataaagaaaaggacgcacgtattgcatttcatgaggattcttatattcaacccgatattggaggaagggatagaaacaaatttttcccccgctcagcctatccaaacattatcattgaagtaattcgtactcactacccagaaagggatacctttcagaaactccttgagctttcaaaaacaaatcaccacgtttatttttattttatagatgaaggaaacaaaaaatcaaaactaaatagtctttctattaaaaatggtatattgacattaagagtatctcactatctaattggtggtcaactctataagaatggtaattgctatgcaccaaaaggtgaagatgaatctttcgagcactggtatcaatatcttgaaaatagttattttacaaatgctatggaaagagcttaa

SEQ ID NO: 372546 - DNA, 345 bp, Salmonella enterica
gtggacgaattaaaattctgcggctcgctacgaaagttgctacagcccttaaaaactataggcgctgtcgaatcgctatggacagcctttgagaaacgcaaagtatttctgacggaggcaaaattatttatccggcgatcaaggatgcgtcgaaaaatggagtgtgttgctctggagtgctggcgaagaaccgttttattatcggagtttagtgaccgtctgacgatcaccttcaagaaagcaggcagttacagagaattactagtaacctctgataacaggcacttttcatactcttttatgcatcataaaatgctgtctgaacttgttaagctctttccatag

SEQ ID NO: 372547 - DNA, 1266 bp, Salmonella enterica
atgaaaaataacatcagatttgacttatccgattatttgattcatttttttcgggacgttgatttagagaccggtagccatatttatttgcctgaacactgtggttttaataatcagcaccacgcatgtttcattgatgctaaatatttacttcgattatctttacgcagtcataaaattttctcgtcctggtcataccgaaatgggcaacgaaccgtatatggtgactccccggtggtatgctttacagatatgccgattgcagcttatttagaaactggtgttcgccgattagaacgaaaagaaaaaatcggtttatatgcaatcgttttacctaaagagcaaatgtttaattatggggcaaggccagtcatatatgggttggatcagcataacaatgctcgctgctcgcaaggcagaaacggggaacgtattcttgatgaaacggctcttcctttgattgagcaatatagatatgttacttatgttccaggtaagattgactggacacatgaacgcgaatggcgatggccatatcgtggcgatattaaaaatttccttaatcatattaaagagtatggtattccggaaaacattgaaagcaccccagggtttgattttaaatcaagcgaaataaatggtgcgggaataatcgtcccgtttgcagaagatatccttaccgtagctcacgatattttaactttaattgaccggggcgtcattggaagaaacactttcaaattcattatagctgtagagagtttacaatcatggacccagctctcggaaccgggcgcgttactgtcttgtattaatgataatactttcggatttgaatctttttttgatttatctgcatctaaagtaaaaaattatgctgattctatcaatgattatgtaagtgaattatactcaaaaaaagattttctaaatgatagttatgcaatggaatttggaaatgcctgggtctggattcatgataaccaatcccaggtggtacgggcgttactgcaggctggaatgatcgaggttaataaagaagggcggtacttattagatgttaatttggcttctgttgattggccattaagaagaaaagaagctttcgcaagtcatgttgcgggatggctcaaacatcgttttgatatcgaagcgggaaggtattccgtttggggaaaagatgattatgatgcgatcccaagttatgagacgccgctaaaggatcagcatcctttttataatcatacagtgaatgtcgactggtaa

SEQ ID NO: 372548 - DNA, 915 bp, Salmonella enterica; identical to SEQ ID NO: 368280

SEQ ID NO: 372549 - DNA, 159 bp, Salmonella enterica
atgcagtatagccagcgtggtgcttttgctgaaaccaggcgcgagcaacacggcaatgatgatcggcgtcagaatgagttcggaatcggcattggcaaacaaggcgcacagtcgttaatacccaccagcagttccgccaagactgcgacaatgtcgtaa

SEQ ID NO: 372550 - DNA, 264 bp, Salmonella enterica
atggacggcgaactgaagaacctcaaatgcaatatctgtcagcttgccgctattacagggttacatcgacagacggttgtcagtcgcctctcgggcgttcccctggcactgggaagcaatgaaaaaaacaagctgtatctcctgacggatgtgatccgcgtactgatggaaacgcccgtttcccaggctgctgaacatcaggacccgaataaaatgactccaaaagagcgtaagaactggtttgactccgaaaaggggcgttaa

SEQ ID NO: 372551 - DNA, 249 bp, Salmonella enterica
gtggttgatgataaaccaatgagaataggttgggtattttatttttcttatatttttgttgctattatctttcatctgtttattagtttttgttattgtttgagtattgatatggcagaggctaatactgttgtttttttattaaagccagggacgatttcattattattttttgcttctccctgccaggcggttcaggaccagactgttggcaacattgagttcagttttcattaccttagtatttaa

SEQ ID NO: 372552 - DNA, 1140 bp, Salmonella enterica
atgatggtttatccagtcaaacacagtccgctattgcgtcagcctgagcattttatcgccagagatgaactaaaagccctggtgcaaaaggtgacgcataacctggttaatattaaagatgagacaggcgaatttttattgcgactggacgacggacgcgtgatcgatactaaaggctgggccggatgggagtggacgcacggcgtgggcctgtacggaatgtatcactattaccaacagaccggcgaccagacgatgcgtaagatcattgatgactggtttgccgatcgttttgcggaaggcgcgacgacgaaaaacgttaatacgatggcgccgtttttaacgctggcgtatcgctatgaagagacgcgtaatccagcgtatttaccgtggctggaaacgtgggccgaatgggcgatgaatgaaatgccccgtaccgatcacggcggaatgcagcacatcacgctggcggaggaaaatcatcagcagatgtgggacgacacgctaatgatgacggtgctgccgctggcgaaaatcggtaagctgttgaaccggccggaatatgtggaagaggcaacctatcagttcctgctacacgtgcagaatttgatggataaagagacggggctgtggttccacggctggagctatgacggtcatcataacttcgctaacgctcgctgggcgcgcggcaacagttggctgaccattgtgatcccggattttcttgaactgctggacttgccggaaaataatgccgtgcgccgttacctggtccaggtactgaatgcgcagatcgccgcgctggcgaaatgtcaggatgaaagcggtttgtggcatacgctgcttgacgatccgcactcttatcttgaggcgtcggcgacggcgggttttgcctacggtattcttaaagcggtgcgcaaacgctatgtcgggcggcactatgcgcaggtggcggaaaaagccattcgggggatagtgaaacatatctcgtcggaaggcgaactgctgcaaacgtcatttggcactggcatgggccacgatctcgatttttaccgtcatattccgttgacctctatgccttacgggcaggcgatggctatgctgtgtttgacggaatatctgcgtaactatttctga

SEQ ID NO: 372553 - DNA, 2079 bp, Salmonella enterica
atggctaatctggtcgcgatgctgcgcctgcccagcaacctgaaatcgacgcaatggcaaattcttgccgggccgatcctcattctgctgattttgtcgatgatggtgctgccgctacctgcttttatcctcgacttattgtttacctttaatattgcgctatcgatcatggtgctgctggtggcgatgtttacccagcgcactctggattttgccgcgtttccgaccattctgctgtttaccacgctactgcgtctggcgcttaacgtagcctcaacgcgcattattttgatggaagggcataccggcgcggcggcggcgggaaaggtagtggaggcgttcggtcatttcctggtcggcggtaacttcgcgatcgggattgtggtttttatcatcctcgtcattatcaacttcatggtcatcaccaaaggcgccggacgtattgccgaagtcggcgcgcgctttgtgctggacggtatgcccggcaagcaaatggcgattgacgccgatcttaatgccggtctgattggtgaagacgaggccaaaaaacggcgttcggaagtcactcaggaagccgacttctacggctcgatggacggggcaagtaaatttgtacgcggcgacgccatcgccggtattctcatcatggtcattaacgtggtcggcgggctgctggtcggcgtattgcagcacggaatgagcatgggcagcgcggcggaaagctacaccctgctgaccattggcgacggcctggtcgcccagatcccggcgctggttatctccacggcggcgggcgtcattgtgacccgcgttagtaccgatcaggatgtaggcgagcagatggttggccaactgttcagtaatccaagggtgatgctgctggcggcggcggtgctgggtctgcttggcatggtgcctggaatgcctaacctggtatttttactctttaccgccgctttgctcggcctggcatggtggctgcgcgggcgtgaagaaaaagcgccggaggagccgcagccggtaaaaatgccggaaaataactcggtggtcgaagccacctggaatgacgtacagcttgaggattcactgggaatggaagtgggctaccgcctgatcccgatggtggattttcaacaggatggcgaattgctcggacgtattcgcagcattcgtaaaaaattcgcgcaggatatggggttcctgccgccggtggtccatattcgcgacaatatggatttacagcctgcgcgctaccgtattttgatgaaaggggtagagatcggcagcggggacgcctatccgggacgctggctggctattaaccccggcacggcggcgggaacgctaccgggcgagaaaaccgtcgatccagcttttggccttgatgccatctggattgaaagcgccctgaaagagcaggcacaaattcagggctttaccgtcgtggaagccagtaccgttgtggcgacgcatcttaaccacttgattggccaattctccgctgaactgtttggccgccaggaagcgcagcaactgttggatcgtgtctctcaggagatgcctaaactcacggaagatctggtccccggcgtcgtgaccctcacgactttacacaaagtcctgcaaaacttactggcggaaaaagtccctattcgcgatatgcgcaccattctggaaacgctggcggaacatgcgccgttacaaagcgatccgcatgaattaaccgccgtggtacgcgtggcattaggacgagcgattacgcaacagtggttccccggtaatgaagaagtgcaggtgattggcctggataccgcgctggagcgtttgctacttcaggcattgcagggcggcggcggtcttgagccggggttggcggatcgcctgctggcgcagacacaagaggcgctttctcgccaggagatgcttggcgcgccgccggtattgctggttaaccatgcgctacgtccattattgtcccgctttctgcggcgcagtttaccgcagctggtggtgttgtcgaaccttgagctttccgataaccgtcatatccgcatgacggcgaccattggaggaaaataa

SEQ ID NO: 372554 - DNA, 1050 bp, Salmonella enterica
atgagtaaaatcagggtattgtcagttgatgattccgcgctaatgcgccaaatcatgactgaaattattaatagccatagcgatatggagatggtggcgactgcgccggacccgttggtcgccagggatctcatcaaaaaatttaatccggacgtattgaccttggacgttgagatgccgcgtatggacggcctcgattttctggaaaaactgatgcgcctgcgaccgatgccggtggtgatggtctcttcgctgaccgggaaaggttccgaagtgacgctacgggcgctggagttgggggccatcgattttgtcaccaaaccgcagcttggcattcgtgaaggtatgctggcgtatagcgagatgatcgccgaaaaagtgcgtaccgccgcgcgggcccgcatcgccgcacataaaccgatggcggccccggcaaccttaaaagcgggtccgctgctcagttcggaaaaactgattgctatcggcgcttcaacgggcggtactgaagctatccgacatgtgctgcaaccgctgccgctttccagtccggcagtgattattacgcagcatatgccgcctggctttacccgctcgtttgccgagcgtctgaataaactctgtcaaatcagcgtgaaggaggcggaggacggcgaacgcgtattgccaggtcatgcctacattgcgcccggcgacaagcatatggagctggcgcgtagcggggcgaattatcaaatcaaaattcatgatggcccgccggtaaaccggcatcggccttccgtggatgtgctgtttcattcggtggcgaaacacgcggggcgcaacgccgtaggcgtcattcttacggggatgggcaacgatggcgccgctggaatgttagcgatgtaccaggctggcgcctggaccattgcgcaaaacgaagcaagttgtgtggtgttcggcatgccgcgcgaggccatcaatatgggtggcgtaagcgaagtggtcgatcttagccaggtaagccagcagatgttggcgaaaatcagtgccggacaggcgatacgtatttga

SEQ ID NO: 372555 - DNA, 1434 bp, Salmonella enterica
atgcaaaagaaaacctgggccgttttattgataccattgtgcctcaccgcttgccaccagacgacctaccgatcaacagccaaagatgaaattgttgcagggagctatattgacccgacaaaaacacgctttccgttagcagattattcacagtcggttgataaatggatacctccggactcagctgattacactattccggttattgatagtgctacccaacaacgctactttaacgcactaaaatctcattatttcggaatggacagtgaagctcactcgccgtggaatggtttttatattaccacattgctgaaaaaaaacgcagcacaggcccgggatgccagtattaagcagtttcttagcgacggcagtgcttattggggggaaaacttcagactttatacctctcgctggaaagaggaggttagagggaatacggatacgcagattgacaatatctatcatgcctcccggcgaggtattatggtcagagaaagtttagtcagagcgctgccaacggacgacccgctctttaacgatccccgtcaggcgggcgaggggtatccgtttgataatttacaaatgtcttcgctgcgtcccggtacgccggtctatacgctgacgaagagcaaagaccaacgctggcaatatgtcttttcaccagcggtaactggctgggttcatagtgaagatattgccagtacggatcagaaatttataacacagtgggttttgctcgctcacaagcaactgggggcatttatcaacgcgccggtttctgtccatgccgcaggcgtctattatttcaccgggcgaccgggcactattttaccgttccgacatcaacgggcgggccagttcctgattgcggcgccagttcgcgacagcaatggtcgtgcgtttatccattgggtctggctaagcggtaacgagtttacggctatgccgtggaaaatgacgccggaaaatatcgccgtgctaatgaaagcaatgcacggcgccccctacggttggggaaattttaacttttataatgattgttcagccgaagtccgcagcctgttaatgccgtttggcatattcctgcccagacattcatccgcgcaggtagaggctgctggacgggtggtcgatcttagtcataaaagtccccaaatgcggatcgattatctcaccagatacggaaaaccgtttactacgctggtctatattccagggcatattatgctgtatatcggtaacacaaccatgaatgggcaggtcgtgccgatgacttatcagaatatctggggattgcgcccaaaccatgctaatagccggagcattatcggtgaggcggtttttttgccgttactgcgtttttatcctgaaaatcctgagctgatatcgctggctggtaaggttctgtttaagcttggttatatagaatag

SEQ ID NO: 372556 - DNA, 285 bp, Salmonella enterica
gtgaaatataccgataatgcaaaattatttattagcttcattaatattgggattgtaggttgcgcttttttacttttttttattttgtatgagcctgagagtgcaatcgtaacctactctcttccaggtgagctttcctcttcgacatgtgatgcacataattttattggctacgtcgatgcaaatgactttgcagagtatataaaaaaagtagaactgacgcgctacaatatgtattgtctgaaaaaaacaggggcaggccagtggagtatttatgcaaattaa

SEQ ID NO: 372557 - DNA, 1485 bp, Salmonella enterica
atgaaaaaccccacgttattgcagtacttccactggtattatcccgacggcggtaaactctggtctgagctggcggaacgtgctgatgggctgaatgatatcggtatcaatatggtctggctaccgcccgcctgtaaaggcgcctccggcggctattccgtaggctatgatagctacgacctgtttgacctcggcgaatttgaccaaaaaggaactatcgcgacaaagtacggcgataaacgccagttactgacggcgatagacgcgctcaaaaaaaataatattgcggtgctgctcgacgtcgtcgtgaaccacaaaatgggcgcagacgaaaaagaacgtattcgcgttcagcgcgtgaatcaggatgaccgcacgcaaatcgatgacaacatcattgaatgcgaaggctggacgcgctacaccttccctgcccgcgcgggccagtattccaactttatttgggactatcactgtttcagcggcattgatcacatcgagaatcccgacgaagacggcatttttaagatcgtcaatgactataccggcgatggctggaacgatcaggttgatgatgagctgggtaatttcgactatctgatgggggaaaatatcgattttcgcaatcacgcggttacggaagagattaaatattgggctcgttgggtcatggaacaaacccactgtgacggctttcgcctggacgcggtaaaacatatacccgcctggttttataaagaatggattgagcatgtacaggcggttgcaccaaaaccgctgtttattgtcgcagaatactggtcgcatgaagtggataaactgaaaacgtacatcgatcaggtcgacgggaaaaccatgctgttcgacgcgccgttgcagatgaaatttcacgaggcctcgcgccagggcgcggagtatgacatgcgccacatattcaccggcactctggtagaagccgacccttttcatgcggtgacgctggtcgctaaccacgatacacaaccgttacaggcgctggaagcgccggtagaaccctggttcaaaccattggcctatgcgctgatcctgcttcgtgaaaacggcgtaccgtcagtgttttatcccgatttatacggcgccagctatgaagatagcggcgaaaatggcgagacctgtcgggtcgacatgccggtgattaaccaactggatcggctgatcctcgctcgtcagcgttttgcgcacggtatacaaacactctttttcgatcatcctaactgtatcgcctttagtcacagcggtactgaagagaatccaggctgtgtggttgtactttccaatggcgacgacggtgaaaaaaccctcctgctcggcgacaattacgctaacaagacctggcgtgattttctgggaaaccgcagtgagcatgttgtaactaatgatcaaggcgaagcgacgttcttctgcaacgcaggcagcgtcagcgtgtgggtcattgaggacgtgtga

SEQ ID NO: 372558 - DNA, 354 bp, Salmonella enterica
atgataaaaattattttcatctccattattggagtcgtctgtcttgccgctgcccgttactcacccgtcacagtggtcaatgcacatccgagcgccattgcccgctgtctcgctgataatctgtccccgtatgggtatatactggatctccatgaaacagatattccaggtattagtaaagaatttaccgtgtattatcgcaacggcgcatatattgcaggaacattctggattgcaaactcaatgacaatagcctcagaacgaatagtaggaatgaatggcgtcagtaaacaggcgtaccctatttttaataagtccctgcaacaatgtgcaacccgcttatcaataaaatga

SEQ ID NO: 372559 - DNA, 1269 bp, Salmonella enterica
atgttcgcgctctgcgatgttaatagcttttacgcctcctgcgaaacggtctttcgtcctgatttatgtggccgaccggtggtggtgttatcaaacaatgatggctgcgttatcgcgtgtagcgccgaggcgaagcagctcggtatcgcaccaggtgagccatacttcaaacagaaagaacgcttccggcgatccggtgttgtttgcttcagcagtaattacgagctttacgctgatatgtcgaaccgggtaatgaccacactcgaggagatggtgccgcgggtagaaatttacagcattgatgaggctttttgtgatctgacgggggtacgaaactgccgggatctgacagatttcgggcgcgagataagagcgacggtcctgaagcgcacgcacctgactgtcggtgtaggcattgcccagacgaaaacccttgccaagctggctaaccatgctgcgaaaaagtggcagcaccagaccggcgggggggttgacttgtcgaacatcgatcgccagcgtcggctgctggccctgatacccgtagaggatgtctggggtgtcggcaggcgcatcagtaagaagctaaatgccctgggcatcaagactgctctcgatctctctgaacaaagtacctggatcatcaggaaacacttcaatgtcgtgctggagcgtaccgtgagagagcttcgcggagagccatgtctggagcttgaagagtttgcgccggcaaagcaggaaatcgtttgtagccgctctttcggcgagcgggtcacagactatgaggaaatgcgccaggctatttacagctacgctgcgcgcgcggcagaaaaactccgcggcgagcaccagtactgccgtttcatctcaacattcgtcaaaacatccccctttgccctgaacgagccctactacggtaacagcgccgcggtgacgcttctcacccccacgcaggattcacgcgacattatcaatgcggctgtgaagtgcctggataaaatatggcgcgacggccatcgctaccagaaagcgggggtgatgctgggtgacttcttcagtcagggcgtagcgcaactcaaccttttcgacggtaacgcgccgcgcgccggtagtgcgaagttgatggaagtactggaccatcttaacgcaaaagccgggaaggggacgctgtacttcgccgggcaggggatgtcgcaacagtgggctatgaagcgagaaatgctttcgcctcggtacaccacaagatactctgatctactgcgtgttaagtaa

SEQ ID NO: 372560 - DNA, 420 bp, Salmonella enterica
atggaatttttcagacctacagagttgcgcgaaattattcctctcccatttttcagttacttagtgccgtgtggattccccagccccgcagcggactacattgagcagcgtatcgatcttaatgagttgctcgtttctcatcccagctcaacatattttgtcaaagccacgggtgattcaatgattgaagcaggcatcagcgacggcgacctgctggtggtggatagctcacggaacgcagaccacggtgacattgtaattgcggcaattgaaggagagttcaccgtaaaacggttgcagttgcgcccgacagtgcagttaatccccatgaacggcgcctatcgacccatacctgtcggcagtgaagacacgctcgacatattcggggtggtgacctttatcattaaagcggtcagttga

SEQ ID NO: 372561 - DNA, 798 bp, Salmonella enterica
atgattaagtggccctggaaagcacaagaaataacccagaacgaagactggccgtgggatgatgcgctggctatacctcttctggtaaacctcaccgcgcaagaacaggctcggcttattgcgctagccgaacgttttttgcagcagaaaagactggtagcgctacagggatttgagctcgactcgttaaaaagtgcacgtattgcgttaattttttgcttaccgatcctggagctcggtattgagtggcttgatggttttcatgaagtgctcatttatcccgcgccctttgtggtagatgatgaatgggaagatgacataggtctggtgcacagccagcgtgtcgtacagtcggggcaaagctggcaacaagggcccattattctgaactggctggatatccaggactcgttcgatgcttcgggtttcaatctcattattcatgaagtcgcgcacaaactggatatgcgtaatggcgatcgcgccagcggcatccctttcatcccgttgcgcgatgtggctggctgggaacacgatctccacgcggcaatgaataatattcaggatgaaatcgatcttgttggcgaaagcgctgccagtatagatgcctatgccgccaccgaccctgcagaatgttttgccgtgttgtcagagtattttttcagcgcgccagaactgtttgctccacgtttcccggcgctatggcagcgtttttgccagttctatcgccaggatccttctcagcgcttacgggtaagcgctgccgaaggcgactacggcgaggaatccgaacattaa

SEQ ID NO: 372562 - DNA, 192 bp, Salmonella enterica
atgggcaagttaggtggtgaaatgaaggcactggcaaagcactgtggtggtagccataaaacggtgaacgatcgcattcatatcgtgcagcgtttcgatcaccacttacgggctttgaacgtccatatccagcgggttgcgcagattaaggtgcgccacattgaaagctatattcatgaaaggttggcgtag

SEQ ID NO: 372563 - DNA, 267 bp, Salmonella enterica
atggcctcgctgcgcgctgttctgcaacaggccgggcgtaaacaggtggcagagcatgagcggctgactaataaatcgctgggtctggctggtgcatcgcgcagcgggacgcgacaggcgatcacgccggaacattatcatcatgtgctggagacggcccgcatgaaagatccgggactggcggcggcgctggaactggcgaggctgatgggcttacgttcacaggaagcggtgcagagcgtgcaatcgctgaaaacgtggaaatag

SEQ ID NO: 372564 - DNA, 1086 bp, Salmonella enterica
atgacaaaagcagatatcccattaaaaactgagcgactacataccgtagccccatacattgggaagatgcgccccgaaattgcggggtgggctattgatactgtatccaaaccaggcgaattagtatacgacccattttgtggttctggtactgtgctcctcgaagcttggctcaaaggtagggatactattggtaccgacctcaacccctatgcctgcctagtgtcacgcgcaaaactaaatccatatgaacctaataattcagaaagggtccatgtactattagataaatactcagctttcgttgaaaagataaagccgaccatcgatcttgatgaaattcctgtttgggtaaaggacttctataatccacaaactttaatcgagttgttagcatgggttgcagttttaaaaaataataatgatgagtttgctctcgcttgcttgctttccatcgctcaccatcagcgacctggttttctttcatatccatcaagtcatacagtgccgtatctcagaactaaaaaatttcctccacatgattttcctgagctctacgaatataggcaagtacgccctcgactagaaaagaaaattttccgggtgtataactcattgccttcaattgattactcattaagtagaactgtttatcagcaagatgcttctactttagagttgcctcgtaaggttgatgcaataattaccagtcccccatacatgggacaacttgattatgctcgtgataatagattacgactttatcttatgggtgttgaggattggtcatcgctcaataagtccatttccccaagcgcaacaagatttgttgagcaatttagttcatgtctcaattcatggcgtaaaaatttacgtcatggaggcaaacttgcgatttttgttggtaccacaaccaatactacaaaaaaaaggctagacgatattgtaattgatttgataaataatgaatggcctgactatgaattaaccgacaaaatttcgagtgaaattcctgaagcccgacgagccaggaaaaattgtaagggaagtgttgctgagtctctattaatatttgaatataagtaa

SEQ ID NO: 372565 - DNA, 1050 bp, Salmonella enterica
ttgaaatcagtagcaatgttcaataataaaggtggtgtaggaaaaacaaccctaacctgcaacctagcatcgtttattgcaacggagttcaataagcgagtgttaattgttgattgcgatccgcaatgtaattccacacaattaatcatgggaattgaggagtctgctgagttttatactaggtcaaataacaaaatcagcactataaaagatgtcttgcaaccaattgaagatggtgactcagatataaacactgatctaacgttcctaaaatcttcagaaaatagatttggtgtagatttactacctggccacccttatttagcaataattgaagatagattaggtgctgcatggtcacaacttcgtgcgggagacagacctggttataggcaaacaaactggaataatcacctctgtagattcttagaaaataaatatgatctcgtcatgtatgatcttggccctagcttgggctcaataaatcgctcggtactaattggttgccaacacttcctaacccctttaggatctgatgtttttagtatcattggtgttaaaaatatagcgacctggctttcaaaatggctaaaagactatattaatctatggaatctattagaacctgaggagaaaactatattaagagaccgatttaatatcattgatactcctagtgtatataaaggtttcatcggttacactgttcaactttatattacaaaatcctacggtaaagaaagacgtgctacaaaggcatacgaatctattataggtaatgttggtgtcgaaattaatacatatcttcgtaatttctatcctcagcatttagaggctcatccagaacatgccaaacttggtgatatacaacacctttatagtcttgtacctctagctcaaaaaaatgctgttccaattcacggtttaaccagtactgatggacttgtcggatctcaatattctgcagtcaaagaattttacaatacgatacatccaattgcagagaacctcttacgtaatttaaatatgttgggggtagatgctaaatga

SEQ ID NO: 372566 - DNA, 873 bp, Salmonella enterica
atgattaactggccggattctttaattgatgagctagctgctcgccgatgtgtaatatttatcggctccggtacatcggctagtgcgacaaaaaaagggcctaataatgagacaatcagccctccaacctgggatagattacttgaaatccttctggaaaaatgtcatgaagatcaagatggttctaaagaaaaagcgaatgagcttcttcaaaatcaaaaatatcttgattgtgctgaattaatccgccacaactgcatgcaaccagctgactataacagaagcattgaatcaattttttcgggatataacccaactgaaatacataaggcagttttaagtcttgaccagaaaatagttttcacaacaaatttcgatagaatttatgagcatctttgtttaagagatgaaggtcgagatgggtatgtagctctaaattattatgacgatggtcttattgcaagaatgcgttcacctaagagaattattgtaaaagttcatggttgcgcaggaactcctgaacatacaattctcaccaaatctgattttttcaaagccaggtcaaaatatccaggttttttcagtgcgttagaaagtatatttttgactcataccattctttttatcggatacagtgtcaatgatccggaaattcagttgatacttgaaaataatataattacataccctagtgataatcctcattatgcaaccatgtcaaaaggcatgcataggacaatgatagcagcattcaaaaaaacaaataatatatccgtgctggaatatgattctgctgacaatcatatacagctggtagaaagtttgaaagaattatgtgtccaagtcgaagatagaagacaataccaaggttaa

SEQ ID NO: 372567 - DNA, 1527 bp, Salmonella enterica
atgcgaactataaaagcgattaacaactttaaagttgatttatttattactttttttcttattgcgctaggattttatcttcgaactatatttgtctctaagatgggcgctgatttaacaggtgtgatgttgttatttacacaactgactgcttatttaaatctcgccgagcttggcataggggtagctgcggcaagccttttatacaagccgctgagtgagggggattatgcaaaaataaaatacttaactttattgctgtctacaatctatagatatatctcgtttttagttttattgataggtatagtaattggctttggtatttactttttcatcgattctgttaatgcagtaagtcacgtttttatttattgggcattttttgtaataaatacatctttaacttattcttatgcaaagcattcaactctattaactgcaaatcagcaatattcagtagtccgtaaaatacagggtggcgggaaaatattaattattgcgctgcaaatattgctattagtcaccacacataatttcttactctatttgctcgttgaaactattggcgtgatagtacagtattttatatttaaaaatattattaataacgacatccattttaaggtagttccacaatctattagcgatgatgaaaaaacaacattaaaaaatgaattaaaaataaaaataaaaaacatgttttttcataagattggtggtgtgttagttttaaatactgattatttgctagtttcaaaatttcttaatttaagctacgtcacgatttatggaagttatatgatggtcttccaggttgtgactgtgcttatgtccagttttgttaatgctattacagctagtgtgggtaattttttaatcaatcaaaatgatgatgaagttaccagtattgcaaagcaatttaacacagtatttatagcattggctaccttcatttctttgaatatgtattttttggttaatgactttattaccagctggataggcgaaaaattcatactaggtaatggtattgttatattaatgcttgttaatgtatttataagtgtcattagaattccttgtgatatttttaaaaacgcaactggtttttttggggatgtatattatcctttgcttgagggagtggttaatttatttttttccgcgctcctggctttttatattggtcttcccggtattattattggcacgattatatctaatgtattaattacattaattgcaaagccattatatctatatggtaaaatgtttggtagatttaatgcattaaaaaagtacttgtcatttgtactgaaacctttaatattctcatttgttatttttgctgttttttattttacaagagaacaaataattttctttaaagtttccaactggtttgactttataagtaagcttactattgtatcgctggtaagtatgattatagtttttgcggttttttatgcagatgctaactttaggtcttttgttaaaagaattttacgcgtggtattttaa

SEQ ID NO: 372568 - DNA, 420 bp, Salmonella enterica
atgcgtacggaggatgccatttatggcggggaaatgagcgcgcatcactattttcgtgattttgcctactgcgacagcgggatgatcccgtggctgctggtagcggagctggtgtgcctgaagagacagtcgctgggtgaactggtctgcgaccggatggcggcgttcccggcgagcggggaaatcaacagcaggctggcggagccggcggcagccattgcgcgggtggaagcgcactttgcggaagaggcgcaggcggtggatcgcacggacggtctcagcatgtcattcccggactggcgtttcaacctgcgctcgtcgaacaccgaaccggtggtgcgcctgaatgtggaatcacgcggcgatattccgctgatggaagcgcgaacgaaagaaattcttcagctactcaattcataa

SEQ ID NO: 372569 - DNA, 1215 bp, Salmonella enterica
atgcatgagcttattaaatatcagtttaatacacgtcggaaaaaatatggtacaggagcggccttaagtttgcttaacggaaatgttgggcatgaggtgttagcatttcataaaaaattacccaattatgccgtcacgccgttacataatctggcgcatctaagccagcggcttggactagggtccatccatattaaagatgaatcctggcgttttggcctgaatgcttttaaaggtctgggcggctcttatgctgtaggaaaatatctcgctgataaattgcaatgtgatattaactcgttaagttttgctgcccttaacactcctgagattaaagaaaaaattaaagattgtgtttttgttaccgcgacggatggcaatcatggccgtggtgtggcgtgggcggcggagcaattaggtctaaaagccgtcgtttatatgcctaagggatcatcgttaatccgggcagagaatattcgtcatcatggagctgaatgcaccatcaccgatctgaactacgatgatgcagtgcgactggcccatagaatggcgcaaacaaaaggctgggtgcttttgcaggatacagcctggacagggtatgaagagatcccaacgtggattatgcaaggctatatgacactagcggttgaagcttatgagcagctcgcagaaacaaacagtccgttgccaacccatcttattttacaagcgggggtgggatcgtttgctggcagtgttatgggttattttgttgaaaaaatgcaggaaaatatccctaatattattgtggttgagccgcatcaggccaactgtctttatcaatccgcagttatgaatgatggtcaacctcactgcgtcactggcgatatggcgacgataatggccgggcttgcgtgtggggagccgaatattatcagttggcctattattcgggacaacaccagttgttttatttccgctgatgactgtctggcggctaagggtatgcgtatttctgccgcgccgcgcccaggtacggatacgccttttatttccggcgagtccggagctattggcgtagggttactttatgagttgatgaacaatatgcattatcaggatcttgctaatcgcttacagcttgatgccagtgctcatgttctgcttattagcaccgaaggcgatacgtccccagatatttatgaagatatagtctggaacggacgcagtgcttaa

SEQ ID NO: 372570 - DNA, 1887 bp, Salmonella enterica
atgatgattttgttcaggcggatactgttctgcctgttatggctttggctgcccgtctcctgggcggcagaaagcggctggctgcgttcgcccgataacgaccatgccagcatacggctacgtgccgatacgtccgctaacggtgagacccggctgttgcttgacgtcaaactggaaaacggctggaaaacctactggcgcgcgccgggggaagggggcgtggcgccctctatcgcctggaaaggcgacatgcctgaggtaagctggttctggccaaccccctcgcgctttgatgtggcgaatatcaccacccagggatatcacgacgaggtgacctttccgatgatcgtgcgcggtacgccgcccgcgaccttgagcggcgtgttgacgttatcaacctgcagcaatgtttgtctgttgaccgattaccccttttccgtgacgcccactgtgcagaatgccgattttgcccatgactatgcgcgggcgatgggtaaagttccgctccgcagtggactaacggactcgcttgacgtcggctatcgcccgggagaactggtggtcactgctacgcgagcggcgggctggtcatcgccctggctctatcttgacaccatagatgacgtcgattttgcgaagcctcgcctgcgcgtagagggcgacaggttacaggcgacggtgccggtgacggacagttggggcgaaaaggcgcccgatttgcgcaacaaatcgctgaccctcgtgttagccgatggcgctatcgcccaggagagcacgcaaaccattggcgctgcgccagcgcaaacgctggacaatgcggcgctacctttctggcaagttgtaatgatggcgctgatcggcggactgattcttaatttaatgccctgcgtactgccggtcctgggcatgaaacttggctctattttattggtagaggaaaaaagccgctctcacatcaggcgacaatttttggcttcggtcgccggtatcattgcgtcatttatggcgctggcggcgtttatgaccctccttcgcctgtcaaaccatgcgctggcctggggagtccagttccagaatgcatggtttattggttttatggcgctggtgatgttgttgtttagcgccagcctgttcgggctttttgagttcaggcttccctcatctatgaccacgaaactggccacttacggcggtaacggtatgtcgggacatttctggcagggggcattcgccacgctgctggcgacgccttgtagcgcgccgtttctgggcacggcggtcgcggtggcgctcacggcgtcgctgccgacgctgtgggggctgttccttgcgcttggcctgggaatgagcgcgccgtggctactggtcgcgatacgaccagggcttgcgctacgtttaccgcgccccgggcgctggatgaatgtcctgcgcaggatcctcggtctgatgatgctggggtcggctatctggctggcgacgttactcctgccgcatttcggcttcactgcgtcaaagagcgcgcaagacacggttcagtggcaaccgttgagtgaacaggcaatccagtcggcgctggcgcagcataagcgggtatttgtcgatgtcactgcggactggtgtattacctgtaaagtgaataaatacaacgtcctgcaaaaagaggatgtgcaggccgccttgcaacagccggatgttgtggcgctgcggggagactggacgctgccgtccgatgctattacagattttctgaaaacgcgtggccaggtcgccgtgccgtttaatcaggtatatggccccggcttgccggaaggggaggcattgcccactttgctgacccgcgatgcggtattacaaacgttgaaaaaagcgaaaggaataacccaatga

SEQ ID NO: 372571 - DNA, 519 bp, Salmonella enterica
atgtatcccccaaaccaaggggggatgagaaccaccgaccggggttcgacaactggcgcagccagttggacagacgacgagcttgcgaggagactgcccgaagggcgagcgcagcgagtcaatccccccctcaccgccatattcaagttgagagcctgtacagaagtacgggctttttgcttatatgtatcccccaaaccaaggggggatgagaaccaccgaccggggttcgacaactggcgcagccagttggacagacgacgagcttgcgaggagactgcccgaagggcgagcgcagcgagtcaatccccccctcaccgccatattcaagttgagagcctgtacagaagtacgggctttttgcttatatgtgacccgtccattgccggatggcggcacagttcacgggcgccttatccggtctacataagcgcagcgccaccggccaataacaccaccatccggctttcaattttagccaagaatttcagtgagtttaactttgcgcccctcgtttga

SEQ ID NO: 372572 - DNA, 1662 bp, Salmonella enterica
atgtccagcttgattaatcacgccatgagcggacttaacgccgcgcaggccgcgttaaatacggtcagtaataacatcaacaattataacgttgcgggttatacccggcagacaactattctggcgcaggcaaacagtacgttaggggctggcggctggataggtaatggcgtttacgtttcaggcgtacagcgcgaatatgatgcgtttatcactaatcagctacgcggcgcgcaaaaccagagcagcggcttaaccacgcgctatgaacaaatgtcgaaaatcgacaacctgctggccgataaatccagctcactgtctggttcgttgcagagtttttttaccagcctgcaaacgttagtcagtaacgcggaagatcctgcggcgcgtcaggcgctgattggtaaagcggaagggctggtaaaccagttcaaaaccaccgatcagtatctgcgcgatcaggataaacaggtcaatatcgcgattggctccagcgtggcgcaaatcaacaattacgcgaagcagatagctaacctgaacgatcaaatctcccgtatgacgggcgtaggcgcgggcgcatcgccgaacgacctgctcgatcagcgtgatcagttggtcagcgagcttaacaagatcgttggcgtcgaggtgagtgtacaggacggcggcacctataacctgacgatggccaatggctatacgctggtgcaggggtcgacggcgcgtcagttggcggcggttccctccagcgccgacccgacgcgaacgactgtcgcttatgtcgatgaggccgccggtaacatcgaaattccggaaaagttgctgaacaccggttcgctcggcggattactgacgttccgttctcaggatctggatcagactcgtaatacgctgggccagttggcgttggcgtttgccgatgcgtttaacgcgcagcataccaaaggttatgacgccgacggcaataaagggaaagacttctttagcattggctcgccggtggtatatagcaacagtaataatgccgataaaacggtatcgctaaccgctaaggtggtcgacagcacgaaggttcaggcgacggattataagattgtttttgacggtacagactggcaggttactcgcactgcggataacaccactttcacggcgacaaaagatgctgacggaaaactggagattgacggtctgaaagtgacggtagggactggcgcacagaaaaacgacagttttcttctcaagccggtcagcaatgctatcgtcgacatgaacgttaaagtgacaaatgaagccgagattgcgatggcgtctgagtcaaaactcgatcctgatgtggataccggcgacagcgataaccgcaatggtcaggcattgctggacttacaaaacagcaacgtggtgggcggcaacaaaacctttaacgatgcttacgccacgttggtcagcgatgtgggtaacaaaacgtcaacgctgaaaaccagcagcaccacgcaggcgaatgtggttaaacagctttataaacagcaacagtcggtttccggcgttaacctcgacgaagagtacggcaatttgcagcgttatcagcagtattatctggcgaatgcgcaagtattgcagaccgcgaatgcgctgtttgatgcgttattgaatattcgctaa

SEQ ID NO: 372573 - DNA, 1050 bp, Salmonella enterica
atggggggcgattttggtccttccgtgacggtgcctgcagcattgcaggcactgaacgctaattcgcagctcactcttcttttagtcgggaatcccgatattatcacgccattacttgccaaagctgactttgaacaacgttcgcgtctgcagattatccctgcacagtcagttattgccagtgatgcccggccttcgcaggcgatccgcgccagtcgcgggacatccatgcgtgtggccctggagcttgtgaaagaaggccgagccgaagcttgcgttagcgccggtaataccggggcgctgatggggctggcgaaattattgctcaagcctcttgaggggattgagcgtccggcgttggtgacggtattaccgcaccagcaaaagggcaaaacggtagtgcttgatttgggtgccaacgtcgactgtgacagtaccatgctggtgcagtttgccgtgatgggcgccgttttggcggaagaggtcgtcgggatcaaaaatccccgcgtggcgctactcaatatcggggaagaagaaaccaaaggcctcgacagtattcgcgaagcctctttaatgttaaaaacagtcccaaccatcaattacatcggctaccttgaggcgaatgagttactgacgggaaaaaccgatgtactggtgtgtgacggctttacaggcaatgtcacacttaaaacgatggagggggttgtcagaatgttcctttcactgctgaaatcacagggcgaggggaaaaaacggtcgtggtggctgctgttattaaaacgttggttacaaaaaagcctgacgaggcgattcagtcacctcaaccccgaccagtataatggcgcctgtctgttaggattgcgcggcacggtgataaaaagtcatggtgcggccaatcagcgagcatttgcagtcgcgattgaacaggcagtgcaggcggtgcagcgacaagttcctcagcgaattgccgctcgcctggaatctgtatacccagccggatttgaaccgctggacgatggcaaaggcgtaaacctgcgggcgcacagataa

SEQ ID NO: 372574 - DNA, 126 bp, Salmonella enterica
atgcgggatgaggcggtaaagctgaaggattcggacaactccgaagcaagtgatggagaagcgctcaccggcgagcagccggtgaggcgcagagaaattaatgcagtttcaggcgcggacgaatga

SEQ ID NO: 372575 - DNA, 540 bp, Salmonella enterica
gtgaataaatcaatgttggcgggtatagggattggcgtagcggctgcgctgggtgtggcggcagtggccagtctcaacgtatttgatcgtggtccgcaatatgcgcaggtgatatcggctaaaccgattaaagagacggtaaaaacgccgcgtcaggagtgccgtaatgtcacggtcacgcatcgcagaccggttcaggacgaaaaccgtattgccggctcggtgcttggcgcagtagcaggcggcgtgattggacatcaatttggcggcggtcgtggtaaagatgtggcgacggtcgtcggggcgctgggcggcggttatgctggcaatcaaatccagggatcaatgcaggaaagtgatacttacactaccactcagcaacgctgtaagacggtgtatgacaaatctgaaaagatgcttggctacgacgtgacctacaaaattggcgatcagcagggcaaaatccgcatggataaagaccccggaacgcaaattcccctcgacggcaatggccaactggttctgaataacaaagcataa

SEQ ID NO: 372576 - DNA, 1494 bp, Salmonella enterica
atgaatttgcatcataaagcgctcaggcactttatctcggcaagcgtcatcgttttgacatcgtccttcctgatttacgaacttattgccagcgacagggcaatgaatgcctatatgcgttatatcatggagagagccgattcgtcgtttttgtacgataagtaccagaatcaaagcatcgccgcacatttgatgcgaacttttgaagcgccgggagaccccgtcaccgcagaaaaacgccgcgctttttgcgacgcctttgaggctattaacggtacgcacggtgtcaacctgacccggcataattacccggcgctacatggcactctgcaaactgccgctacacaatgtaccgataatcttgatgacgcccttttactgcctgcatttgatcaggcggtaagcatcaaccgttcgcaggacgaccacagtcacgggctgggcacactggagcttaaattccgttattacgttgatttaaataaacattatgtctatttctatgatttaatcaactcacggcgcttcgccatgcatcgttggacttttttacaaaaaggcacaatgggtattaacagaaaagatatagataaactttttaccggccgtacggttatttccagtatttacatggatgatattacccaggaaaacgtcatgagctttttaacgccagtctatctggcgggaacgttaaaaggtatcgtgatggtggatgttaaccaggataatttaaaaaatattttttatacccaggaccgtccgctggtttggcgttatcttaacgtaacactaaaggacatggactccggaaaagaaattattattaatcaaagcaaaaataatctgtttcaatatgtgaattatagccatgatatccctggtggactgcgcgtttcgttgtcccttgatttaacctatttccttgtctcgtcctggaaagcgctggccttttacttactggcaacggcgctcctgcttaatatggtacggatgcactttcggctttatcgcaacgtcacacgcgaaaatattagcgatgccatgaccgggctttacaaccgtaaaatattaacaccggtgctggaacagcgactgcaacgcctggtcaataccgggacgccggtgacatttgtcgctattgattgcgataggttaaaactgatcaacgatacccaggggcaccaggaaggcgaccgaattataaccctgttggcgaaagcgattaaaacatcgattcgtaaaagcgattacgccattcgcctcggcggcgatgagttctgtattattcttgttgattacgcggcggatttggctatccatctgccggagcgtattattcgtaacctgcaaattatcgcaccggataagacagtccatttttctgccgggatttataatatgcagcccaatgatacgattaatgatgcctaccaggcttccgatgcgcagctctatctgaacaaacaacaaaaacaacatcgttcatcatag

SEQ ID NO: 372577 - DNA, 198 bp, Salmonella enterica
atgaaacgatttaaagaaatggcaacaatttttctttttgcattgctggcagcggggttcacgtcgtctgctatggcagcgtcgggtagtgatagcccgtgggattttgatttttcgggtccatggcttttttgtaagctgcaaaaacctgattctctgcaattaccgccaccttttggtgagtattgctggcattaa

SEQ ID NO: 372578 - DNA, 1287 bp, Salmonella enterica
atgacctggttcatagaccgacgtcttaacggcaaaaataaaagcacggtgaatcgccagcgctttttgcgccgttataaagcacaaattaagcagtcgatttccgaagcgattaataaacgctctgtgaccgatgtcgacagcggagagtccgtctctattccaaccgatgatattagcgaaccgatgtttcatcaggggcgcggcggtctgcgccatcgcgtccatccgggtaacgatcactttatccagaatgatcgcattgagcgtccgcaaggcggtggcggcggcggttccggtagcggtcaaggtcaggccagccaggacggcgaaggccaggatgagtttgtttttcagatttcaaaagatgagtatctggatctgctctttgaagatttagcgctgcctaatctgaaaaaaaaccagcatcgccagcttaacgagtataaaactcaccgcgccggtttcacctcaaacggcgtgccggccaatatcagcgtggtacgttcgctacaaaactctctggcgcgccgtacagcaatgacggcaggaaaacgccgcgaactgcacgcgctggaaacggaactggagaccatcagcaaaagcgaaccagcgcaactgcttgaagaggagcggttacgtcgggagattgccgaactacgggctaaaatcgagcgggtgccgtttatcgacacttttgatttacgctataaaaattatgaaaaacggcctgagccctccagccaggcggtgatgttctgtctgatggacgtctcgggttcgatggaccaggcaaccaaagatatggccaagcgtttttacattctgctctatctgtttttaagccgaacgtataagaacgtcgaagtggtttatatccgccaccatacccaggcgaaggaagtggacgaacatgagttcttttattcacaagagaccggcggaacgattgtctccagcgcgcttaaactcatggacgaagtagttaaagagcgctacgaccccggtcagtggaacatctatgcggcgcaagcgtcagacggtgataactgggccgacgactcaccgctgtgtcatgagattctggcgaaaaagctgctgccggtagtgcgctattacagctatatcgagattacccgccgcgcccaccagaccttatggcgtgagtatgaacatctgcaggcgacgttcgataacttcgccatgcagcatattcgcgatcaggaggatatttatccggtattccgcgaattgtttcagaaacagagcgccaatcaaagtgcataa

SEQ ID NO: 372579 - DNA, 849 bp, Salmonella enterica
gtgaaaaacgtaacgttttgcgggcaggtgacgcttcctgccatcggacagggaacatggtatatgggcgagcgcgcggatcaacgtcagcgcgaggtttcggcgttgcgcgcggggctggatttggggttacgccttattgatacagcggaaatgtatgccgacggcggggcggaaaaggtcgtgggcgaggcgttagcagggcgacgcgatgaggcatttctggtgtcaaaagtgtacccgtggaacgctggcggccagaagatagttgccgcctgtgaagaaagcctgcgtcgtctgaaaacagattatctcgatctctatctattgcactgggccggaagcttttcattcgaagagaccgttgaaggtatggagcggctaatcgcgcaggggaaaattcgccgttggggagtctctaatcttgattatgacgatatgcaggcgctgtggcgcatccctgggggacagcaatgcgcgacaaatcaggtgctctatcatctggcgtcacgtggtattgagtatgatttattgccgtggtgtcaacaacagcgaatgccagtgatggcctatagcccgctggcgcaggctggccggttacgtagcggtttactgaatcatccggtggtgaatgaaattgcgcaagcgcataacgctacggcggcgcaaatcttactgacgtgggtgattgcgcatccgggcgtgatggcgatcccgaaagccggaagtacagaacacgtgaagcaaaatgcggcggcgcttgagatcgccttgtcagcaaacgaacttgccttactggacaacgcctggcctgcgccaaaagggaaaaccgcgttggatatggtgtga

SEQ ID NO: 372580 - DNA, 189 bp, Salmonella enterica
atgtccatgtccctggccggagatgacctacggttgttcaaattcgttcccgatgaatttgtcgttcacttgccgcgttactcggcctgcggcctggcctctacgggccagcgcaagcactggtcaaggcacaagcgccttgtcatgcaactcgaattatttagggttagaggattgcgtaatgattaa

SEQ ID NO: 372581 - DNA, 855 bp, Salmonella enterica
atgaataaaaccattaatctgctaaaattactgcccgtagtattattaagcgcatgtactacatcgtatcctccccaggatacaacatcggcacccgagttaccccatcgtaacgtactcgttcagcaacctgataactgtagcgttggctgtcctcaaggaggaagtcaacaaacaatctatcgccatgtctatacgctcaataataatagcgccacgaaatttgccaactgggttgcctatagcgtgacaaagaccagccaggcaagcggtcgcccgcggaactgggcgcaggaccccgatttaccgccctcggatacgttggccccttcggcctataaaaatgcccatacgctattaaaagtcgacaggggacaccaggccccgttggcaggattgggcggcgtatcggactggccgtcgttaaattatttatcaaatattactccgcagaaatccgccctgaatcagggagcatgggctgcactggaaaaccgggtgcgcgaacttgccaaacaggctgatgtatctgtagtgcacgtagtgaccggccccctttttgagcggcatatcgccacattgccagaagatgcgacggtagaaattcccagcgggtactggaaggttttattcaccggaacggcgccgtcaaaaagtgaaggaaattacgctgcgtttattatggatcagaatacaccccgttcggcgaatttttgcgactatcaggttaccgtggaggctatcgaacataaaacgaagccagtgctgacgctgtggtctgccttgcctgaagcggtagccagcgaggtgaaaacgacaaaggggagtctggcgcagaagttaggttgtcgatga

SEQ ID NO: 372582 - DNA, 1173 bp, Salmonella enterica
atgttcgatttttcacaggaagttgaccgtcgcgggacatggtgtacgcagtgggattatgtcgccgatcgttttggcgaagccgatctgctcccctttacgatctcggatatggattttgccaccgcgccgtgtatcctggaggcgctaaaccagcgcctttcccacggtgtgctgggctatagccgctggaaaaatgaggcgtttttaggggcaattacccactggtttgcgacacgccatcagaccacgatagatgcccactccctcgtatacggcccctccgttatctatatggcgtccgagcttatccgccagtggtccgacgaaggcgatggcgtggtagttcatacccccgcttacgatgctttttataaggcgattgaaggcaaccatcgcatcgtcactcccgtcccactggagaaagaaggcaacgcctggtattgcgatatggccaaactggaggcggcgctggcgcgtccggaaagcaaaatcctgctgctgtgcagtccgcaaaatcccaccggtaaagtgtggacgcgtgacgagctggaaacgatgtcaacgctgtgcgagcgccatggcgtacgggtgatttccgatgaaattcacatggatatggtatggggaaaccagccgcatattccctggagcaatgtcgcgcgcggagactgggcgctgctctcctccggctcgaaaagcttcaacattccggcattaaccggcgcttatggaatcattgaaaatagtgaaagccgtgaacgctacctggccgccttaaaagggcgcgacggcctctcttcgccagcggtgctctcgctcacggcgcatattgccgcgtatcagcacggcgcgccgtggctggatgcgttacgcgcctcgctggcggctaatatgcgctatattgagcaggcgctgaatggcgcctttccgacgttgaactggcaagcgccgccatcgacctatctggcctggattgatctccgttcactcggcattgacgatcaaaaattacagcacacgctcattcatcaggagaaagtcgccattatgcccggcgatacctatggcgcagaaggccggggatttgtgcgtctgaatgccggatgccctcgcctgaaacttgaaaaaggcgtcaacggattgattaacgctatccgcaccgttcgctga

SEQ ID NO: 372583 - DNA, 1029 bp, Salmonella enterica
atggctatcgccaaaaaaatcactatccacgatgttgcgctggcggctggcgtgtcggtgagcaccgtttccttagtgctgagcggcaaggggcgaatatcggccgcgaccggcgagcgcgtgaacgcggcaattgagcaactgggctttgtgcgtaaccgccaggcgtccgcgctgcgtggcgggcaaagcggcgttatcggtttgatcgtgcgtgatttatcggcacccttttatgccgaattgaccgccgggttaacggaagcgctggaagcgcaaggccgtatggtttttctcctgcacggggggaaagatggcgaacagctaaatcagcgttttaccatgctgcttaatcagggcgtggatggcatggtgatcgccggtgcggcaggtagtagcgaagcgctgagagcgcaggccgacgcacaaggtattcctgtcgtgtttgcgtcacgcgccagctatcttgatgatgcggataccgttcggcctgacaacatgcaggcggcgcaactcctgacggagtaccttattcgtcagggccatcagcgcatcgcctggctgggaggacaaagcgcatctttaacccgcgcggagcgcgtgggcggctattgcgcgacgttgttaaaatacggtctaccgtttcacagcgagtgggtcgtggagtgcgcttccagtcagaaacaggcagcagaaagcattaccgcgctgttgcgatacaatccgaccattagcgctgtcgtttgttacaacgaaaccattgcgatgggggcgtggtttggcctgctgagagccggacgacagagtggcgagagcggtgtcgatcgttatttcgagcagcaggtgtcgctggcggcgtttgctgatgtggcggagaacgccctcgacgacctgccgattatctgggccagtacgccggcgcgagaaataggctataccctggccgaacgaatattgcagcgtattgctcacgacgagtaccatgtgcggagtcaaacgatagccgctcgcctggtaacgcaaaagtag

SEQ ID NO: 372584 - DNA, 1647 bp, Salmonella enterica
atgtcaaacaaacccttcttttatcaagacccttttcccctcaaaaaggacgataccgagtactacttgttgaccagcgaacatgtttccgtcgccgaattcgaaggacaagagatcctgaaagtcgcgccggaagcgctaacgctgttggcgcgtcaggccttccacgatgcgtcttttatgctacgtcccgcgcatcagcagcaggtggcggatattctgcgcgatccgcaggccagtgaaaacgacaaatatgtcgcgctgcaattcctgcgaaactccgatatcgcggccaagggcgtgttgcccacctgccaggataccggtacggccattattgtcggcaaaaaaggccaacgggtctggactggcggaggtgatgaagcggcgctggctcgcggcgtatataacacctatatcgaagataacctgcgctattcacagaacgcggcgctggatatgtacaaagaggtcaataccggtactaacctgccagcgcagatcgatctctacagcgtcgatggcgatgaatataaattcctctgtatcgctaaaggcggcggatcggcgaataaaacctacctctatcaggagacaaaagcgcttctgacgccgggtaagctcaaaaattatctcgtcgataagatgcgtacgctgggcaccgccgcctgtccgccgtatcacatcgcgtttgtcattggcggcacctcggcggaagcgaacctgaagaccgttaagctggcctcggcaaaatactatgatgcgctaccgaccgaaggcaatgaacacgggcaggccttccgcgatattgaactggaaaaagaattgttgcttgaggcgcaaaatcttggcttgggcgcgcagtttggcggcaagtatttcgctcacgatattcgtgtcatccgattgccgcgccacggggcatcgtgtccggtaggtatgggcgtgtcctgctccgcggatcgaaacattaaagcgaagatcaaccgggaagggatctggatcgagaagctggagcgcaatcccggtaaatatattccagaggcgctgcgccaggcgggagagggcgaggcggtgcgcgttgatcttaaccgtcccatgagcgagatactgcaacaattgtcgcagtatccggtatcaacgcgcctgtcgctgaacggcacgattattgtgggccgcgatatcgcgcacgctaaactgaaagaacggatggacagaggtgagggtttgccgcagtacatcaaagatcatcctatctattatgcggggccggcaaaaacgccggaagggtacgcctccgggtcgcttgggccgactaccgcaggacggatggactcttatgttgatcagctccagtcgcagggcggcagtatgatcatgctggcgaaaggcaaccgcagccagcaggtgaccgatgcctgtaagaaacatggcggcttctacctgggcagtatcggcggcccggcagccgttctggcgcagggtagtatcaagcgcctggagtgcgtggaatatcctgaactgggtatggaggctatctggaaaattgaagtggaggattttccggcctttattctggtggatgataaaggtaacgatttcttccagcagattcagtcatcgcagtgcgcgcgctgcgttaagtaa

SEQ ID NO: 372585 - DNA, 1152 bp, Salmonella enterica
atgaaaagaaaagtattggcacttgtcatcccggctctgctggctgctggcgcagcacacgccgctgaaatttataacaaagacggcaacaaactggacctttacgggaaagtagacggcctgcactatttctctgatgactcttctaaagatggcgatcagacctatatgcgtgtcggctttaaaggcgaaacgcagattaacgaccaactgaccggttacggccagtgggaatataacgttcaggctaacactaccgaaggcgaaggtgctaattcctggactcgtctggcattcgccggcctgaaattcggcgactacggctcattcgactatggtcgtaactacggcgtcctgtacgacgtagaaggctggaccgatatgctgcctgagtttggcggcgactcctatacttacgctgacaactacatgaccggtcgtgctaacggcgtggccacctaccgtaacactgatttcttcggtctggtagaaggtctgaacttcgcgttgcaatatcagggtgccaatgaaaaccaggtttctcatgagcaggaaggcactaataacggcggcgatcgtaacgtgaagaacgctaacggtgacggcttcggtatctcatcaacttatgatctgggtatgggcgtaagtttcggcgcggcatataccacttccgatcgtactaatgagcaggttaattactctaccgctggcggtgataaagcggatgcatggactgttggtgctaaatatgatgccaataatatctatctggccacaatgtattcagaaacccgtaatatgacgccttacggcaatgacgattgcagctcatgcgtagcgaataaaactcagaactatgaagtaactgcacagtaccaatttgatttcggtctgcgtcctgaagtttctttcctgatgtctaaaggtaaggatctgaatatgcctggcacagcagcaagccctgctggtaccaaagacgataaagacctggttaaatatgtttctgttgggactacctactatttcaacaaaaacttctccacctatgttgattataaaatcaacctgctggatgatgacgaccagttctataaagatgccggtatcagcactgatgatatcgtcgcgctgggtatggtttaccagttctaa

SEQ ID NO: 372586 - DNA, 828 bp, Salmonella enterica
atgatcttcacggtctttggtcagtgcgtggtcggcgcgttaatcgttagcggactgggctggctgacggcaaaagacgataccatcgcccgtcagcgcatcgtgcgcagcatgttttttctgtggctggtgatgggactgggattcctcgcgtcgattatgcatctcggctcgccgatgcgtgcctttaactcgcttaaccgcgtaggcgcttccgcactgagtaatgaaatcgccgcaggatcggtgttctttgccgtaggcggcatctggtggctggtggcggtactcggtaaaatgcccccggtgctgggtaaagtgtggctgctggtcagtatggcgctcggcgttgcattcatctgggcaatgacgctcgtttatcagatagataccgtgccaacctggtataatggctacaccacgctggcctttttcctcacggcattcctgtgcggcccggtgtttgcggcgttactgctacgcatcgcgcgcgtcccattttgcagcgtgacgtttgccagtattagcggcctggcattggtggtgtgcgtggcggtcatcgtactacaaggactgtctctctcaaccattcacagttccgtgcaacaggccagccatctcgcaccggattacggtatgctacaggtctggcgcattgtcttgctttctgccggattaggctgctggctatgtccgctaatccgtcgccgcgaaccgcataccgttggtttgctgctcggtgtcgtgctggtgctggcaggcgaaattattggccgcggacttttttatggcctgcatatgactgtaggtatggccgtcgcaggttaa

SEQ ID NO: 372587 - DNA, 1689 bp, Salmonella enterica
atgaagacacatattcttttggccagagtgctggcatgtgccgcgcttgttctggttacacctggttattctagtgaaaaaatacctgtaacgggaagtgggtttgttgcgaaagacgatagcctgcggacatttttcgatgccatggcgctacagctaaaggagcctgtcattgttagcaaaatggcggcacgaaaaaaaattacgggcaactttgagtttcacgatcctaacgcattactggagaagctttccctacaactggggctgatttggtatttcgatgggcaggctatctatatttatgacgccagtgaaatgcgcaatgccgtggtttctttacgcaacgtctcactcaatgagttcaacaattttctaaaacgctcaggtttatataacaaaaattacccgctacgtggcgataaccgtaaaggaacattctatgtttcagggccacccgtctatgttgatatggtggtcaacgccgccaccatgatggacaagcaaaacgatggtattgagctgggacgtcagaaaataggggtgatgcgtctgaacaataccttcgtgggcgatcgtacctataatctgcgcgatcagaaaatggttatccccggtattgccacggccattgaaaggttgttgcagggagaagagcaacctttaggtaatattgtcagtagcgaacccccggcgatgccagcgttttcagcgaatggagaaaaaggtaaagcagcaaattatgccggtggcatgagtctgcaggaagctttaaagcaaaatgccgcggcgggcaatattaaaatcgtggcctatccggataccaacagtttgttagtaaagggaacggctgagcaggtgcattttatcgaaatgctggttaaagcgctggatgtcgccaaacgtcacgtagaattatccctgtggattgtcgatcttaataaaagcgatctggagcgtttgggcacttcatggagcggcagcattactattggggacaaacttggcgtgtcattaaaccagtcttcaataagtaccctcgatggcagtcgattcatcgccgcggtcaatgcgttagaagagaagaaacaggcgacggtggtttcacgcccggtattactgacccaggaaaatgttcccgctatttttgataacaacagaacgttttacaccaagctgattggggaacgtaatgtggcgcttgagcatgtaacatacggaacaatgatccgagtgctgccccgtttttccgcagatggtcagatagaaatgtcgctggacattgaagatggcaacgataagacgccgcaatccgatactaccacctccgtagatgcgttacccgaagtcgggcgaacgttaattagcactattgcgagagtgccgcacggaaaaagtttgctggtcgggggttatacacgggatgcaaataccgatactgtccaaagtattccgtttttaggcaaattaccgcttattggtagcctgttccgctattccagtaagaataaaagtaatgttgttcgtgtgttcatgattgaaccaaaagaaattgtcgacccgttaacgccggatgccagcgaatcggtaaacaatattctgaagcaaagcggtgcctggagtggggacgataagttacagaaatgggttcgtgtttatctggatagaggtcaggaggcaattaaatga

SEQ ID NO: 372588 - DNA, 450 bp, Salmonella enterica
atggatacgacagaagaactaaacggaacctacttctaccacggacaatcgaacctgtcagcaggtgaactatttgatgtaattttccttgagcaattttgtgatgaacttgggattggcattgagtcaggtgctgctatcctcgccgggcaaccgtggttaaaaaccagaacgaaaccgggagaggcaatcaaagggacaagtgttatctccaggtatgggagaatgcttttacgaaatgcacgaactccttttggtattagagttcctacacccgttggtataagaatgcgaaaaacaaataatcttgccgcagtcatagcacgatatgttccatggttaggttgggttggtcttgtgaattcaatttaccaggtatcaaggagaactcaggcaaaatacaacctaatagcacgccctaaagatcgtatacaatggacatccttttga

SEQ ID NO: 372589 - DNA, 333 bp, Salmonella enterica
atggacacaattcagcaagaggtgttagcactcttccgtgaagagattcccggatatttagacagcaattggaaagaaatcccattagaacttgattctgatttatttgaagctccaggcgatgacctgcatgaagctttggataaatttgaaaaaaaatttaatgtagatttatcacaagttaaatggtcgtgttatttcccttgggagaatactccactgcttacacgatggtttaaattaaaacgggaagatgtagaacgaactcgtaagcctttaacaatcagaatgttttctgaatcagcgaaagctgggaaatggctttatgattaa

SEQ ID NO: 372590 - DNA, 327 bp, Salmonella enterica
atggaagaagttaactctgaattcacaatcgttgttgagtctgatctggataaatatgagttaattgattttttatcccaagggattccagacataataaaagtgaacttattatatttaagatacgaaaatacaatgattacaatagaaataaattatgactgtaatcctaagttgataaatgagaatgatggttggctgtattataaatatgaattaacggtattttccatggagaatacctcgtatgaatatcagtatgaattagcgaataaaattatgaatgctctacgtgaggcgggatatctggcagaatcaatttggtaa

SEQ ID NO: 372591 - DNA, 2568 bp, Salmonella enterica
atgaatgagtcatttgataaggacttctccaaccacacccccatgatgcagcagtatctcaagctgaaagcccagcatccggagatcctgctcttttatcgtatgggagacttttacgagctgttttatgacgacgcaaagcgtgcgtcgcagttgctcgatatttcgctgaccaaacgcggcgcatcggctggcgaacctatccctatggcgggtatcccgcaccacgccgtagaaaactacctcgcgaaactggtcaatcagggcgaatccgtcgctatttgcgaacagattggcgatccggccaccagcaaaggtcccgttgaacgtaaggtcgtgcgtatcgttacgcctggcactatcagcgatgaagccctgttacaggagcgtcaggataacctgctggcggctatctggcaggatggtaaaggctacggttacgccacgctggatatcagctccgggcgctttcgtctgagcgaacccgccgaccgtgaaacgatggccgcagagctgcagcgcaccaatcccgccgaactgttgtatgccgaagattttgctgaaatggcgttaatagagggacgccggggtctgcgccgtcgcccgttgtgggagtttgagattgataccgcccgccagcagttaaatctgcaattcggtacgcgggatctggtcggtttcggcgtcgaaaatgcctcgcgtggattatgtgcggcaggctgcctgttacagtacgtaaaagatacccagcgcacctccctgccgcatattcgttccattacgatggaacgccagcaggacagcatcattatggatgccgcgacccgccgcaatctggaaattacccagaacctggccggcggtgtcgaaaataccctcgccgcggtgcttgactgtaccgtgacgccaatgggtagccgaatgcttaaacgctggctgcatatgccggtacgaaataccgacatattgcgtgaacgccagcagaccatcggcgccttgcaggacaccgtcagcgaactgcaaccggtgctgcgtcaggtcggcgatctggagcgcatccttgcgcgtctggcgctgcgcaccgcgcgtccgcgcgatctcgcccgaatgcgtcacgccttccagcagctgccggaattgcacgctcagcttgaaaccgttgacagcgcgccggtacaggcgttgcgtaaaaaaatgggcgatttcgccgagctgcgcgacctcctggaacgcgccattattgacgcgccgccggtactggtccgcgacggcggcgttattgcgcccggctaccatgaagagctggacgaatggcgcgcgctggcggacggcgctaccgattatctcgatcgtctggaaattcgcgaacgcgagcgtaccgggctggatacgctgaaagtcggctataacgcggtacatggttattacattcagattagccgtggtcaaagccatctggcgcccatcaattatgtgcgtcgccagacgctgaaaaatgccgaacgctacattattcctgagcttaaagagtacgaagataaagttctgacctcgaaaggcaaagcgctggcgctggaaaaacagctatatgacgaattgtttgatctgctgttgccgcatctggccgatttacagcagagcgccaacgcgctggcggaactggatgtgctggttaacctggccgaacgcgcctggacgctgaattatacctgcccgacatttaccgataaacccggtatccgtattaccgaaggtcgccacccggtggttgaacaggtactgaatgagccgtttatcgctaacccactcaacctgtcgccgcagcgccggatgttgatcattaccggccccaatatgggcggtaaaagtacctatatgcggcaaacggcattgatcgccctactggcctatatcggcagttacgttccggcgcaaaacgtggaaatcggccccatcgaccgtatttttacccgcgtcggcgcagcggacgacctggcttccgggcgttcgacctttatggtggagatgaccgaaaccgcgaacattctgcataatgccacggaaaacagtctggtattgatggatgaaatcgggcgcggtacctccacgtatgacgggctgtcgttggcctgggcctgcgcggagaatctcgcgaataagattaaagcgttaacgctgttcgctacccactacttcgagctgacccaattaccggagaaaatggaaggcgtggcgaacgtccacctggatgcgctggaacacggcgatactatcgcgtttatgcacagcgtgcaggacggcgcagcaagtaagagctatggcctggcggtcgcggcgcttgcgggcgtccctaaagaagtcatcaaacgcgcgcgccaaaaactccgcgagctggaaagcatctcgcccaatgcggcggcaacgcaggtggacggcacgcaaatgtcgttgcttgccgccccggaggagacatcgcctgccgttgaagcgctggaaaatctcgatccggactccctgacgccacgccaggcgctggagtggatctatcggctgaaaagtctggtgtaa

SEQ ID NO: 372592 - DNA, 912 bp, Salmonella enterica
atgctcaatttgcagcgtatgtcgctgtttatcgccgtggtagatagcggcagcttcacggcggcggcggccgcatcgggccaaacaaaagcggtagtgagttttaatattcggcagcttgaaaaagagcttggcgtaacgttactgctacgttccacccgacgattgacgctcacagacgccggcatcctcttttaccaaaaaggcgtgaatttactcaatgcagcgaaaaatttgcaggatgaagtgcgtgccagccatagtgggctgggcggcgagttacgtattaccactacgcccgagtttggcgaacaggtgatcgttccgttactggcgcagtttagtcagcgccatcccgatctccatattcggcatatgtcctcatcacatcatgccgatttaattgccgagcgctttgatgtggcgattcggcttggctcgctggcggactcccgctatcgcgccgcgctgatatcccgctttaccattctgccggtcgccgcgccgcagtggctcgcccgccaccctgtttcatcactggagtcgttggcccaggcggaatggattattcatgagcgattacctacgccgctacggtggacagtaacgagtaatcatggccaacactcacgcttggagataagcaaagccggcaaaatttctgtcgacagcgcgcgctcgctgatggccttcgctctcgcgggaagcggcgtcgcattactgccgcaatggttagtcaacaccgcactggaggagggaacgttaattcacgtgttacccgactatcattttccccgtcagggcatttatgtcgtttacccggacgcccgccatgtatcgacaaaagtacgcgcatttattgattttttacgttcgcaatgggattgcggggagcacgccccatcatcgtag

SEQ ID NO: 372593 - DNA, 297 bp, Salmonella enterica
atgagaatggtaaaattaacgccaaaggccagtgaagatctggaaaatatctggcattacggctggcagcattttggcgaaatacaggccgatcgatatattaatcatctatcagaaatattcagcattatgagtgccaataacattggcacgcctcgacttgaactgggtgaatacatttatgccttaccgtttgaaaggcatattatctattttatacaatcagttacggaagttatcgtgatacgtattctgagccagcatcaggattctggtaagcatgtaaattggttatag

SEQ ID NO: 372594 - DNA, 288 bp, Salmonella enterica
atggccagaacaatgaccgttgatcttggcgatgaactgcgcgagtttattgaatcgctcatagaatcaggtgattacagaacacaaagtgaagtgatcagagagtctcttcgtctgctgagggaaaaacaggccgagtcacgacttcaggcgttacgtgaacttctggctgaaggtctgaacagcggagagccgcaggcctgggaaaaggatgcctttttacggaaggtcaaaacagggatgatcaaacccgatgagaatggtaaaattaacgccaaaggccagtga

SEQ ID NO: 372595 - DNA, 1062 bp, Salmonella enterica
atgaaatcactgatactgtcaggtgtgtttcttttctttgctgtctgtgattctgcgagggcaaactatgactggtcaaaatgtgatgccaatggaaatgtaaatattcagaatatcagtctgaagggaggacaatatttacaagggcaggaactgcagaagattactgttcccataagttatacctgtactacaacatggagcagttttaattcacttgtttactctacagcagtttcgctttccgatatgagacaggtagccactgcgctaaaagatcgcggtcttggaatggatatcgttgttcaggaagggagtttgactcccgtgacatttacgtggagggatatacaggcagggttttcaggctggttcagttcaaaagcattcgggcaacgtatggacgcgcaaaaaacatataaccggagcggaacgattacagtacatatttttgtcgaacaggttttcaataataattttttggacataaacattccgggaagtaaaattaatatatatccctatagcccgtcacaacccggactgtctgttgaaccaccgactgttccattcagacctttaactgtttctgcgtttaatctcagatttattcctgacaactcaggcaaggttattatctctccttctaataccatcaatatggggcgtttttatacggaatataaggaaaccctggtgcccagggaagtacctttcaccgttacagcacaacagaatgtcggaacgcagatcccgttcgtcgccccactggctatagagttcaggaccaacggtctgacactggcagatgctgacagcaccgtgattcttaagaataataaacaagaaaacaatggtttcagactgtcggtaatggatgtggataataacacaccagttaaatttaatgtgaaaacagatatgggatctatccatcttgataacggtgccggtggcagaattataaaacagtataaagcaaaggtcgaagctatacccggtgaggtaattaaaacaggcgctttttcagccgcaatgacagtgattgttacttacaattag

SEQ ID NO: 372596 - DNA, 561 bp, Salmonella enterica
atgagcgttcaacaaaatactttaaatatcctgagcgagttgcagcaaaatgcgatgaagattgatgatgcccaggctgcccaattcgtcgcacagattaagaatgccaaacatatctttctgcagggcgcgggtcgtagcggcatcgccatccgcggctttgcaaaccgccttctccacctcggtttttcagtaagcgtagtgggcgaaatttcttctcctcatacgaaaccaggcgacctggtcattattggctccggtagcggtgagaccggcagtctggtgagcctggcgcagaaggccgtagcctgtggcgtggatgtggcgcttgtcacaatgaaagcggagtccacaatcggcaaactggccaaaagtactcttgtattgcctggaactgtgaaagaagacaacgatcgcgaagaaggtgctttttcgcagcctatgggatcggcttttgagcaactctgctttatcacctatgacgctatcgtgcttgagctgatggcccaactcggtgaaaccagcgacacgatgtttaagagacacgctgaccttgagtaa

SEQ ID NO: 372597 - DNA, 753 bp, Salmonella enterica
atgagtaaatttgaaggtaaagtcgcgctagtaaccggtggggcacatggaatcggtaaaggaattgctaagcaattcgcagaccgtggggctcatactgtcattgtggattataacgaagaaaatggtaaaaagacggccgaagagttaactttcggtaatgttaaatccttattcgttaaaaccgatgtatccgatccgaaagctctggaaaacgttcgtgagcaggtttttcaaaccttcggacgtattgatattttggtattaaacgctggcgtggcgtttgctaataaggttaataacatcacttttgaagagtggaataagacgattgcaattaaccttactggcctgtttaacaccgttaaagcattctacgacgacttcactactaatcatggatctatcgtttatatctcatccggctcggcgctttccggtactggcggtggcgtgagttacccggccagtaaagctggcggtgaaggattgattcgtggtctggcaaaagaactgggacctaagggtgtcaatgttaatgctatcgctccacgcctgattgataccggtgaaatgatgcgcgtcaattatcctacccaggccgatcttgatgccgttctggaaaaaattccagtgcgccgccttggaaccattgacgatgtagcaaaccttgcaatctttttggctgataaagacaactcgtacatccaggggcaaaccattctgatggatggtggtcgtaccatcgcttaa

SEQ ID NO: 372598 - DNA, 645 bp, Salmonella enterica
atggcacaaattttaccatcagtatttggtgcaaacatattacgtttgcaggaagaaattcagtttctggaaacagaaaaaacagaaattctgcatgttgatttaatggatggtacttatgtaagcaatatagctttcggtcctaaccaaattgcggcaatgaaaaaagccagttcaatgacatttgatgtgcatatgatgctggcaaacccggaaagacatatcgatgatgttattaaaaccggagcggaaatgatctcggttcattatgaatcaacgccgcacgttcattatattatccagaagataaagaaagccgggcgcaaagccggtgtggtactcaatccggggacgccggaacatgtaattgaatacctcctggatgatattgattatgttttgattatgaccatcaacccaggtcagcctggtcagacatttattgaaaaaagtctggagaaaatcaggaatactaaaaagatggttgccggacgtaatattcagattgaggttgatggcggcgttaatgctgaaattgctaaaaaggtaaaagaagcgggtgctgatttaattgttgttggtggcgcgttatttaatgatgcaccgagagaaagctatcagaaattaagggcagcgatccaatag

SEQ ID NO: 372599 - DNA, 1254 bp, Salmonella enterica
atggaaatgttaaaaagcatcatgtttactattacaagcatgggcgctacagcaatattgccgcttgttattttccttttaggtctggtttttcgaatgaaagtgggtgccgccattaaatctggcatcactgtaggtatcggtttcatcggtctgggactggttgttgggctgctaaacacagccctgcagccagcaattacgtattactcaaaaattggcagcgggttcaccgtggctgatattggatggcctgccgttggcgcagctgcgtgggttgccccgtttgccgcaatggttattcctattggcattatcctgaacctgatcctggttcgtctgaagcttaccaaaactcttaatgtggacatctggaactacatgcatttcctggttccgggggctcttgcgtatttcgtctttgacagctttttccttgggttgggtgtcgccgtggctctgagcgtagccgcactgtttattggcgatcttattgcgccaagatggcagaaatactacggcctcgaggggacgacctgtaccacgatgatccacatcggatggacacttccatttgcatgggttgttaacaaaattatcgatttcattccgggtttaaacaagctggatgtggatttagagagcgttcagaaacgactgggtgtattcggtgaacccgcaatcatcggcgtgattgtcggttgtctcctgggattgttaaccaaacaacccattacaaccatcgtgccaatggcgatgggcgtggctggcgtcatggtgctgttgccaaaagtggttggggtccttatggaagggcttaacccgataggtaagagtgctaaagaaatcatgcaaaagcagatgggtaaagatgcggagctgaatatcgggatggactgtgcccttgcgcttggcgacccagcaacggttactgtcaccgttattaccatccctctgacaatgctttgtgcgctggttttaccgggtattcagatattcccaatcggcgtgctgatgtcaattatctacatgacgaccatgacagtcatggtcagtaacggcaacgttattcgctcgattatctcaaccttactgttctgtgtggtggttatgtatctgggggggtatgtcgcgcccggtgcaactgagttcctgaacggtgctggcgtcggccttaatggccagggcacggacttcgtattaaccggcccatgggagattctgacctactggttgagcacagttacgcattaa

SEQ ID NO: 372600 - DNA, 294 bp, Salmonella enterica
atgattactatcctcgtagcctgcggaagcggtgtcgcaacctccacactagccgctgatgaagttaaatcggtttgtgctgaatacggaattgccaactttaagattaataaatgcagcatgtccgagctggcctctgaaatgcaaagcgctgatgtggtcctgacgacgaataattataaaggtgatattggtaagccgcacatgagcgtcgcaggttttattaccggtattaacgaagccgcactgcgtaaaaaattaggtgaactgttaagcgaaatttccaaaggctaa

SEQ ID NO: 372601 - DNA, 480 bp, Salmonella enterica
atgagcaattggttaggtgaggagaaaaaagtgggtgcaatttctatcaatgtcgcggatggggcggcattcaaaaattatgatgaagtgctggagcatattcaccagaaacatctggccgatgggattgtaagagagacttacctccaggcgctgcgtgaacgtgaagccgactatccaactggaattttacttgacggctatgctgtcgccatcccccattgcgatagccagcacgccgtcagcccggcgatttatatcattcgtttgccacaggaaatagaagttaatcaggcagatggcgatgaaaaactgtgggtccgcctggttgtcaacctggttgttacccaacctgcagatcaattgcagttgttgaaggcgctgtttaaccatcttcagttagctgatttttaccaccagatgctggagcttcctgctgaagaagcaaaggcattgtttattaacacgataattaaataa

SEQ ID NO: 372602 - DNA, 756 bp, Salmonella enterica
atgtacctggttgaagaaaggagaaaattgatccttgaagagattatttcggcgggtaccgtgtacgttagcgaccttgccaaaaagtatgaggtcacttatgaaactatccgcaaagatctcacccatcttgaaaaaaaagggctgctggttaaaagccacggaggtgcaaccttaaagcagggggctgtcgaacatcctttccaggtcagggaaaaagaaaacagtactttcaaacaagccatagccagaaaagcgctggattttatcccccccaatagctcaatgatcattggtacagggagttctaactatgaactggcaaatctgttgtgcatgaaatctggttttaaaatttttaccgattctttgccggtggccagtgtgctgatcgagtcagataaccaggtctttttgttcggcggagagctgaggaaaaaaagctcttctgtctttggcgggtgggctgtgtcaatgattaatgatattaacgttgatctatgctttatcggcactgatggtttcaacaatatgacgggcccgtccactccgtcctcctcagatgcctttttggatcgaacgatcattgcccattccgagaagaaatatatcctgggcgattacactaagttccagcgcagcagcttatttaagatctgcgactggtctgagattaccgcactgatcactaatgatattgctgataaagacggtattgccgaagttgcgaaacatacaacagtgataacctgttga

SEQ ID NO: 372603 - DNA, 537 bp, Salmonella enterica
atgaaaacgaaaattgcaatcgcatgtgatgatgtagggtttgatcgtaaggaggagattaaaaagtaccttgaagaagagaaaaatgcagatgtcgtgtacgatcccgtaaaacgaaaagaagacggtttcaacaacttcgctcgtctggcggatgaaatggcaggtgttattcagcgggatgaatgccgcctcggtatctacatctgtggaaccggaattggctttacttgccagataaataagcactgggggatccgtgcagtcgccgtcaccaacccctactcagccaagcgagcaagactcagtaacaatgctcaggtgattggtcttggctgcagagttaatgatcttgaatacacaaaaatgatcgttgatgcctggtatgacaatgcgttcgactttgccactgcaagggaaaattccaaaaagaatctactcgaagcagaacgcagcgacaacgcattgctgacgaaacctgaagatgtgcgatggaatatgggtttcagaccagatgatgagaaatctgagggctaa

SEQ ID NO: 372604 - DNA, 1371 bp, Salmonella enterica
atggaactgatcacacagtttatcaatgacctgggtaactttatttttataccggtcattttccttgtactgatgaaacttctggggcgtccgctgtcggagtgtatttcatcagccattaaagtcggcatcggttttattgcattaaccatgaccatcaagctgatgcttgaaaaaatgcagccagcggtgacagggcttgctgaggccaccggctcctcactgagcgccattgatgttggtggcgcagccacagcagttatgggttttggctcaagcatgggggcgataattattccactgtgcgttgccgtgaatattgccatgctggtggcccgtttgacggactgcgtaaacgttgacgtatttaaccttcaccaaaatgcctcaatgggagcaatcgttggagtttactccggcagcttcctttacggtgttcttacggctgcattgttccatgtctgggcgcttattgcggctgacctgggtgcgaaaaacaacgaaaaattcttcaacctgccaaaaggcgttgccatctcccacccggttgcaaacacctatttgctgttcgcttatccgtttaactggatatacgatcgcatccctggattccgtaatctgaacgttacggcggaaagcattcagaaacgctttggtatccttggcgatccgaccatggttggtttcattattggtattcttcttggcttctgtggttatggttgggaatctccgtatcacaccattatcgccagcctgcagttgggtatgtaccttgccgccgtgatgctcctgctgccgcgcatgacctcaatcatgatggaaggtctggttccgctctccaacgtggcacgtaagaaactggttaaacgtttcccggatcgtgagatcactgtcgggatggataccgcactgatagttggtcatccgtccgttatcgcgcctgcactgctgctgatcccggtcattgttatcctcgccgttgtccttcccggcaaccgagtgatgccgctgggggacctctcacagttcgtattctttattgcgtgcatggtaccggtttttaatggcaacattattcgtacctgggtgacttccatcatcctttttggcggcggcttatacatcgcatcctggatggctccagcaacaaatgaagtgtttcagaaattcggcactaatcctgatgccagcgtgatgtactcatcgcttaacccttcagctaacccgttcaccggactctttgctggactcagccatgttggcatcgcaggttatgctctcgccgctgtgttgctgttgtccgtaggctatttactcaaacagaaagcacgccgtcagttgaaaactgaggcagaaaaaacggcttaa

SEQ ID NO: 372605 - DNA, 285 bp, Salmonella enterica
atgaaaaagattttagttgtatgcggaaacggcatagcctcctcttccatcatggtttctgtcctgcaggactacctgaaagaacagaatatcgaagcgcaggtagataaatcctcattgatggcttgcaccacggacacatttaacagctatgacctgattgtttcttcaaccaagctggataacccaggcatcactactcgtgtgattgtcggagcgggcctgttaacgggattgggcgaagatgagatttttgatgctgttaaagaagaaatgcttaagtag

SEQ ID NO: 372606 - DNA, 459 bp, Salmonella enterica
atgaagcttgagattctggtaaatgacgttgagggtacgatcgctgactggcatgcagcaattgagtttgccggccagaagcttttggagaaaggctatatcactcccgagtatattcaggcctgcctggagcgtgaaaagacttatccaacgggtttattgatggcgaacggtcagggcattgccatcccgcatgcagactatacgctggtaaaaaccaacagcataagcattgtgcgttttgataaaggagtcgtgtttggtcagatggaagatgctgacctaacagttgaatgcagcattatgtttaatctcgcattcgcaaccagcgaccagcatatgtctgtgctgcgtcgcctttttacgctcttccaggatatttcgttcatcgagtcgtgccgtaatctcaaaacgcacgaagtcgggaaatatgttgaagagatgcttgccgcatcctga

SEQ ID NO: 372607 - DNA, 966 bp, Salmonella enterica
atgccaaaagagaacaaaaatccgaagctgcgcaactacgatcctcgttttatctactctcttgttgttaagcgttatttctctgagatgaagacgaaggtagaaattgcagaggagctcggtctgtctcgcttcaaagttgcacgcctgattgatgaagccattgcgcaagagtatgtaaaatttaccttccctaaacagcaagctctggacgaggaaatagcgcaaaatctctgtaagaaatacggattgcaggatgcagttgtgctctccgtttccgagtcctggtcttcccaggaacaattaaacgtcaagctgggagggataacggcgacctacttgagtgagattcttaaagagggtatgaagtttggtctggcctgggggcgggttctttcaagtacggtgagtcaactgacgacattacctgttctggatgtggttcagctttctggcgttcatcctggtattgaatttagtcagggaccgattgatctaatacacaaagttgccgcaatttcccacggaagagcgcacccgatgtatgtacccatgtgggtggatgacgaaagtttagcccagaaactcgctgacgatcaggctgttcaggatacgcaaaaattttactcaaatatggatgtcgtaattacagggattggggcctggaaaacaggctcttccagtctatgcgatatattccctgaagcgtggcgtgaggctttaataagccaggacattactgctgatgtatgcgtaacactggtaaatagcaaaggggaaattctggatagtccgctgaaccgcctgggtttcggcattacgacagatcaattgcgtgccacaaagaaactgattggtgtggctggaggggacgaaaaatatgaaggtatagttgcctctctcaaatcaggtcttctgaatgtgctgatcactgactttgatacggctattaaactgctggattaa

SEQ ID NO: 372608 - DNA, 351 bp, Salmonella enterica
atgctactaacttccctacaactcttcaaaaacctctccgatgaaacccgcttgggcatcgtgttactgctcagagagatgggagagctgtgcgtgtgcgacctttgcgctgcgctagaacagtcacagcccaagatctcccgccacctagcaatgctcagggaaagtggtctattactggatcgcaaacagggcaagtgggttcactaccgtttatctccgcatattccttcctgggccgctcaggtgattgagcaggcttggttaagccaacaggacgacgtacaggccatcgcccgtaagctggcatcggcaaactgctctggtagtggtaaggctgtttgtctctaa

SEQ ID NO: 372609 - DNA, 1104 bp, Salmonella enterica
atgaagctgacagctcgtcaggttgaaactgcaaaacctaaagagaagccctacaaactggctgatggtggtggtctttacctgctggttaatcccaatggcaaaagatactggcgtctcaaataccgttcactaggtaaagagaaactgctcgctattggcgtttaccccgatgtttctttagctgaagccagaagcaagcgagaggatgctaaaaggacattagcggctggcaacgatccttctcttgaacggaaaattgagaaactaagtcgtcaacaagatgcagaaaactcttttgaggctatcacgcgggagtggtatcagcgtcgctatgaccgctggtctgtctcctgccgcgaagagatgctgagaacctttgaaaaggatgtgttcccttatatcggtcaccggccaatcaaagatatcaagccgatggagttgcttgcagttctttcaaagatagaagcaagaagggcaactgagaaggtccgtaaggttcgccagcgctgtggagaggtctggaagtatgctgttgtgactggcagggccgagtacaatccagcaccagatctagccagcgccgtgattcctcatgagaaagagcactatgcttttttaacccaagatgaattgcctgagtttcttcggactctcaacacctatgctggtagtgtacttgttaagattgcgatgcaattgcttattttaacgggcgtaaggcctggggagttgaggcaagcggagtggcaggaatttgattttgagaaaaaggtttggaatgtaccagcggaacgcatgaaaatgcgccgccctcatctggttccgttatcaagccaggcaattgacctacttaatcagcttaaacccatgacgggagcaggagcgttgctgttcccaggacgtaataatcctaagaaaccgatgagtgatatggcattgactgtgttggtcaggcgtatcggctacgctgggcgtgttacggggcatggattccgccacacgatgagtaccattttgcatgagcagggatttaattcggcctggattgagatacaactggctcagtttatttgcattcagaatgggagttacaccctttag

SEQ ID NO: 372610 - DNA, 894 bp, Salmonella enterica
atgaaacgatttatatttctgccattaatgacatattttctattaatgaatgcaatggcagctaacggagaaaataatcccagtaatctattaggtgcaccagttaataccgctatttctggtggttcagtattgccggaaggaaagttattaaccgccgtgaatagctcatttcgcgataaagatcatcaaatcgaggggcacggaagtccggatgtttactcccagatatggttattgaagattcgttacggtttgaccgacagactggaattatcaactgtgggttcctatatcaataacaaacgagacaatctgtctcctgagcacatagagggaatgggcgaccaatcagtgggggtcaattatgctttaatgagccagcgaagaggtgatccgttttgggttacggtaggtggggcagtattactacccaccgggcaagatggagataatcatttgcctgggaatagcgcctggggaggaagagtaacactcactttaacaaaattatttactcctaacattaaaggggatatgggttttgtctatcagggaccatttgagcgcggtaaccaggacgtgaaacgaggtaacgaattccagtggaatacccaggtgcggtatatgtttagcgatttaccgttggatcttggtctggaaagtgcctacagcaataatgcctctggaacgaaaaaactgtctaatggcagcgtaattaataaccattctggaactaccgaatgggttgttggtccgtcatttaatattgccgtcgattcactgaaattatggtttggtgccggagccttcttcccggtaatgcaggaagcgaagtcgccaaccaaaatggaagatgtacgctgggaatttaaaataggtaagacctggtaa

SEQ ID NO: 372611 - DNA, 1197 bp, Salmonella enterica
atgctaaatgtggaaatgctatccaccggggatgaggtgttgcacggacaaatcgttgacaccaatgccgcctggttggctgattttttctttcatcagggcgttccgttatcacggcgaaatacggtaggcgataatctggacagtctggtcgctatcttgcgtgaacgcagtcaacatgctgatgttttgattgttaatggcgggttagggccgaccagcgatgatttaagcgcgctcgccgcggcaacggcaaaaggcgaaggattagtactgcaccaggcgtggctgaccgaaatggaacgttactttcagcagcgtggtcgcgtgatggcgccgagcaaccgtaaacaggcggaactgcctgccagcgcggagtttattaataatccggtcggcactgcctgtggatttgcgctacagctcaaccgctgcctgatgtttttcacccccggcgtaccgtcggaatttaaggttatggtggagaaggaaatcttaccgcggttacgcgcgcgtttttcgctgccggagccgccgctttgcctgcggttaacgacttttggacgttcagaaagcgacctcgcgcagcgtctcgattcactgcagttgccgcccggcgtgacgatggggtatcgctcatcaatgccgatcattgaactgaagttgaccggcccggcgacgcaacgggaggcgatgctggcgttatggacagaggtcaaacgggtcgccggacagaacctgatttttgaaggtacggaaaatctgccggcgcaaatagcccgccgcctgcaggaaaggcagttgagtctgacgttgagcgagcaatacaccagcggcttactggcgctacagctttcccgcgccggggcgcctgttcttgccagcgaagtcgttccttctcaggaagagacgctggcgcaaacggcgcactggacgacagaacgacgcagcaatcattatgccggtctggcgctggccgtgtcggggctggaaaacgaacatcttaatttcgcgctggcgacgccggatggcacgtatgccttacgcgtgcgttttagcgccaatcggtatagtctggcaatacgtcaggaggtctgcgcgatgatggcgctaaatatgctgcgccgctggcttaatggcgaggacattatcagcgagcatggctggatagacgtggttgaatcattgacatcataa

SEQ ID NO: 372612 - DNA, 207 bp, Salmonella enterica
atgtttaacacttcgacaattattgtgaattacccatatgaaaccgctggcgcttacggaaccgcccaacatccggctcttcgttcgtcgggacgtgttgggtatgaatttgggttagcttcgctccacccaacctacgccactaatacaacgttgatgccggatggcgactacgccttatccggcatctggttctgtgttcgttga

SEQ ID NO: 372613 - DNA, 1311 bp, Salmonella enterica
atgcgtcaggctttaccgttggtcacccgtcagggcgatcgcattgctattgtcagtgggttacgaacccccttcgctcgtcaggccactgcatttcatggtattcccgctgttgatctcggcaagatggtggtaggcgagctgctggcgcgcagtgaaattccagccgatgccattgagcaactggtttttggtcaggtagtacaaatgccggaagcccccaatattgcgcgcgaaattgtgctgggtacggggatgaatgttcataccgatgcctatagcgtaagccgcgcctgcgccaccagttttcaggcggtagcgaatgtggcggaaagcctgatggccggcacgatacgcgccggtatcgctggcggcgcagattcgtcgtcggtactgccaataggcgtgagtaaagccttggcgcgggtactggttgatgtcaataaagccaggacgacccgccaacggctgacgcttttttctcgtctgcgcttacgcgacctgctgcccgttcctcccgccgttgctgagtattccaccggtctgcgcatgggcgataccgccgaacagatggcgaaaacgtatggtattacacgtgaacagcaggacgcgctggcgcatcgttcacatcagcgcgccgcgcaggcatgggcggagggcaaactggcggaagaagtgatgacgacctatgtgccgccgtataaaaacccctttgcagaagacaacaacattcgcggcacctccacgctggcggactacgccaaactgcgtcccgcttttgaccgaaaacatggctctgtgaccgccgccaatagtacaccgctgaccgacggcgctgccgccgttattatgatgaccgaatcccgcgctaaagagctggggctgcacccgcttggttatctgcgcagctacgcctttaccgctattgatgtctggcaggacatgctattggggccggcctggtcaacgccgctggcgctggagcgggccgggttgacgatggcagatctgacgctttttgacatgcatgaagcgtttgccgctcagactctggcgaacttacaactgctgggcagcgaacgatttgcccgtgaggtgcttggtcgtacgcaggcgacaggggaggtggatgacgctaaattcaacgtgctcggcggctcaatcgcctacgggcatccttttgccgcaacgggcgcacggatgataacccaaacgttgcatgagttacggcgtcggggcggaggttttggcctggtcacagcctgcgcggctggcggtcttggcgcggcgatggttctggaggcggaataa

SEQ ID NO: 372614 - DNA, 1056 bp, Salmonella enterica
atgcgctaccggttcgaaggaaaggaaaagacgctggtcatcggtccctatccgcaaatctctcttaccgaagccagggcaaaacagtctgacgcgaaaatgaagctgcttgctggcgtggacccatcagaacagaaacaggctataaagaagaaggaaaaggaagaagtatctgattcgttcggtgatatcttcagggagtggcatgctcataaatcgaaggtatggtcgaaaggatatgctgacgaaatgatgaacatgttcactgacgatatattgccgctcatcggacatctgagaatggaagaggtggagccgatgatgctactgaaggtgatcaggctatttgaggacagaggggcgatggaacgggctgataaggctcgtcgcaggtgtggcgaggttttcagctacgcaatagtaaccggaagagctaaatataatccggctccagaccttgttggggcaatgaagggttacagaaaaaacaactaccctttcctacctatgcatcgcattcacgaattccagagggcgctgaatgggtatggaggctgggttataggtaagattgctgctcaagttcttcactatacagcaatgcgaacagtggagttacgttcgttggtatggtcaggaattgactttgaaaacaggctgatcaccgttgaccctgaagtcatgaaaggaagaaaactgcatgtcgttccaatgtcagagcaagttacagcgcttttcaaattcctgcaacaaatcaccggacagtacgaactttgcttcccgggaaggaatgacaggaagaagccaatcagcgaaaatgccgtccttggtgtaatccgcggcataggatatgaagggcagacatgcggacacggtttcagacatcaattcagcacggtactcaacgagaagcactggaacagcgacgcaatagagatgcagctggcacacgtaagcggcgggacgcgctcagtttacaaccatgctgcatatctggctacccgcagagaaatgatgcaattttgggcgtactggcttgatgagaaggtgacgtaa

SEQ ID NO: 372615 - DNA, 1299 bp, Salmonella enterica
atgtcagcaggaaccttaactcttaccaataacacagatgctgttactggcagcggcacagcgtttacagcagaacttgctgctggcgattttattgtcgtaactgtcggcggcatcccttatacacttccggttaaagcagtaaataacaatacatcactgacgctggttagtgtttacacaggcccgacacaatccggcgctgcgtggtctgccgtgcctcgtgttgctttgaacatggtcacggctgccttggtggctcaaagcgctgaggcattgcgaggactgaattacgataagcagaactggcaaagcatttttagtggaaccggcaacataacagtcaagttacctgatggttctgcgtggaacggccctgcgtggaatggcattacgacagaactaaataaaaaggccaacgccagtgatctcggttctgctgcttcgaaaaacactgggttaaattccggtgacataatgacggttgggtcttttggtattggtgccaaagatggtgcctatgcatttgaagtcaatgactttggtgcagttcaggtcgcaatgtcaggtagcggactcaggacatatcgaaataatggttttcttggcgacggtgatcaaagtattgcgcaatacagcccgaccatatgggttggaaccggggatacctggtcatcattatcgttgccgtatagccatgcggggaaaattgcggtggcatcaggtagtgagtctgcgggccgtatggtagtgaggttgctatgggataataacaacactgtcgttgatggtaatggatttattaaacaggcatcgccggttgtcagaattttctctgatggaggttatgaaacgaatgatgaatcagagggggtggtcgtaaccaggatacagactggcgagtaccttatcgaggggtgcactggccttaatgcagatgcagcatggggagggatcgatggaggttttgaaattccggtagacagaaacaagcaaccccgcatctggctggactacaaagtcaatgctgatggctcgatactggtcagaacgtttcaccgggttcatccctccgcgcctacttttgctcagaacagaatagggaatactgataatgacggcgtgttcactgagactgtggcggacggtgagccagtcgatattccggccgattcatttgtgtctgtacgtgtggaaatgccggaaaacagcatctggaataagaaacaagaggctactcgtatcgctatggaggaagccaggatgaaagaatggcggacagatggtaataatgtgtag

SEQ ID NO: 372616 - DNA, 960 bp, Salmonella enterica
atgccagaaggaatactgatagattacaacgatggccgtcctgtgatggcgattacagcggggctccgtgccccgtcattctgcacaagttttgctggttacggtacgggggcaaaccagtttcaggttaatactccattaacgtcaggctccacagtttttgttttaccgacacgtccggttgacgttcaggagttcgcagacaatcagacatggatagttttaccgatatatatgacatccgttacaagaaacggagacaacggtgtgactgttaacggtacaaacaggggaaactaccagcgaataccaaactgggcaggaactgtatttgaaattctccctgctgctacttacaacgaaggacttatcgtttccaactctactgatttcactgcaatttcgaatcaggcaagattaatgacatgtgcttatgttggcacggtgacagtcaacggctcgatggcgcttcccgtatcaggaataccattcgggaagtgggataacaataatgtgtctgtaggatttgacggagcaaatattattgtaagagacatcaattactcaggacgggatgatgtttccgcatctgtaacaatggaactggtaattttcaataataccgcgcctgtagccggtgatggcattaccatgactaattcggctgggcaggtgacattttcaacagtgaagcgcccatttgtatatgaccagcagctaacggtaacagacaataatcaatacataggtgataaatattgccagatagtatttacaggtgcgcagtcaagacgagtggatggatattttaatataaggaaaaagggcgtggtaatgtcaggtggaagcatccggtcagcgtataatcaggttgttggtaattacaatgacaacagatttgatatgacatttaatcaaaatatcaatatgccaattcttgtccttccggatatgtattga

SEQ ID NO: 372617 - DNA, 2721 bp, Salmonella enterica
atgcctgctgctgttcctgttgttgccaccattgccgcaggtgtggcggcggcaaatgaaatgtatgccattgcgatggttatcaccgtcgccgcacagattgccacccaggcactgaccaagaccccgtcgctgaattcctaccgtgatacatctgaacgtaaacaggttctgcgtgccgctgcgagtgcgaaaactgttgtttatgggcgtactacgacagccggaacactgtttttttctgaagagcaggctggcgaacaggatgacggcgaaatgctgcatctggccattgctctggcgggacatccgttatccggtgttcagactgtctggctgggtgatgagccgatcagtagctatcctgagcatgcctttttcgagctgcacaccaaccgccagacggcggacccttacatgctggagaactgcccgtcatggaaagaggacatgattggtaaggggatcacttggctgcgcgtatcactgaaatttaacgctgaaaaattcccttccggtatccctaatatcaaggttgaaaagtttggtcgagaggtttacgacccgcgaaccgggctgactgaatacagcaataatgccgccctggtaattctcgactactaccgaaactacctgaaagtgcctgactcagatattaactgggatcagtttcaggaagcggccaacatctgcgatgaggaggtgatcaccggcgccaataccgttgaaaaacgttacacgattaacggggaattcgaccttagcgaaaacaaggtcagtattctggaagggatgctggcggcatgcgccggggatgtaacgtataccgcgggtaaacatggtcttctggtcggggcctattatggccctgctacagaggtgatcactgaaagccagctggccggtgatatcgaaatcatgccggaagtcactcaggcggaacgtgttaacaccatcaaggggacatttgtcgatccgcaacaggggtataccgaagcggatttcccctctgtgtctgtcggtgaatgggtgacggaagacggagtagaaatatcgcaggatatgaagctgcgatttgtgacctctgaatttcaggcccagcgtctggcagacgtgaagttaaagcgcacccgtatcgccagaaccatgaacgtaacgttaaatctgagcgggtaccgttaccgaccgggaatgtatgtgaaggtgaatttcccgtcactgggtatcgtcaacgtagagatgcgcgttaccgactggaagtttggcgtgcagaatggcgtccagctaacgctgaaacaggaaaccgctgatgtctggggtgacgccatcggtaagcctgtagagcggccaccattcacgcagttaccgtccggcggtgtggcgcagccgcagaacctgaaatacaccgtggaagaaattggccaggtcgtacagggcattttgtcctggcagaatatcggacaggtggtctacaacaaagtgatcattcgccgtaatggtcagatggtcatgtccgttcaggttccggggacgttcacgcgtcttaccgggttaccgaaaaacacctacacagcacacgttattgcagtaaaccagatgggggcagagtcgccagaaggttatctggagttcagcattgaagcgcctccgccgccatcgcacgtcgatattgagcaggggttctttgcagtcacgatgatccccaggcttgcgtccataaccaatgtttccacgcagtttgatttctggacgtcaggggagtcaaaactcccagatacatccacttcaactgttgaaggaaattccagcagagagggcgttggtaccacatggaccagcaaccagttacaggcaggtcacacctattactggtacatcaggacgattaacgctttcggtgcatcagcatttgttgaggtcccagcactgtgctcgatggataccggtggattgatggatcttattgatgacggcatccaaaaatctgatgcattccagaatgttaaagatggggtcgataccaatctcgaaggcatcatggaagatgcgctggcgaaccacggtacagttgagcatcagtatcagcaatacggtgaagtgcgtgccgatatcatggttgttaaaacgacagtcgcgactgctgagaaaggattagcagatttgtcgacttatgttcagtcccaaattggccctgacggtagtctcacctcagcagttaatcagaagatgacagccgaggtaaatagcgatgggacagccaaagcctcttatacgctgaacatgggaattatcaggaatggtgtgaaatataataccggattaggcatgtctattgatcctgatggtaactcttataaatccacaattgtttttgctgctgaccagttcggtatttactcagggaataatcctggtaactggcaggctgcattcttcgtctataacggacaggtatttattcgtagcgcattaattcaggaagcatccatcgattttgcgaaaattaccgattcacttcagtctgcaaactttatccccggtggtggtggacgcggatggaatttaccaaaatctggtagcccagaattccatgggaaactctatgcagacagcggtgaatttgcatttaacggagtgaataacgttactcgcattgacggcaatgggatcacagtaaatctctcaggaggtggtcgcgttgttgttggtcgctggacataa

SEQ ID NO: 372618 - DNA, 399 bp, Salmonella enterica
atgaagcatccggactggcataacagattaatcaccgtaataagggctgctgaaaagcggccttttttatggggcagtcatgactgctgcctgttcgcggcggactgcgctcaggccatgtgcggcgaggattttgcggcaggctggcgcggaacctacgacagtgagcatggggcgaaaaaggcgatattgcgcggcggcggttcgcttgaaaaggtgctggcccgttatctcgacgaggtgccggtgaaactggcgcagcgtggggatattgccgttgttgaaaatgccggggcgcggtgtgccggggtggtgtattccggcgtagtgtgggtgcctggcgaaaatggtcttgtcagtctgcgggttaaaccgctgagtgtctggagggtgcgttaa

SEQ ID NO: 372619 - DNA, 585 bp, Salmonella enterica
atgctgtattcccccttttctgattcgatggtggactggttatcccgcgacagggtgacggtagcgatcgccgccaatattcagtttgaatctggtaccgtctatgtgcattccggtaccgggacgctggttattggtggttatgtttattacggcatgggacgcatgggctccgttgatgatgccagtgaaaccagcacgaccagccccacgcaggtcaaaatgaccctctcaggtctggatatggccctctttgccaccatgctgaatgaacgctgtgtgggcagaaacgccgaaatttatctggttgctatggatgacaacggtgttgtccaggtggccgatctcctgttcaaagggcgcgtatccagcacaggggcgaccgctggcgggaagaacgccctgcagtacaccatcagtaatatttttgaagactggcagcgtccgttcccggatcgctataccgatgaatcgcagcaggctgcttatcccggcgaccgcatattccggtatgtggcgcagatgtctgaacgttcgatttactggggcagtaaaaaagatgcgccaggatttacctataagtga

SEQ ID NO: 372620 - DNA, 594 bp, Salmonella enterica
atggctgtactcgaatggccggaggatgtctgtcccgcgtcgctgacctggcgaccagaaagtaataccaaaacttttcgctcaccattcaatggctcatcgcagacagctcgcttccccggtacccgctgggtatgttccctgaccttcaataacctgacggatgaaaaatccaggcgcattgatgctctggtggcttcactcgatggcgagtatggcagggtaaaagttcgcgactgggggagaagtggcagaacaccagcgggcgtgcctgttgttgatggcgctaatcagaccggaaccaagcttcagagtaaggggtggacgccgggaacagtggtgctcagacagggcgattatttcactgttaacgatgagctgaagatggttacagccgacgtgacgagctcggcgaacggtaccgcaatgattgtatttgcgccgatgttgcgtagttcgcctcctgctaatgctgtcattgaggtcgcgaaaccctacggcattttcaaactgaaggataaccagcagggggccggtaaccgtgtgccgggtgtttttaccagttatacgctggagcttgaggaggcattttaa

SEQ ID NO: 372621 - DNA, 249 bp, Salmonella enterica
atggtatcgcgaattgaattagcaaaagaagtagagcaggttcaagggaaattgaatcatttacttatccgttctgaacttactttatatgtcctatcagcgattattgaaacaggtgcagtaaaacgcgagggcgtcgaagaattaatacgcgaagcgaaatttaacgcaccagggataaatgaagcaattattcaaaaagagaaagaaatcgtcttatccggcttaaagaaagtaacgatttcttaa

SEQ ID NO: 372622 - DNA, 2994 bp, Salmonella enterica
atggatattagccaaagaactggtactgcattttcagataacgccagcctgtttgctcgttcggctgcttccatgcgtgaatatggatatagttcagaagaggttctgaaagtaaccgaagctatttcaacgggacttaaactgtctggcgcaagcacatcagaggcgagttctgttattacccaattcagccaagcactagcgcaaggtgtgcttcgtggtgaagagtttaactcagtcaacgaaaatggcgatcgtgtaatccgtgcgctggcatcgggaatgggggttgccagaaaagaccttaaagcgatggccgatcaggggaaattaacttctgacaaggttgtaccggcattaatcagccaactagggtcacttcgggaagagtacaacgcaatgccacagacagtggcggcagctacaacaaaaattgaaaatgctttcatggcatgggttggcggggcaaacgaagcaaccggagcgacaagtgctttaacgggcgttctcaataccatctccgataatattaatactgttgctgccgctgctggagcgttggcagctattggtggcgcaagattcctcggtgggatgtttggtgatctcagtgggcaaacagcgcaactgatcgatgcacgtaaaaatgagatagcgctcgcagctgcacgagccagttcagcgacacagtcacagagaaaagccgcagcagacgcaattgcagcagaaagggcatatcaactgtctcagatggaacttgagcttacccgtaatactaatgcagaagcgacggcaacccagaacgtgattgccaaacgtcgcgcaatgattacggctaatactgcactggttcagtcaaaccgtgctgttactgcatctcagcaagctcttaattctgcaacttctgttatggggcttgtcaaaagtggtgcgacaggcttgctttcattggttggcggtcttccaggattactgatgcttggcgctggtgcttggtacactatgtaccagaatcaggaacaggctcgtcagtctgcccgtgaatacgcaaaccagattgacgagataaaagagaagacatcgaaaatgtctctccctgaactggacagtaaccgtagtcagaccgtctcagcactggaagagcaaaaacggttgatttcagagcaggaaaaaagtgtagctagcctgaatcgtcagataaatgagcttaatgaggcgagaaataaaccaggaataacccaagaaaatgaccttaatattcttaaggcaatatcaatacttactgaccaaattgctgttgaggaagaaaaactatcgcatcttagggagaaatcactttcgctatcacaagctcaagaggaaaacgaaagacggagtaatgacttaattaaagagcgtgcctggcgtcaaaatgctgagtatcagtctctggtaaacatgaacggccagcatactgagtttaaccgcctgctggggttaggtaatgaattactcatggcaaggcaaggcctaactaactccccgttgcgtattcctcaggcgactcttgataataaacaaacagatgcgcttgaaaaaagtaggcgtgaacttgaattatctcgccgtaaaggcgaggagagagaacgcttacgattaagttattctgctgatgatcttggcttcgcttctaacgaccctcgttaccagaccagccgtcaggagttaattaataatggtttagaggagtggagaaataatcaggataacaagccgaaagcaaaaggtggaaaaactgaagccgaaaaaacggtggatacttacgacaaactcattaagcagcagaaagaacaaatcgctctggctggtcagaatagcgaactggcaaaactgaaatatcaggttagccagggagagcttacttctctcaccgaagcacaaaaacagacccttttgcagaatgccgcgctcattgatcagcaaaaaatacgtgagcaacttcgaaattacgaggcgaatctcgcagacagtaacgccagctcccgcgcagcgaacgaggctcaactaatcggctacggtcagggttctcggtttcgcgaaaggcttcaggaacaattcaatatccgtaaggaatttgaagagaagaatactgatctgcttcggcaacggcaaactggtgaaatagacgaagctttctaccaagaagccctggctttaaataagcgttatctcgatgagcgcctgcgcgatcagcaaggtttctatgctgcttctgatgctcagagaagtgactgggcggatggcatgcgtgaaggattcgctaactgggctgacaccgcctcggactatgcctctcagtctgctgacctggtaaacaatgccatgaccggactggtgggaaatatttctgatgcactttccggtaataaggtcgactgggaggactgggccagttcggtgcttcagtctatgcagaaaattatcctcaatgcgatgctggtggattctttgcgctcagccagtaacagcggttttttcagttcaatcggcggtatgtttggtgcgggcgctggagctgcatccggtagcactccttccggcgcttataactctgccgcttcaggcataaagctaaatgcgaaaggtggcgcatatgcttctgaaagtctgagcgcttacagcaacagaattgttagcacaccgacatattttgcttttgcaaaaggcgctgggcttatgggtgaggcggggccggaagccattatgccattgacacgatcagctgatggttcgctgggtgttcgcatggttggcactccgggtgccacgtcaggcggcggtgatacgattattcatcagcatttcaacatatccggtaacggggatgcggcactgaagcaggctatgcaggaagcagcgcgacagggagcgaatgacggtgcgaaacaggcgcgtcaggatttgcttcaggacttctctaatagaggtcaggcgaggcgattgcttggcgtgtaa

SEQ ID NO: 372623 - DNA, 207 bp, Salmonella enterica
atgtggattgagttcgacaggcaaagccccattggcgatattcgcggtgatattcaggctgctcagatcgtctcggccgtctacggatcacagggggcaaaagtagcgctggaagatgcgatcctgcgctggggtggggacgagcaatcagcatcgaatgacccgtttgcagggcttgaggctgcattaacagcagcaactcagtga

SEQ ID NO: 372624 - DNA, 390 bp, Salmonella enterica
atggctaaaagtcttaaagaactggcgctggctaaaatgtcaggctttcgtcataaaataattacggtccctgaatggggcggtgtgaaggttgttctgcgggaaccttctggcgaagggtggttacgttggcaggaaattgcaaaatctggtgctgatgaagaaggcgaggtatctgtatcagaaaaagcacaccgtaatctttgtgctgacgttgtgctgttcattgatgtcctttgcgataccaacaagcaaccggtattcagcgtcgatgaagaagagcaggtacgtgaaatttacggccccgttcactcacgtctgctaaaacaggcgcttgatcttatcaacagcgcggatgaagcgcgggaaaagtcgcaacccccggcgtaa

SEQ ID NO: 372625 - DNA, 705 bp, Salmonella enterica
atgtcctcactttatgaaaaatcacagggcacgaagattcagatcacttctgccccggcaacgccagaaacggtcggttcagcaacgtatctggatttgcagtgcaccattaaagaggtgcaattcactggtggccagaaacaggatatcgacgtcacaacgctgtgttctacagaacaggaaaacattaacggcctgggcgctcagtcagaaatctcactgtcgggtaacttttactctaaccctgcacaggatgccctgcgtgaagcatatgacaacgacaccacctatggcttcaaaatcattttcccttccgggatcggcttccagttcctggctgaagttcgccagcacacctggtcttcagggacaaacagcgtagtggctgcaacgttctcgctacgtctgaaaggtaagccaacgaaaattaataacgcgctgcgccttaccaccgatctgcctgacaccaaatccgttacctctggtgcggctttatcattgacggttgtagcggctggaggaacagcaccttattcctacgtctggaagaaaggcggcagcgcagttagtggacagacgactgcaacgtttaacaaggcaaacgctgctgcaggtgatgccggtgattacgtttgtgaagttactgacgcctccacgcctgccggaaaagttacctcatcaacctgtacagtaacggtggcgtaa

SEQ ID NO: 372626 - DNA, 348 bp, Salmonella enterica
atgacggaagacgatctctatcctctgctggcaccgctggccggagggcaggtttatccctacgttgcaccgctcggcagtgacggtcagccttcaatttctccaccgtgggtaattttttcacttatttctgatgtgaccgctgatgttctgtgtggacaggcggaatctaacgtttctgttcaggttgacgtgtatgcattgacgatcagcgaggcacgcataatccgggatatggcattacaggcagttaaaccacttaatcctaccaacataagcaaaacccccggttatgaaccagagtcccggtattaccggtcaacgctggaatttcaggtaatcgcctga

SEQ ID NO: 372627 - DNA, 450 bp, Salmonella enterica
atgattgagacgagcctcgatttttccgggttgaatgacatcgcaaaggacctggaggcgcttagccgcgctgaaaacaacaaggttctgcgtgatgccacgcgagctggggcagaagtgcttaaggaagaagtgatcgcacgcgctcctgagagaaccggaaaactgaagaaaaacgtggtcgttttgactcagcgctcacgacgccgcggtgaaattacttccggcgtacatatccgtggtcgcaacatgcgaaccggtaatagcgacaacaccatgaaagccagtgatccgcgaaatgcgttttactggcggtttgttgagatggggacagtaaatatgccgcctcatccgtttgtgcgccctgcgttcgatgtacgccaggagcaggcgacggaggtcgcgatcaggcgcatgaaccaggcgattgacgaggcattaagcaaatga

SEQ ID NO: 372628 - DNA, 351 bp, Salmonella enterica
atggcaatatcagcgggaaggctaatacaggtcattgtgatacaaaaccccgtacatattcgtgacaattcaggtcagccagttgaaatatgggaagatggcgaaaccatccgcgcagatatcaggggccggagcggaagagaattaatggctgccggcgccgaaattgctcaggctgacgtcagggtatgggttcggggaaaatcgggagaaaaaataaccgcagcatccaggctgaaggttcagagtggtccatacagaggcaaaacccttaacgtaatcgctcctcctatcccggatgaaaagggtgagcgtcttgagatattgtgcaagctgggagctgaaaaatga

SEQ ID NO: 372629 - DNA, 327 bp, Salmonella enterica
gtgattgaacttgtgacactggaggaaattaaggatcacctgcacattgatcatgatgctgacgacggcccgcttaaggaaaaaattcaggaagccagttctgtgttactggcttttattcagggaagccgggacaaggtcgttgatgagacaggaaagttaatcgaaggtgaagcgctaagccggatgaaagggtcaaccatgcgcctggtaggtatgctttaccgaaatccagatggggcagaaaaagaagacttacttcagggcgaacttccattctctgtaacttgcttaatttatgacctgcggtgtccaactattctctga

SEQ ID NO: 372630 - DNA, 1044 bp, Salmonella enterica
atgaacgaacgcgaactatccctgataaaggtgctgggcgaggaattcggtcaggttctcgctgaaatgcgtgacagcttcagtaaaaaccttcaggcgcagcgagaggaatatgaagaaaagctaaccagactcgcaaagcaggttgaagaaatcagcaatgcacccgatcccgacatcgagagtatggtgaaggcggccatcgctcatttaccagcaccgacagcaccagaactgccggatattaccgccatggtcagcgatgcggtagctgctatcccggcaccgcgcgacggtaaaagtgtcacggtcgacgatgtcacacccgttttacaggaactggtcagtaaggctgtcgcagagatacctgtaccgaaagacggtaaagattttgaccccgccacgcttaaacaggccgttgaactggccgtcagcgaggccgtggcagcaatcccggcgccgcaggacggtaaaagtgtcacagtcgacgacgtccagccgatgattcaggagcttgtttcctcggccattccggaatttccagatgtgaaatcgctggttcgtgaggcggtcgctttgctgccccctccggaaccggggcgggatggtgaagatggccgggacgccctgtcgctggagattctacctttcattgatgaggggaaaagctacccgcgtggcagctatgcaacgcataacggcggcctgtggcgcgcttacgagaaaacccatggcatgcgcggctgggagtgtcttgttgatggcgtggcgggcattgatatacagcattctgagcagcgtagcttcaccctgactgttaaccgcaccagtggcgccagtgaaaccaaatcctttgacgtgcctgtgatgatttatcagggagtatacaaatccggtcaggaatatctgccgggcgacacggtgacgtggggcggttcgctctggcactgcgacgagaagacgcaggacaagccgggggagaatggttcgaaagggtggacactggctgccaagcgtggccgcgacgggagggataaaacgtga

SEQ ID NO: 372631 - DNA, 1356 bp, Salmonella enterica
atgtggaatcctttccgaagaaaagaggggcaagtcaaaaatctacagcagcctgtcagccgcgggggctggacacctatgttcagttatgtccatgaaccctacgccggggcctggcagcagaacatggaaattaagcccaaaacggttctctcctattatgctgtgttttcctgcatatctctgatcgcaagtgatatcgctaaaatgcctccgcgcctgatgaagcaggattcaaatggcgtccggagggaaattaaaaccgggaagatagccgcgctatattcccggccaaatgcctttcagaaccgcatccagttctttgagcactggctgaattccaagctgtgcgaaggtaatgccgttgcgctcaagatccggaacaatcgcggtgaaataactgagctgaggctgctggactggaacaaggtcacgccactggtagctgatgatggctctgtcttctaccagatcaacccggataacatggcgggcattgattcaactgtgacagtaccggcacgagaggttattcacgatcgtttcaactgtctgttccatccccttattggtctttccccgatttatgctgctggtctggctgcaatgcagggtcaccatattcaggaaagctcagcgtactttttccgcaatggcgggaaacccagcggtgttatcgaggttccgggctctattacggaagagaacgccaggaagatcaaagataactgggacactggttataccggggaaaatgcgggtaaaaccgccattttgagtaatggtgcgaaatatgttccccggacggtctcagctgctgatgcgcagactgtcgaacagctccgcatgaccgcgcagattgtctgttccgtgtttcacgtgccggcttataaggttggcatcggtgaactgccgacgcatgacaatatcgaggcacaggatcagcagtattactcgcagtgtcttcagtcactgattgagtccatcgaattgctgctggatgaagcgtttgaacttgagggggatacgggaaccgagtttgacgttaatgcactgctgcgtatggacagtgaacgccgtatcaaatccctgggcgagggggtgaaaaatactatcctcacaccaaacgaagcgaggaaaagtgagaacctgcctcccctggctggaggggactctctttaccttcaacagcagaacttcagccttgaggcgctggcgcgccgtgatgcttcggatgatccctttggtaaaagcagttcgtcacagtcttcagcctcaacgaacgaaggaaaggctttaaccgatgctgagcagtcggcagccaaagccatgatcagaggatttcttacaaaatga

SEQ ID NO: 372632 - DNA, 1935 bp, Salmonella enterica
atgacgcttaaacgcgcctgcaccctcatgacggttaagtcggtaaatgaggatgagcggattatcaccggcatcgcctcaacaccgtctcccgatcgtgacggtgacattatggagccggagggggcgaaattccgtagcgatacgccgttcctctggcagcacgaccgctctcagcctattggcacctgcacgccaaaaatggtgaaagaggggttgcagataaccgcaaaactcgtgaaaccaacctccgacatgccatcacagctgatcgcacgtcttgatgaagcgtgggcttctattaaggcggggctggtacgcggcctgtcgattggtttccgcccaattgagtattcctttctggatgaaggcggtattcgctttttgtcctgggacctgcttgaggtctcggcggtgaccattccggccaatgccgaatgctccatccagaccgttaaatctttcgaccgccagtttctcgccgcgtcaggcaatgagaaaccggtagtgaaaacctctaaaaccgctggcgctacagcacccaaaaccaaaaaaggaaacaatacgatgaatatcgcagaacaaatcaagagctttgaagcgaagcgtgcagcgctggccgcatcactcgatgaagtgatgtcaaaggcggctgaagagggacgcaccctggacgctgaagaagaagagagctacgacaacacgtccgcagaaattaaatccgttgacgcgcacctcaagcgactgcgcgacatggaaagcaatctggcatcgactgcaaagccggtatctaaagcagccagtggcgaagtcaccaccgttaaagcaaacgcaccggggatcatccgcgtagagcaaaaactcgaaaaaggcatcgcctttgcccgctttgcaaaatcgcttgccgccgcgaacggcagccgctccgaagcgctggaaattgcacgtaagcagtatccggatgatgcgaaacttcaccatgtgctgaaagccgctgttggtgccggcaccacgaccgatcctcagtgggctggtgcgctggtggagtaccaggaatatgcacaggatttcgttgagtacctgcgaccgcagaccatcatcggtcgttttggtcagggaaatatcccgtccctgcgtaaggtgccgttcaacatccgcattccggcacaaacttccggcggatctgcaaactgggtaggtcagggtaaggccaaaccgctgaccaaattagactttgagtccatcacgttcagcttcgccaaagtcgcagccattgcggtcctgaccgatgagctgatccgattctccaatccggcagcagatgctctggtgcgtaacgcccttgccgaagcggtcattgcccgtcttgatacggacttcatcagcccatcaaaagctgaggttgccaacgtctctccggcatccattaccaacggcattaccgccgtcccgtctaccggaaacccggatgacgacgcggctgcggcatttggcgtgtttgttgcggccaaccttcagccgaacggtgctgtctggctgatgtccagtactacggcactggcactgtccatgcgcaagaatgcgctgggccagaaggagtacccggaaatgaccctgctgggcggtactttccagggccttccagtgattgtgtctcagtacgttggcaaccagctggtgctggtaaacgcaccggatatctacctcgctgatgatggtggcgtggcggtcgatatgtcccgcgaagcgtctctggaaatggaaagcgatccggctggtgacagcattacaccaacgggtaccgagctggtttccatgttccagacgaacagcgtggctattcgtgccgagcgctggatcaactggaagcgtcgccgtactgccgcagtagcggtgatttccggcgtcaactacggcgctggcgcaggcagctaa

SEQ ID NO: 372633 - DNA, 1659 bp, Salmonella enterica
atgccggaatggacaactgcctgccctgactgggcggagcgcctgaagaagggccagtctattattcctgcaccgatttacccggagcaggctgaaatagccctgaacgttttcaggcaactgaaaattgttgatgccccaggctcgccaacgttcggtgaatcctgcgcacagtgggttttcgatctcgttgcggcgctgttcggctcctatgatgccgaaaccggtcgcaggcacattacagaagtgtttgtgctcatccccaaaaaaaactccaagtctacgctggccgccgggatcatgatgacggcgttgctgctcaactggcgtcaggctgccggatacaccatcatcgcaccgaccgtagaggtggcgacaaacgcctttaacccggcgcgcgacatggtaaagcgggatgatgatctggatgacctctgccaggttcagacacacatcaggaccatcacccacaggggaacggacacgacgctgaaagtggtggccgccgaccccaacaccgtttcggggattaaatctgtcggcacgctcattgacgagttgtggctttttggtaagcaacataactccgaagatatgctgcgtgaggcagtcggtggcatggcatcacgaccggaaggctttgtgatgtacaccaccacgcagtctaacgaaccgccggcaggtgtgtttaagaagaagttgcaatacgcccgtgacgttcgcgacggaaagattcacgatccgcattttcttccggtgatatttgagcatccaccggaaatggttgccagcggtgagcatcttcttctggataacctcgcgatggttaaccccaacctgggttactccgtagacgagcagtttctataccgtgaatacaacaaagcgaaagaggccggggaagaagatttccgtggctttatgtcgaagcacgccaacgttgaaatcggtctcgccctgcgcgctgacagatgggcaggggcagatttctggaagcaacaggcaaggcgcgtcacttttgacgatattctgcgccgttctgaggtggtcacagttggtatcgatggcggtggtctcgatgaccttctcggcctggctgttatcgggcgcgatcgcgagacgcgcgagtggttatgctggtgccatgcatgggcacataccatcgccctggaaaggcgaaagagcgaaatttcaaaattaaaggattttgagagggccggtgacctgacgatcgttaagcgggtaggcgaggatgtcgagcaggttgcagagtatgtcagccggatttatgaagccgaactgctggataaaattggaatagacccctctgaggtagggcaaattcttgatgcgctcagtgaagcaggcattcctgatgaggctgtaaccggggtcagccagggctggaaactcggcggcgccattaagacagctgagcgcaagctggctgaaggtgttctgcttcatggcggccagcctctgatggcctggtgcgtgagtaatgcaagggttgagcctaagggtaacgccattctcattaccaaacaggccagcgggaaggggaaaattgatcccctgatggccatattcaacgccgttacgttaatggcccttaaccccgaaccggtcaaaaaagactaccaggtatttttcgtttaa

SEQ ID NO: 372634 - DNA, 495 bp, Salmonella enterica
atgttaacagcgcagaagcggaaatatgctctcgcgctgatgtccgggatgtctcagaaggatgcggctataaaggcgggatattctgaaaaatccgcgcgttccaaggggtcgcagcttgctaaagacccggaggtcatcgcgtttattgagcgaaaaaaacgagaaaaagttgaggtggatgacgaacctgcgtatcgcaggaatgtttataccccagcagtaaacacgcctgaagaaaaacgacctcctgcggcatcgtccgccggtgagtatgaagatcctctcgacttcctgaaatcggttatgaacaacgttggttacgaaatcgaaaccaggaaagatgctgcgaaggccatgctgccttatatgcatcagaagaaaggtgagggcggtaagaaagatgcaaaagctgaggctgccaaaaaagcggccaataagtttgccattcagcaaccaccgaaactggtggttaacaatcgcgggaatacataa

SEQ ID NO: 372635 - DNA, 366 bp, Salmonella enterica
atggctaagttaactacgcttcagccccgactgaaagcgatcgacacccggcgagtaaagccagtgtatggcgagaacaggcgaataagcggtagcgcaagggtaggactgaagcgccgtatctatgcacgtgatggcggtcattgttgcatgtgcaaccgcgtcgttgatttgcatgacagcgaacttgatcaccgtatagctcttcagttcggtggcgacaacgatgaacgcaacctgtggacgctgtgtatcgagtgtcactcaggtaagtcatcgcgtgaagcatcaacaaaccagcctgatagtgaggcgatgaagcatccagttcctgaagacaacaggaataacattactattctctaa

SEQ ID NO: 372636 - DNA, 594 bp, Salmonella enterica
atgatgcagacagattttgagtttgtggtggtcagccatcacacccgcttaggacatgcgcaacgtctcgctgcgatgttggatgcccatctgcttattgatgacggtaaccatggcgcaaactggaatcatctccgcgcgcttgaatgggcatcatggcaggattgccgggtagtgataatcgaagatgacgcattgcctgttccagattttattgagcaggttagtgaatggcttaaccgcttcccagaatcgctggtgagtttctacctgggtactggccgaccacctcagtatcaaatgcagatagctgagcggctgattgttgctgataagactcaggctgatttcatcacgcttcagcggcttatacacggcgtttgctatagcgtaccccctcagcatatcgaacgagtcatttcccgatgggacagcagcaagccagctgattatgccgttggtgatgcctatggcggcgctgtggtttatccgtgttactcgctggtggatcatgcagacggagaacctgtagagcgtcatcctgataaatcacctcgaacagagcgccgcagggcgtggagggtatatggctaa

SEQ ID NO: 372637 - DNA, 519 bp, Salmonella enterica
gtgcctaaaaaaagaccgattgaggaaaggttctgggaaaaggttgataagcgtggtgacgatgagtgctggatctggctcggcgcaaccattcaaccagggggcggaagacatatcaaacctcagatatacgggaaaatagcggggccgagaacgcctgcaggtcgtgttttttggtcttctcatcgcctttcttggtttctgaagtatggtgacattccgcctggcatgctcgttgaccataagtgtcataacactctatgcgtcaatccctctcacctcaggctcgtaactccaaagcaaaacagcgaaaaccgagagggtcccgctatcacaaggaactcatctggaaagcgcggtgttagatggaatcctcaggttggaaagtggcatgcgtgctacagccacaacggaaaggcgcactgtgtaggcttcttcgatgatcttgaggaggctgctgaagctgcacgacgagcccgtaataaggtgtttacccataatgatgcagacagattttga

SEQ ID NO: 372638 - DNA, 1458 bp, Salmonella enterica
atggaagtctctatcaacggcgtttcatatgtaccggcaggcgtcaccgcttcacgtattggcattgccatcactacccacaatcgagctgacgttctgaagcgcgcactcgaaaagcacatgaagcacattcccgccggtgcgctggtggttgttatcgatgacggttcaaaacctgccgcggtagtgcctgacggcgtgcagctgcttcgccatgaaacatccctcggtattgttgcctcaaagaatgccagcttaaccgcactgatggatgccgggtgcgagcatcttttcctgtgggacgatgacgcctggccgattgctgataactggcacctgccttacatcgaatcacctgagccgcaccttgcttaccagtttctcgatctggctggccgcaataagctgaatgacctttcggtcctttaccgggacgataagcacattgcgtacaccgggcagcgcggagtgatgctttattaccaccgcagcgccatcgagtcagtgggcggattcgatccggtatacggtcgcggtatgtatgaacacagcgaccttgccctgcgcatccataacgccggaataactacgtggacttacgctgatgtggtcggttcagaaaagcttatctattcactcgatgagcatgaggccgtagagcgttcagtgccgaggcccgaccgccaggcgctggtagaacgtaatgtgaagatccacaacgaacggcgtgacacagggtttaccggttacgttgaataccggcagcagcgcgacgtggtaatcacaacgctgctcaccagtcagcctgacccgcagcgcggtacaaaaatggcggcctcgcctgacatgctggctaaatgggcctcatcacttcggaattgtggccgtatcgcgctggtggatgaattactgacggcaccagcagatgttgagttgtatcgcgtacctgacgtgaagatgaatgtctatttccggcgatggctgcacatctggcagcacctgcgagatcaccctgaataccggttcgtctggtgtactgatggtaccgatgtcgaaatgcttcgcgcaccgtgggaagaaatggagcccgggaaggtgtacgtcggttcagaaccaaagacctacgccgatacctgggcaaagcagaatcatccggagcgcatctatcaggagttcattgaagcgcaccgcaataatgtgatgcttaacgctggcctgctgggtggcagccgcgttgatgtaatggcgttcgctcacggcatcatccgtctttactaccggatcgagagttatcgcttctggaagaaagagcaggctggcgctgcggtgggtgacatgatcgcttttggcattgtcgcgaagtcatttggcgatcgcattgtcaccggcccgcgcatccacacagtgtttaagactgatggtatcggtaaggaagtagctttctggcgccataagtaa

SEQ ID NO: 372639 - DNA, 774 bp, Salmonella enterica
atgtctgaatctaaaaacatccctcatgtaacaacgacacccaaaccttttggcgtaaacgtcgaatggaaatggccggaaggccagatgtggttttcctcgctggaactgcaataccttcgtgaagatggccggcttgagaaggaacgcatcttctggccaatgaccagcctaatgatttccggcctcaaagctggcgaacgcctgcaggtgcgcctacgtccagttgctttcgatgggtcagcacgagattggcgagccagtgactggatcgaaggagtttcttcagtcgacgccgggggaattgtagaggcgctgcaggttgatattcgcagcagtgcaacgttcgcagcattacgtggtgatgaaggtatctctccagaagaagttcgtgatgccgcggcatacatcaagcgcactcgcttagcgaaaaaattgcggaaatctttggaagagatttcgccatttgctgtaaaggacgggcaggcatttattaagaatgcgttcatcggggatggcgtggcatcggctaactacagcgtgaagatgggtgtggaccacaacggtacacagcatgctgccggcatgcccctcggcgttgaagagggcaaaagtcaggttaaatttctggcagaaaagtttgctgttgctgctaaaacccagaatgcgttagaagctgcattgcagaaggtcatccaaaaagttgtggacgacgcttttcaaaaagcactgcggcccggcggaatgctgtggaacaagcgcggtggttactaa

SEQ ID NO: 372640 - DNA, 336 bp, Salmonella enterica
gtgggcggaacaattgagatcagtgaagtcggcgtaacagtcaatatggctggtggcgggaaaatagttatcggagattttggcgataatacagcacccaaggctgagccactcccaccccttaccccagaagaggaactttacgggcgcgggctttgcctacttcctgctggctgggaagaattaagtggcgaagagcactggcagtatcatcttagcgaatccttacgtcatctatggccgtcgttcagcagggaacagaagatggccatcgcttttaccgccaatgaactgtcagatgaacttcgagacagtcaatattcccactgctggtaa

SEQ ID NO: 372641 - DNA, 546 bp, Salmonella enterica
atgaataagaaaattttcaatgacatggttctgcttaacgaacaaacatgggaaagactatcttcgataatgcaaagtgaagacgacataggtgtagtcttgcgcctccacctggtaaccgagaaaattattgaagcatggtgctgtgcggcatcaaacaacgttaatttttttgatggtttcggcgaaaacctaactatgtcatacgcggcaaaactcaagctagctacaaattttggtttgaatgaattttcttaccaggagcttaaagtcgtaaacaaaatcagaaatgcacgctctcatcaaattgataactcagaaattaccgatgaagaaataaataaattaatcacccacataagcaagggtgaccaaagagagctaattgaaaaccccaaatttggcattctggttggtgataaaggaatacatctcaatgaagaaggtatttcaaaccgtgaaaagttcattgcttctattgctgctgtgattctgaggattgccaaacaagctaacgacagcgataaatttataaaactactctaa

SEQ ID NO: 372642 - DNA, 258 bp, Salmonella enterica
atgagtgatcgtgtcattgaatgcgcctccagagcggggcgcgacttctcagagttcatgaaaggtgagaagggcatgatggaagcattggcctcggtggatgagtttggcgagcagctgcgcctcaacggctgtgtcaatcatcactttgttagctacatgatgcggaactcgatcatgcaggcattcatggacatggcaaaagccgagaggaaagaagagcgccggcgtaagcgagcggaatcaaaagcgaagtag

SEQ ID NO: 372643 - DNA, 498 bp, Salmonella enterica
atgaaagcaatcacgctttttaatacaccgatccgtgttgatgaatcaggaatgatctgcctcactgacatgtggaaagctagtggtaaaagtgaatctgaatctccgtaccactacctgagaaacaagcagaccaaagagttcttagccgagctggagaaaaaccacgaatctgtggtttttacggaacgcggtgtgcacggtggaacttatggcggaaagttcgttgcttatgattacgcagcatggctaaaccccggatttaaatatgcagcctataaagtcctcgatgactacttcaccggagagcttcatcatcggaacagcttaagtgcgcagctcaacatgaaatgtcatgagtttgaccagaagaaagacatggcgagcttctgcggacaaggcctcgcggcatggcgctacacgaaacctggtttgatcgctgagattaactccctggctaaccagctgcagattacgatccccgggcttccgggatga

SEQ ID NO: 372644 - DNA, 459 bp, Salmonella enterica
atgaaccgcgtagccactggcgtgattgttgtgctgctgattgtggccgcagtgctggcgtggactaccgaccactaccacggtaacgccgtgaaatacaaagagcagcgcgataccgctactcataagctggcgctggcgaacgcgacaattaccgacatgatgaagcgccagcgtgacgttgccgccctagatgccagatacacaaaggagcttgctgatgctaacgcgactatcgaaagtctccgtgctgatgtttctgctgggcgtaagcgcctgcaagtctccgccacctgtgcaaagtcaacgaccggaaccagcggcatgggcgatggagaaagcccaagacttacagcagatgctgaactcaattattaccgtctcagaagtggaatcgacaagataaccgcgcaggttaactacctgcaggagtacatcagggcgcaatgccttaaataa

SEQ ID NO: 372645 - DNA, 504 bp, Salmonella enterica
atggcaatgtcaccggcactacgaaatagcgtaatagcggcgataagtggcggggctattgccatagcatctgtgttaatcactggccccagtggtaacgatggtctggaaggtgtcagatacaaaccatataaggacgtagttggtgtgttgactgtgtgttatggccacaccggaaaagacatcatgcctggtaaaacgtataccgaagcagaatgcaaagctctcctgaataaagacctcgccactgtcgccagacaaattaacccgtacatcaaagtcgatataccggaaacaacgcgcggcgctctttactcgttcgtttacaatgttggcgcaggaaacttcagaacatcgacacttcttcgcaaaataaatcagggtgatatcaaaggcgcatgtgatcagctacgtcgctggacatacgctggcggtaagcagtggaaagggctgataacgcgtcgcgagatagagcacgaagtgtgtgcgtgggggcagaaatga

SEQ ID NO: 372646 - DNA, 204 bp, Salmonella enterica
atgtaccgtatggacaaaatcagagaatggttcagttacagcttcggaggactgactgcgatggggggcattctctccctgaatgactgggctgtaatcattggtattctttgtactgtcggcacatttggcatcaactggtactacaagcgcaaagagcgtgaggacagattgaatggcaatgtcaccggcactacgaaatag

SEQ ID NO: 372647 - DNA, 780 bp, Salmonella enterica
atgaatcttgaaaacactgtgaaattccactctccgaagtctcctcaactatcagattcaccgagagcaacagcatcagactcactgactaataccgatgtgatggcagcatttggtatggtgcaaagtcgcgctccgctcgggttcagtgctttcagcggcaagatgaacctgagcgacaacgataagcgtaaggcaattcagttactggtacagcatgggatgaagcattgcgacaaggtggctgccttgcgcaaacttgataccaatgttaaagggaaagtagtgcaaacgctcgcaactttcgcgtatcaggattactgccggtcggcagctagtaatgtcacgtgttcgtgctgcaaggggcgcggagtcttaaggaaaaaggaacggatcgttaaacatcccgggtgtggagagaaaactcctgcaaagacggctgtggaggtaacggaattactatgcactaaatgcaatggcgcaggtgttgtatctacatcttgcgttaaatgccgtgggcgtggcatagcgctggacaggaagaaatcagaactacagggcgctccagtttattcatcctgcaagcagtgctcaggtcgtgggtatgagcgcatacctgcgtcctcatgctttcgtgcgatatgtcagttcaccgatgcaatttcaccaggcgtatgggataaggctattaagccattctatgaatcattgattagcgaggttgaaatggaggagtctgctgcaaatgtagttttatcgaaagttaccagcgaagtttga

SEQ ID NO: 372648 - DNA, 165 bp, Salmonella enterica
atgatgataaagccaatccataaccgtgaagcaattaacatcctctcagcaaaattctacttcccgccaatgcgttttaaacgccgctcccttctggcaagggaatgcaatgcactaatccaggctgacaggtatttagctcaggcggataaggggaaagcatga

SEQ ID NO: 372649 - DNA, 243 bp, Salmonella enterica
atgacacgtgaatatgtaaagaaaatcaaatacccatgtgaaacagcagccatctttcaggatgttgtttttgtgatgcgagtaaatgacgcgacagagcttcttagtgccgccgacagagctgcagaattctatctgagctatttcccattttgcgaacttgaagacgtaagggagggggttagatacagctttggcggcctgtatttgagggacgatcacattattagggaggctgcatga

SEQ ID NO: 372650 - DNA, 183 bp, Salmonella enterica
atgtgcagcataaccagcattaaccaggcaaaacagcagcgtgaacgtgacgaagctgaattgcgcagcgtcagagagatgacggagcaacaccagaaggcgatggattatctgcatgagcgagagcgtgaactggtgaaccggcttggattgaacaagcaggcgggaggcgatgctgcatga

SEQ ID NO: 372651 - DNA, 471 bp, Salmonella enterica
atggcgctaaagagagataagtttgatgacgttttctcccaactggtgagggagcgaacggactggatctgcgattactgcggacgaacattccaccacgaaagacaaaaactccactgctcccacttcaaatcccgacgacacaaagcaacccgataccatccctataacgccttcgcccactgcattggctgtcaccgaaaactcgaagaggacccatacgaattcaccgcgcatgcggagattgtctatggggagatgacaatagagcgtgtagcgcgtctggcatgcattcctgtgcgcttaaagccttggcagatggatgagatataccagcacatgaagagcgaactgaagcggttacaggagctaagggcgcatggtgttacagggcgcatcgatttcacattgccagactggtatcaggacggaattcaactccgcatgggggaatctcaatgtgcagcataa

SEQ ID NO: 372652 - DNA, 237 bp, Salmonella enterica
atgaatagcgtcaagccatattcaccgagggagcaggattacatcaggcgcgtcgccggtaaggttccggcagaagtaatggcggcggcacttggcagaaccagaaacagcctggttaactgggctaatcgacatggaataagcctgagggttccttacggaatacttaaaaagcactggcctgaatatgctgaaaaaatgacaaaagggggacgcaatggcgctaaagagagataa

SEQ ID NO: 372653 - DNA, 177 bp, Salmonella enterica
atgcttagcccaactcaaatcatgcaataccagaaagaaagcgtcgatcgagctttaacgtgcgctaactgcggtcagaagctgcatgtgctggaagttcacgtttgtgagcactgttgcgcagaactgatgagcgatccgaatagctcgatgcacgaggaagaagacgatgaatag

SEQ ID NO: 372654 - DNA, 402 bp, Salmonella enterica
atgcttttaattcaaccaggatttggcctgagcatcaaaaaagggcacatgtttggcgagaaagagtctcaacgaaaaatggtgtctatccggttgccatttatcagtatttattggctaaacagggaggcaacaaattattggtatacatgcgcgcgtgccgcatttaatgaccctgactggtttattgaaaaccatcatgcagttcgtcaggcgaaacgaaaatccaccataacaaaaatgaaagcgtatcgggacgcttgggaagaacatagaaatcgataccaaaaggacattgaaaagctggaatcagaaaacactgagctaaaacgaagactaggggaagcgaaaagggatattgatgcctataagcggcttgtaggtggtgatagccatgcttag

SEQ ID NO: 372655 - DNA, 423 bp, Salmonella enterica
atgcaggagttcattctgcacgaaactaataaatcgcaattctggttagttctgaagcaaatcctatctaccggcaaacgctggcacataaaaatctccgagtaccgcgaaaaacggtccctacctcaaaacagcctcatgtggaaatggaacacggaaatagcagatcagttgtctgctacaggcgttgaccgtttcaccgacgaagaagtccatgaatggctcaaggacatgtactgcccggcaacgcctgtaaccgtttttgggatgacgcgctatgtaaagtccacaagacaactggatatcggagagatgcataaatatctgacagatattgaccagtgggcgcatcagaagggattgcgactaaccattcctgacaattgcgagtacctggatttaaagcggagacaagaggagtga

SEQ ID NO: 372656 - DNA, 201 bp, Salmonella enterica
atgagcgagaaaaccgtaactctaacgcgcagacaatttcgacatctatgcgacgcgctaatcaacactgtaaacatggggcagcaattcatggctatcagcactgacggaagtgaaatgtcagacaaggctttctaccaggctcagttactccggcaggctattgaacgtcaattaaaggtagctacagatgggaggtga

SEQ ID NO: 372657 - DNA, 282 bp, Salmonella enterica
atggacgaatcaagaaagcagtttgaaagcgtaataggcggaaaaggctggtttattcagaaaaccgatagcggaagttatgtgcatgaaagagttcatttgatgtggatggcgtggagagagtctcgcgcagctatcgaaattgagttgccagcaaaaaatgatatctccagcgatgactaccccattcctgacctggttgattgggatgatggaagaaacgctggaattcaggaatgcgcagaagccatccgcgccgctggaatcaaagtgaaggagtga

SEQ ID NO: 372658 - DNA, 273 bp, Salmonella enterica
gtgaaggatttattagtaacactaaatgttggcttaagccttcttggttacgcctacattatgtttaaaacaggccagtggattattacaaaggcacttaaacagtgggataagcgtagaaaagtgtcagcaaagcagaaggcggttgatgcgctatatgaagcatacgaactggataaggtaagcgaaggagatactgtaaaagtggcgacaaaagaaggtctgttaatcatgatttgcagacatgaaaagactaataccatagcacgctga

SEQ ID NO: 372659 - DNA, 1377 bp, Salmonella enterica
atgagacaggatatcgaagcgagcgttatcggtggcttgctgattggtggattaacaccaaccgcaagtgacgttctggcaacactggagcctgaagcattctcaattccgctctaccggaaagcttttgaagttatccgaaagcaggccagaaacaggaacatgattgatggtctgatggtggccgaggagtgcggggatgaatacgcaacggcggtgatgatgactgcgcggtcatgtcccagcgctgcaaacctgaaaggttatgccggaatggttgcagacagttatcaacggcgtcaggttttacagctactggatgagatgcgagagccaatcagtaacggcacgctggatgcttcaggcagcgcgatggacgagcttgtaaagcgcctgtcagccatcaggaagccgcgtaacgaggttaaacctgtgagactgggggaaatcatcaatgactacactgacacgcttgacaggcgtctgaggaacggagaagagtcggataccctgaagacaggaatcgaagagcttgacgctatcaccggagggatgaacgcagaagaccttgtgattattgctgctcgtcctggtatgggtaaaaccgaactggcgctaaagatagccgaaggcgtggcaagtcgtgttattcctggttctgacgtccggcgcggcgtgttgattttctcgatggaaatgagcgccattcaggttgttgagagggggattgccggcgcaggaatgatgtcggtgagtgtgctgcgtaacccgtcacgtatggatgatgaaggatgggcgagagttgcaagcgggatgaagttgctggcagatctggatgtgtgggtagttgacgcgtcacgtttgtctgtcgaagaaatcaggtccatcgccgaacgccacaagcaggagcacccgaatctgtcactgattatggctgactatctcgggctaattgagaaaccaaaagcggaacgtaatgatctcgcaattgctcacatctccggtagcctgaaggcgatggcgaaagacctgaaaactccagttatctcactaagccagctttcacgcgatgttgagaagcgaccaaacaaacgcccgacaaacgcagatttgcgtgattcaggaagcattgaacaggacgcagactcaatcatcatgctctatcgggaagcggtatatgacgagaacagtagcgccgcgccatttgctgaaatcatcgtgacgaaaaaccgttttggctcgcttggtacggtttaccagcggttctgcaacggacactttgttggatgtgaccagaacgaagccagacagatttgcacggcatcaaatgcacctgctggacgcagaaagcgatatgcacaaggggctgacgtatga

SEQ ID NO: 372660 - DNA, 861 bp, Salmonella enterica
atggaaaaccaaaagcaggggcatttttccttgttcaggagtcttctgtctaaggaatgggcaaaggatacagcaaaacttgcgatgtggattcgtctcattggagaggcttcctacaaacatcgcacagtagagttttcaggaagagaatggaatcttaatcctggcgaactagttactacagcggcgattatggggcgtaaattacgcgatcaggatggtcatgaaaaaagccctcaggcagtgacaagaatgattaatttctttgccagagaggggatgattaccacgaagggcactcggtttggaactgtgataactatcacaaattatggtcaatatcaggaaatttcacccgatgaaccacgcgataaaccatccgataacaacaaacccagcaatggcgcggctttgaagcattcacccgatgaaccatgcgataaaccatccgatgaacagaacaagaaggtagttaacaagaaggtagttaacaataataaaacccccctaccccccaatgggggtggtgatgggcaggttaaacctgaacgtcgcaaggcagaacgcatcgactacgaatccttcctgaacgcctacaacaccgaagttggcgacagacttccacacgctgtttcggtcaacgagaaacggaaacgccgcctgaagaaaatcatcccgcaactgaaaacgccaaacgtggacggtttcagggcgtatgtcagggcgtttgtgcatcaggccaggccgttttacttcggagacaacgacacaggctggacggctgattttgattacctgctgagggaagattcgttaacgggagttcgggaagggaagtttgcagacagggggattgtatga

SEQ ID NO: 372661 - DNA, 261 bp, Salmonella enterica
atgcgaaaaaataccgaaatgcacaaagaagttaagcgaaatcgcttccttcagtccattgattctaaaaccgcaatgacgttttccagcgtggctaagtttgaacttatgaagtctgagacaaaggcgctcctgaaggatttgcctgtagaaaacgggtatacgttcatcccaaattctttcctcgaaagactcctcaagcaagaattctcggtggatcaattcagcgaaatcctgaaagtattccgtgagggtcgatag

SEQ ID NO: 372662 - DNA, 279 bp, Salmonella enterica
atggaactcacaagcactcgcaagaaagccaacgcaattaccagcagcattctgaaccggatagctattcgtggtcagcggaaagtcgctgatgcgttaggcattaacgaatctcaaatttcacgatggaaaggcgatttcattccgaagatggggatgttattggcggttctggagtggggtgtcgaggatgaggagttggcagaactggcaaagaaagttgcgcatctgctgacaaaagaaaagcctcaagactgcgggaacagttttgaggcctga

SEQ ID NO: 372663 - DNA, 225 bp, Salmonella enterica
atgaatttagttattcagcgagccttaaatatcgtcggaagccaaaagcggttagccgatgaatgtggtgtaacgcagccagcagttcataaatggcttaaaggtgggatggtatctcctgagaaggtatccgccattgttaacgccactggtgggcagatcaaggcatatgagatacgccctgacctaccacacttgtttcctcatccgaatcaggccgcgtaa

SEQ ID NO: 372664 - DNA, 714 bp, Salmonella enterica
atgcatatgaaaacttttgctgacagacttaacgccgccatgtctgcatctgggctatcgcaagctcagttggcagaaaaggtaggaatatcgcaaccagctatccaaaaaatgtcctcaggcaaaaccaatgggacaagaaagatggttgagttagctaatgccttaaaagtacgccctgaatggttaagctcaggggttggtgatatgagatatccagaaggaccagaaccatcaaatatccgagaatcttcccttaaggctactatttgggaggatatgaacagggactctgaggagtttgttgaaatccctttattaaatgtttctctttctgccgggaatgggagttgcgagttggaagagtcttcagattttgctttggtattccgtcgatattacctcaaaaaaatgggcgttccagagagcgctgcaaaattagttcgggtaagcggtcaaagcatggagccaactttaaacgatggagatgttgttggggtaaacacgcaggacacaaccatacgcgatggcaagacctacgcaatttgtcaatctgatctgctgcgagtaaagacactgatagctactccaacatcagtaataatcagatcgataaatcgcgaggaataccctgatgaagtgctggagagagaagacttccacaaaaacgtaagagtcattggaagagtgttctggtcatctcatagctggtag

SEQ ID NO: 372665 - DNA, 1020 bp, Salmonella enterica
atgaagaaatatgctatatggaacaacaagggaggaacagggaaaacaagcctgtcatttcaagccatttgcagatatgcagaaattcacccgcttgagcgcgtgttggttattgatgtgtgcccacaggcaaacttgtcagagcttttccttgggggattaatcggtaatggaagcataaacttattgaccaggcatgatataaataatagatgcactttgggtggttacttccaaatgcgcctaccgacgccttatcaaaaacctatttttgatgcccacgattatttgacgcacccaaaaaaattcaacgaacatattccagccaatatatcactgatatgcggagacccgcttcttgagcttcaagcaaacgctatcaacactcttgctaatcagcagattcctggaacaaatgcatgggtaagcatcattgattggattaatgatctgattaaagatctaaatgatgagtacgatgttttgtttattgactgtaatcctagtttttcaatttatactcaaatagcattagctgctgtagaaaagctcatcttgccagttatggctgatgattcctctcgtcgtgccattcaaaacgctttctctttgatttatgggttaaaattgccatctgacatctatgcctcctacgcatttgcaaacaaacttactatggtaagtagaccactaccaaaagtgcatatgatcgcaaaaaaccgtcttacacagtatatggggcctgcatcagcctatgccgcagttctgaaatcaatcgataatgatattcagcaactattactgagcaacccagaaattttcgacttcgaaaatgttgaagagggagtggtaaatattaaagattttcagacaactggtgttgttgcctttgctaaagggtgtccattttcgatcctcccaacaggcagtgtacgagttatgaacaggagggtaaaagttaatgccccatataaacaatcttgcctagaggccattgataaaatggtggttaaactataa

SEQ ID NO: 372666 - DNA, 210 bp, Salmonella enterica
gtgaaaaacgaggaactggcgcagttgcgctatcaggaaatgtgcaggattgtcggtgatgtcgtttttgctatggttgcggaggggcatgagaccaaaagagtagctatagctgacgttattcgtacggagatagcgaaaggtctggataagtgggatgacgaccagttgcagtgcatgaaacttgctgtgaagctactggaagagtag

SEQ ID NO: 372667 - DNA, 363 bp, Salmonella enterica
atgacacgcagaacagctttcaatggttcagcagcaggtcgtcgccgcgaacgtcgcgctgcgcttcagaatgagactacagccagttcagaagtattacaccgccctacccttagccgggcccagattcaggccaaaggaaaacatgaaacgccaaaacgtattgaagacgcaaaatcacttcagttcatggcgaaagatgcattctggcaactggaagaatacagacgccatctggagcgggctgccattgtatacgcaaatgagtttggacataagccaccagaaactggcgtgtgtcttccagacgtagcgctttacgcagcaggtcatcgtaagtgcgggcaaattaccgctagataa

SEQ ID NO: 372668 - DNA, 714 bp, Salmonella enterica
atgaccaaagaaattgtgacattcaagggatttaacaaagacctaaagtgccgtggctttcagtttgcaatcggtgaaaccttccatcacgatggaaaagtagaggcttgcggttctggatttcacgcctgtgaatgtcctttcgatgttttcagttattatccgccggcagaaagccgctatgcggaaacaatatcttttggtattacagacagtgaagaaggaggtgacactaaaatagccagttccagtatcacaattaaggatgagttaacgcttcctcagttcattcaacgtggtatcgaatggatttggagcaagatagataagtctcttgagcagcagatcatgtgtggcaaccggtcagcggcaaccaacactggctaccagtcagcagcaaccaacactggcgactggtcagcagcaaccaacactggcgaccggtcagcggcaaccaacactggctaccagtcagcagcaaccaacactggcaaccggtcagcagcggaagtgtctggatcgcaatccgtagcggcatcactcggaatagaaggaaaagccagggcatctgaaggcggagctattgtgctttgctatcgagatgaagatggcgagttaattcatattcgagcaagcaaggttggcgagaacggtattatgccgaatacatggtatcaactggataaagatggtgagtttgtagagtgtgagtga

SEQ ID NO: 372669 - DNA, 159 bp, Salmonella enterica
atgacatttgctatcgcgggcggtgccgtcatgggtatcgcccaacttaatgaatcacttttagagcgtataaccagaaaattacgggccggatggaaacgtctcggtgaaattcttaatcagccaggagtgccacgccatgaccattacgcctgttaa

SEQ ID NO: 372670 - DNA, 189 bp, Salmonella enterica
atgaccattacgcctgttaatggaacaattcttgttcagcaaggaaacagggagttcaacaagctatatgagaaagtatttccggatacaaaacagggaatgtctgatgcgtatacatgggctgccggaatagctcttggttgggataagtggcaggacgaagaatgggaggcgcgtcatgttgcatga

SEQ ID NO: 372671 - DNA, 144 bp, Salmonella enterica
atgttgcatgattttgatgatgaagaatttattgctctcatttctcctgaaattgatgaggaagtggagcagcaaattaacttagccgcagaacggcagaatccggttattagctgggatgaatttgcggggtattactcatga

SEQ ID NO: 372672 - DNA, 708 bp, Salmonella enterica
atgaatctggatcagttagatgaaccgttcgcagctgaagatattgagtggcgaatacagcaaagcggtaaaacacgcgatggcaaagtgtgggctttggtgctggcttatgtcacaaacagggcaatcatgaaacgcctggacgatgtttgcggcaaagcaggatggcgcaatgaataccgcgatattcccaacaacggtggcgttgaatgcggcatatcaatcaagattgattccgaatgggtaactaaatgggatgctgctgaaaacacacaggtagaagccgtcaaaggtggccgctccggcgcaatgaagcgtgctgccgttcagtggggaattggtcggtatctgtataaccttgaggaaggttttgcgcagatatccagtgataagaaacaaggatggcacagggccaaactgaaggatggaacaggattttactggctccctccatcgctgccgggatgggccatgccagcatcaggcaatcaaccattaccagaaaataccaaccagaaatcaccatcggttgactgcgagcaaatcctgaaagacttcagtgaatatgcagcaacagaaactgacaagaaaaagctaattgagagataccagcacgactggcaattaatggatggtaacgaggaggcgcaggctaaatgcgttcaggtaatgaatatcagaataaatgagcttaaacaggtggcttaa

SEQ ID NO: 372673 - DNA, 294 bp, Salmonella enterica
atgccagcgcctctatatggtgcggacgacccgcgtcgctgttccggcaaatccgtctcagaggtgctggataaattcagaagaaactacgacctgataatgtcactaccgcaggaaacgaaagaggaaaaggaatttcgtcactgtatatggcttgcagaaaaagaagaacgcgagcgaatttaccagacatccatccgaccattccgcaaagcaacatatacaaaattcattgaaatcgacccgcgcctgcgtaattaccgctcacgttatggcgcaataagtaatgactga

SEQ ID NO: 372674 - DNA, 171 bp, Salmonella enterica
atgagaggacttgcatacaatcccgacattctaccagccgaacttattattaggcacaaaattaaaccaatgcctacacgcgaagaattattgcagcgcaattcattcccttctattaacgagaataaatatttgaatgcgatactgaggaaagataaatgcaagaggtaa

SEQ ID NO: 372675 - DNA, 693 bp, Salmonella enterica
atgcaagaggtaaaaatttacaccgcgtccccatctgatttatctccaccggtacagtctgaatcgttctgcgttgacatggttctggcgtctgattatgcggagcttgaggctaaatacgcggcgctggctgatttatttggtgatgtgaaagagatttttggttttaagtatcgctatttcatttcctcaaaggggctaattttctcaatggcttctggcaagctaagacagttaaacccttctatgcgcggcaagaacagaaatcagtatttgttcgttaggctggagcttgaaggggaactgaaaggcgtgaacatccaccgattagttgctgaaaacttcatcgggcctaagccatctgatgagcacgtaattaaccataaagacggcaacaaacaaaacaatgatgcatcaaaccttgagtggacaacgatagcgggtaacactcagcacgcatatagaactgggttagccggaggaagaaagcacggttcgtataaaggcccagtttgtgcagagaatgaggaaggttttgggtatgtgttctttgatagcaaacaggctattgaggctggctttaacccaaattcaatcagggacgctgtagttaagccatggaagaaattattcggattctattttagccgcatcaataacacaggccaacttcgcaaaggcggtgcagcatga

SEQ ID NO: 372676 - DNA, 402 bp, Salmonella enterica
atgagcattattaaaggtcagcttatcagcagtcagcgctacctcgacaaggcaaaggtaaacgacagagcggcaagatttaagcgttttatcgtatctgtttacccgatagttctgcgtgggcagcaatacaccatcctgatggatggccaccacaactacgcggcggcaaaactggctggcatagaacctgattaccgaccagtcaccaaaaaggtgcagcgtattctcggtgagatgtcatggcgcgagcgcgaggcattcttcatcaacaacgttacagacagcaactactactttgttgaaacaggcgaagtggttcatgagttggttatgcctgacacgtcctgcaaattccaggcgcacgcaggtaaccaatggatttttgggggtacagcatga

SEQ ID NO: 372677 - DNA, 339 bp, Salmonella enterica
atggatttttgggggtacagcatgacaatcgacaaacaggcgctgcgtattagtgagcttgaagaactcaacgagctgctgcgtgagaaggtcaaaaaacttgagtctgacctgtgggacaaagaacagttacgccatgtttacagcgaaaaatcctttgatctccaatgcaaggttcgtgaactggaggcgcgggctgtcaacttaccaaaacgcagcgttggtgaggtcatgcacctgagcggattcagccgggattacgccgagggttggtgtgctggtaatgacaatgcgatacacgaaatacgcgccgctggcatcaaggttaaggagtcgtga

SEQ ID NO: 372678 - DNA, 756 bp, Salmonella enterica
atgattcactatcatggcggacctattacccctgatacgtgtgctatgaaggcatggaaaggacgccatgcgtttatcagtttcgcgcattccggacaaattaacctcgcggctgaatactgccagtcattcgcgctggacaacggcgcattcactgcatggaaagcagccggtaaaaacaaaatcgactggagcgattattacgaatttgtggcgcgctggaaaaatcaccctggattcgattttgccatcatcccggacgtcatcgacggcggagaggatgagaatgaagcccttctggatgaatggccgcacggggaattttttggtgtcccagtatggcatatgaacgagagtgacgagcggtttatcaggttgtgtaacgaatatccgcgtgtagcgataggaagttgtggagactatgacgttaagcgcccaaaccttgctgttgccagaatgaaagacctgattcgccacattattgacgttcatggaatgccggtcacgaagttgcatggattgaggatgttgaacccgctaattttcacaaagctaccattagccagcgcggacagcacgaacgtcgcccgtaacatcggaatagacaaagcatggtctggtgcttacgcgccagcttcaaaggaaacccgcgccgcattaatggttgagcgcattgaatcgtataacagccccggttctctcgcgtattgcgaaaagcgtgaccggttcaatatgcaactgcaattggcagtttaa

SEQ ID NO: 372679 - DNA, 690 bp, Salmonella enterica
atgaccactattaccagagaacagctacacgaacgcgcacgccggaaagtgaaagaattggaatttgccattacgcagagtgcatttacatctattcgtgatggtctgaacgatgaattagagctggcgcgtatcgcgctggcagcgctggaggctgcgccggagccggttgtgccagagtccatcagtgttcggcaggccatttctgctcttgagagcgcagattgtgtaacgactattggccaggcgtacaaaatgggatggaacgcctgtcgtgctgccatgcttcagggtagccaacctgtaagtaatcgtgatgagttgcaggtaatcggctggttgcgtagtgactacaacagcgacgacaaacgcgatcctgacgctccgctatttatgttgggcagtaataacccgtctgaaacgtggggagtgaaatatatgcctctaactggcaactctccggtaactccggatggctggataagctgtagtgagcgaatgccgaacgataaagactatgtttggtgttgggggaagtcttacggctggactgagtgcgataccttcgaagggtattacgattggtcgagaaacaaatggtgggcagttactgacgatgtggaagaaccggcatcgaaagtaacccactggatgctgctaccagaaccgccgcagcaggaggtgaagtag

SEQ ID NO: 372680 - DNA, 273 bp, Salmonella enterica
gtgaatacctcagtaattcgaacatacacagagcagcttgagtccaccatcgaaaaaggcgttgagttacgagactcaatgcgtcaggagatatcccgactcgaacgacttgttaaagctcagaagtctgaaatcaccaatgcggttaatgccaaggagttgtaccagcgcaggcttggtaattacaaaaagcgtctgatagttgagcgggagaagcggaagaaacttgaaggtcagattatcaagctaaagcggaagatgagtaatggctaa

SEQ ID NO: 372681 - DNA, 204 bp, Salmonella enterica
atgcgcgaattacgcgacgactcacttgttgacttaaagttcatgatgaaggattctggcatgggcaagaccttcatttactcagaaattaagaaaggccggttgcctgtccctcacaaaatcggtagcgcatccagatgggtttatgccgactatcaaaactggaaacgcagccacttctcacccattcaaaatgtctcatga

SEQ ID NO: 372682 - DNA, 2007 bp, Salmonella enterica
atgaaggggagattattgcaacggcttcgtcagctcagtatcagcaacagtttacggggcgcatttttaacgggcgcattactgacgctgattgtcagtatggtcagcctttattcctggcatgagcaaagttcgcaggttcgctattcgcttgatgaatattttcctcgcatccactccgcttttttaattgaggggaacctgaatctggccgtggatcaactcaatgaatttttgctggcgccgaacacgacggtacgtttgcagttacgtacgcagattattcagcatctggataagattgagcatctcagtcaggggcttcagcttgctgagcgccggcaactggccgtcattttacaggatagccggaccttgctggcggaactggacaacgccctctacaacatgtttttggtgcgggagaaagttagcgagctttccgctcgcattgactggctccatgatgatttcaccacggagctaaattcgctggtacaggattttacctggcagcaggggacgctactcgatcaaattgaggcgaatcagggcgacgcggcgcagtacttgcaacgttcgcgcgaggtgcagaacgagcagcagcaggtatataccctggcgcgaattgaaaatcagattgttgatgacctgcgcgacagattgaatgagctcaagtccggcaataatgacgggatgctggtggagacccatattcgctatctggaaaacctaaaaaaaacggcggatgagaatattcgtgcgctggatgactggcccagtacgatcacgctgcggcaaaccatagacgaactattggaaatcgggatggtaaaaaataagatgcccgataccatgcgcgattatgttgcggcgcaaaaagccttactggacgccagccgcgccagagaggctacgctagggcgctttcgcacgctgcttgaggcgcagttaggtagtagtcaccagcaaatgcagacgttcaatcaacgcctggaacagattgttcgcgttagcggcgggcttattttagtggcgacgctcctggcgttgctgctggcctggggactcaaccactattttatccgttcccggctggtgaagcgttttaccgcgcttaatcaggctgtggtacagatagggctggggagaaccgactcgactatcccggtttacgggcgcgatgagctaggacggatagcccgtttgctacgtcatacgctgggccagctcaatatgcaacgcaggcagcttgaacaagaggtcgccgagcgcaaagagatagaagccgacctgcgcgccatgcaggatgagttgattcagacggcgaaactggcggtagtcggccagaccatgaccacgctggcgcatgaaattaaccagccgctgaatgcgctttcaatgtatttatttacggcgggacgcgcgattgaacaaggtcagagcggacaggcgagaaatacgctcaccaaagcggaagggctcattaaccggattgacgccatcatccgttcgctgcggcagtttacccgccgggcggagctggaaacgccattgtatcccgttgatctgcgccaaactttcgtggcggcatgggagttattagccatgcgccaccaatcccggcagggagcgctttcactgccaaccgacaccgtatgggttagcggcgatgaagtgcgtattcagcaggttctggtgaatgtgctggcgaatgcgcttgacgcctgttcgcatgatgcggcgatcgcggtgacgtggcagactcagggagaggcgctggaggtttatattgcagataacggccctggctggcctgtggcgctgttgccctctttactcaagccgtttaccaccagtaaagctgtcgggttgggtattgggctgtcgattagcgtgtcgctgatggcgcaaatgaagggcgacctgcgtctggcgtcgacgctgacgcgtaacgcttgcgtggtgctgcaattctcggtaacggatgtcgatgatgttgaatga

SEQ ID NO: 372683 - DNA, 1275 bp, Salmonella enterica
atgaacgggatcacaaatcgacttttctcatgctgtagtcgtttcgccagagtgggcgcttttacgctatggctggcggcgatgttcggttcttgccaggcgtacagccgcgagctggtgatggcaacgaccttttcacccagcgcgaccgcctggattatccagcgctggcagacggagccgggttccgtcatgattcgtacgctcaaccgtaccagcggttctttagagcaattacttgatacggcgaatgcggaaaatgtcgatctgatcctgacgtcatcccccatgctgttgcaacaccttcaggagcaccaaaagctggcgctattggatagcgcgcctgccgccagccagaagctggtgccgcgttctatccgctcaacttcagtggcggtagcggtatccggatttgggctattgatcaatcgttcagcgctcgctgcgcgccatcttccgccgcctgccgactggcaggatatgggcctgcccagttaccagggcgctctattaatgagcagtccgtcacgctcagacacgaatcatttgatggtggagtcgctgttgcagcaaaaaggctggacggcaggatgggcaacgctgctggcaatctcgggtaatctggtcacgatttcctctcgcagtttcggcgtagcggataaaattaaaagcgggcttggcgttgccgggccggtcattgataactatgctaatttgctacttaacgatcctaatcttgcttttacctatttcccatattctgcggtgtcgcccacttacgtcgcggtgttgaaaaacagccgtcatgcagacgaagcgcgtgcttttattcattacttattaagtccgaaagggcaaaggatactggctgacgcgaataccggtaagtatcccgtcgcaccgcttagcgccgataatcctcgcgccgcgcaacaacagcgtttgatggcccagccgccgttgaactatcgtctgatcctgaagcgtcagcaactggtacaacgcatgtttgataccgcgatcagttttcgtctcgcgcagcttaaagatgcatggcgagcgttgcacagcgcagaaacgcggcttaaacgccccttacctgaaatcagagctttattgaccagcgtcccggtggatgcggcaagcagtgaggatgaaacctggctggcgcagtttgataataaaagctttgccgaacaaaaaatgatggagtggcagatctggtttctgaacaatcagcggctggcgattcacaaactggaagagctgaaatga

SEQ ID NO: 372684 - DNA, 1302 bp, Salmonella enterica
atgtccggaacgtataatgctactattcgccgggtggtggtttccgcctggataggaaactccattgaatattatgattttctattatacggcctggcaagcgcgctggtatttggcccgcttttttttcctggcgccagcccattgactgcaacgttatcttcttttgccagtttcggcgtgggatttatctcccgaccgctgggcgcgctattttttggcaacaggggggatacgcttgggcgtaaaaacacgttattaatcacgttaggcgggatgggcgcggtcacgtttctcatcggttgcctgccttcttacgccagtatcggcgcgctggcgcctgctttactggttattctgcgttttctacagggatttatggttggaggtgaatggggaggcgccatgttgatggtcgtggaatatgctgctggaaagcaccgggggcggttaagcgcgctatcgcaaacaggaggactcacgggacaattattggcgacaggcgtatttatagtcgtgacccaattaccgaaggaggcgttgttatcgtggggatggcgtattccttttctgctcagtgcgcttttggtgttgcctggattatatatgcgtcatcgtctggatgagacgcctgtcttccgtgcgtttaaaaagcagcaggccattaatcataggcagcaaagagaagaaaggccggtggtcaaagtagtacgagaacaatggcgcagcattttgctgattataattctgcgttttgcggaaagcgttcccttttttcttgccaccgtcttcgcggtttcctgggcgacgacgcagcttgggattgccagcctgactattctgtacattgtaatgttcacctgtctgctggcgtatcccatgcacgtgctatttggcatcatgtcggatcggcgtggctgccgtcaggtgtatattttcggcgcgctttttgtcgcggcaatggcttttccctttttctggctgctggaaagccgttcgctcatactgatgacaatgggctacgttctgcttattaacattggtcataattcactgaatgccgtgcaaccttcttttttcgccggactgtttcatccgcctgtacgctacagcggttcatcaattggcgctcagttgggggcggttgtggcagggggattcacgccgtttatcgctaaagcgttaagcgcagtctatgataacagttggactttggttgccggttatgtcgttttgactgcgctggcttcggcgtttgcggcaaagattgcgccggaaaccgtgttaccgcattcgccgtaa

SEQ ID NO: 372685 - DNA, 387 bp, Salmonella enterica
atgtatgacaatctaaaaagtctgggcattaccaatcctgaggaaatcgatcgttacagcctgcggcaagaagccaataacgatatcctgaaaatctattttcaaaaggatagaggtgaattctttgctaaaagcgtgaagtttaagtatccacgccagcgtaaaacggtggtggccgatggcatcggtcagggttataaagaagtacaggagattagccctaacctacgctatgtgattgacgagctggaccaaatctgccagcgcgaccgctcagaactcgatctcaaacgtaagatcctcgacgacttgcgccatctggaaagcgtcgtcgcgaataagatcagtgaaatcgaagccgatctggacaagcttacccgtaagtaa

SEQ ID NO: 372686 - DNA, 2190 bp, Salmonella enterica
atggcgcgtcttaaaactgctcagccaaactcctcactgcgtaaaatcgcagttgtagtagccacagcggttagcggcatgtctgtctatgcacaggcggcggttcaaccgaaagaagaaaccattaccgtaaccgcagcgcctgccgcgcaggaaagtgcctggggaccggctccgaccatcgccgcgaagcgttccgccaccaccaccaaaactgatacacctatcgaaaaaacgcctcagtcggtttcggtggtcactaacgaagagatgcagatgcatcaattccagtcagtaaaagaagcgttgggttacacgccgggcgtaacggtaagcagtcgcggcgcttccaatacctatgacttcgtgattatccgtggcttctcttccgtcggcctgagccagaataactatctggatggcctgaaattgcagggtaacttctacaacgatgcggttattgatccctacatgcttgagcgtgttgagttgatgcgtggcccaacgtccgttctctacggtaagagcaacccgggcggtatcatttcgatggttagcaagcggccgactactgagccgctgaaagaaattcaattcaaaatggggacggacaatttgttccagaccggttttgattttagtgattccctggatgacaacggtgagttttcatatcgtctgacggggctggcgcgttcgacaaatgagcagcaaaagagttctgagtcgcagcgctatgcgattgcgccctcttttacctggcgtcctgatgagaaaacgaattttacgttcctttcttatttccagaacgaaccagagaccggctactacggctggctgccgaaagagggaacggttgaaccgttaccgaatggtaaacgcttgccaacagatttcaatgaaggggcgtcaaacaacacctattctcgtaacgagaaaatggtgggatacagtttcgagcatggcttcaacgacacttttaccgtgcgccagaatttacgttttgtcgaaatgaaaaccgcgcaaaaaagcgtctatggcacggggattgcggcggacggccatacgcttaaccgcggtactatcgttgacaacgagcgtttacagaatttcagcgtagatacacaactggaaagtaaattcgcgaccggcgatattgatcatacgttgctgacgggtgtcgatttcatgcgtatgcgtaatgatattaacgcgacgtttggtagcgcgccgtcaatcgatctctataacaattaccatcctgaatactttgctttcggcggcgctgagccgtaccagatgaacgaaagtaaacaaacaggcctttatgttcaggatcaggcggaatggaataagtgggtatttactctcggcggccgttatgactggtctaaacaagcgacaacggtgcgtcagaattccactacgccgacagaaggatatattgaacgtaatgaccaccagttcacctggcgcggtggcgtaaactacgtattcgataatggaatttcaccttacttcagctatagccaatctttcgagccaagcgccttcgatttgtggagcaccccacgcgtttcttacaagccgtcaaaaggcgagcaatatgaagcaggggtgaaatatgtaccgaaagacatgccggttgttgttacgggtgccgtttatcagctgaccaaaaccaataacctgaccgccgatccaaccaacccattagcgcaggtgccggcaggcgaaattcgtgcgcgaggtgtagagctggaagccaaagcagcattgacggctaacatcaatatgacggcgtcttacacttatactgatgctgagtacacgaaagacactaacctgaaagggaatacgccagagcaggtgcctgaacacatggcgtcgttgtggggcgattacaccttcaacgatggtccgttgtcaggtttaacgctgggaacaggcggtcgttttattggttccagttacggcgatccggccaatagcttcaaggtaggcagcgcagcggtgatggatgcggtcgtcaagtacgatctggcgcgttttggtatggcgggctccagcattgcggttaacgttaataatctgctcgaccgcgaatacgtcgccagctgcttccagacctacggctgtttctggggctcagaacgtcaggtcgttgcaacggcaaccttccgtttctaa

SEQ ID NO: 372687 - DNA, 297 bp, Salmonella enterica
gtggaacagcactaccccccgatggatatcagtcttatcagtctggtcgaggtgcattttgcatacggtaagccgctgcggctgaatatgactaatgtcagttcaggcagtaattttttcccgttgaacgtaatgacccgtaccgatgcgcctgaaaggtcaattaaccgcatttatcgtaatggcaattacgtcacgcaaatggatgccgttggcccggatgtctttaaactgactgttcttaacgcgaaaacaacggcagaacatgtcgtgggcgaagaaactgtcgaaacatga

SEQ ID NO: 372688 - DNA, 552 bp, Salmonella enterica; identical to SEQ ID NO: 369739

SEQ ID NO: 372689 - DNA, 870 bp, Salmonella enterica
atgagaccacgtcgcagtatgttgtttatccccggcgcaaatgcggccatgttgagcacctcgtttgtctatggtgcggacgcggtgatgttcgacttagaagacgccgtagcgttacgtgagaaagataccgcccgtcttttagtccatcacgcgcttcaacatccgttctatcaggatgttgaaaaagtggtgcgcattaatccactgaacacgccgtttggtctggccgatcttgaagccgtcgtgcgtggtggcgcggatatcgtgcgtctgccgaaaaccgacagcaaaaacgatgtgctggagctggaagcgcaggtcgaacggatcgaacgtgaatgtggacgcgcggtcggcagtaccaggctgatggcggcgatcgaatcagcgaaaggcgtggtcaatgccgtcggcatcgccacctccagcccgcgcatggtggcaattgcgctggcggcatttgattacgtgatggatatgggcacctgccggggcgatggcaccgagctgttctacgcccgctgcgcagtgctgcatgcggcgcgcgttgcgggtattgccgcctatgatgtcgtttggtcggatatcaataatgaagaaggcttcctgaaggaagtgcagttggcgaaagggcttggttttaacggtaagtccttagtgaacccacgtcagattgagctgttacatcaggcttattctccgacacgtaaagaagttgagcatgcgtatgaggtgattgccgccgctgaagaggctgagtctcgcggtctgggcgtcgtttcactcaacggcaaaatgattgacggcccgattatcgaccacgcgcgtaaagtggtggcgctgtcggcttccggtattcgtgattaa

SEQ ID NO: 372690 - DNA, 5586 bp, Salmonella enterica
gtgaataaagttgtacatttcttactgacattactgatcatgtttgcagtgtcgatcgcacctgcgcaggcgctattgaagggcggaacctggcaagagctgaactcagtcaccggtgcggttaacggcaccgcgccgctggccgacggcgctattatccccctttaccagggaagtacgctgcttgacccgagcaaaacccacgatattgaattcagcgccatgccgcgcgattttagcgcggatgctacctcaacctcgatgcgggcggtcaattccaccgataccgaaggcgatctctttagcgatccgcccaccatcgcctgggaaaaccgccagccgcccgccatgggcttggtatgggccgatgccgccacgcccgacacgccgctctcgccgcagccggttccgaacctgaccttttgcgcccaaaacctcgccgggcgacagctggtggcctgggcgcaggtggaagatgaaaccaacgttcccgcgctgtggctctttacgaataccggggtgccgaattatgcgaccattccgctgttaagcccgaaagtggcgctcaacattaaaccggccaccgacacgccggttacagtcagcggcgatcacgttgattcggcctttgaggcatcaaaagtgaaggtgggggaaagcatcaccctcaccatcgccaccaaagcgtgcgacggcacgcccgaaggcaacgcgccgtttgtcatccgccgtaaagatgcggaaaaccgccagggtgtggtcaataacgccaacccggttcgcgttggcgataccgagctcacgaccacccaaacggaatatcgcggcgtcactgacgccaacggcaacgccacggtggtggtcacccagaaggaaggccccggcgtcaaaacgccgctggttgtcagctcggtcaactttccggcgcttacggctgaaaccgccgtcattttcaccaccatcaccagtccagacagcgataaggccagtatgtacggccatatggtggagagcaccaccgcgacgctgaacggtataacctacacttttacccgcccgaagctggcggcggaagcgagcggcgcggatagccgcgtcgacgataccaacgaaacctgggcgcagtttacctggaacggcgccgataaccattgcaatattctgccggacgccgaacagctggtggcgttcaggcatgagcacagcacactggcgacgtacaccggctggccggcgacgggcgatgccgaatactggtcgtcgaccaaagatcagatgagcgactaccacgctgccgtacatatgaacagcgcgtcggtcgtcagggccgccaacagcgacacgctgctggtcagctgtgtggataaagcccagcctgcggcgcacccgcagattaccctctcaccgcaagggccgtataaagcgcaggtgggggacgagatcaatctgacgatgaccgtggttgaccgggacacgcaaaaaccgctgccttaccgctacatggagctgtttatcgatccggcgaaaaaccgcaaaggggagcatcaggacgcgtgggataaccagcgggtcaccgttgattctgaaggtatgagcgcctcgtcgccggagcactataccggcgtgactgacgtcaacggccaggcgcacctgacgttaaaacataacagcggcctgggggtcgaaacgcccatccgcatcgtgatgccggatgacgaaggcggcaacgtcgagctgtcctttagcgtaattttcaccgtggtcaccagcccggacgtggatggcgccaacatgtggggccatatgcgcggcgtggtggacgcgggcaacctgtacaaacgtccgctgctggcggtggaggccagccataaagacggccagttcagcgaaaataacgaagagtgggcgacgtttaactccgtggcgtcggccaccgcgcagtgcggtgtcggccaggtgccggatcagtcgtcgctggcgcatttgtacagcgaacatgcgggcggacagatggaaagcgagcacggctggccgactgaagattatttcatcgccgccgacaatgacgcctccgggacggtacacgtcaacctcgaaaacggcgatagcggcaaatttaccgatacgccgaactacctgacctgctcggccaacgaaatggtggcggtactggacgtctatttcaacgatgacccggcgactaaaaacgccgatatgactgccaaagtgggtgaacaggttaagctcaacatccattcgcgcaacgctcttaacgacgtggcaatcgccaataccagcttcaccatcaccatggcgaacggcagacggcgcgacgggctgacgaccggttttaccgataccagcaacggcgagatgcagtttgacggcgtcggctacgttgccgggcaggtttatcaggggatcaccgacgccaacggcgatgcgaccattatcctcacccaggataagggcgtggggctgctgacgcagttaagcatcgtgcccgtcaattcatacatcaatacgccggtttcccgcagcgtgaagtttaccgtcgcgaccagcccggatacggcaaaagccaaaatgtggggccatatggccgacacgattaccgtgggcgactggacctttgagcggcccaaactggcgggtgaagtgagcaacccgctgcgtacccaggacgaaagcaatgagacctggacgcgtgtggcccacaccgacgcggcgggcaatccggatgcgggcggctgcgcggcgaaccgcctgccgcgtatcgaccagcttgaggcgctgtataacgccaacagcggcggcaaaattaacggcattcagggctggccagtctatctgaactactggtcgtccaccttccagagcgccagcacgtggaaatggatcgcgctgaaggatggcaacgtctccgcgggcagcaccgactctatttacgccagctgtctggccagcgataacccggtgccagccgctatcaccattgaaccggtcgacccgtcgctgtggtacgacggcagcgacgtgcatgcggtcaaagtgaaaaagggcgacaccctacagctcaaggtgacggtgaaggacgccagcggcaacccgatcccggaatcgccgtttgtgctcacccgcggcgacggttacgatcgccgtggcgaaaagtataccgctcaggacgacgacgatctgcaaggcatcgtgacgcccgtggtgatcgacggcgaatcgctggcctggaccaccaccaaaatggggtcgctgaccggccctgacggcacccgcattattagcgtcacccgcccggacacccacggcacccgcaccgcgattaacgcgacgctgtatgaaaatgccgccgtgagcgccagcatcgacaccatttttaccgtcgtcaccagcccggatgtcagcgttgcccgcatgtgggggcatatggcgccatcgctgacggcggcggatggcgcggtgtaccagcgcccgctgctgtacgctgagctggccagtacggacaatactacgtctaagcaagaaaccaacgaaacctgggcggtttttcatgggccagccagtgaaggggcaaatccggcccgttgcgcggcgggctattaccctgccgttgaggcgctggattcgctctacagcaaatacccgagccgaacgataaataccgcccagggctggccggtctactattcttactggagcggatcgaactcgacgtcattttccagcggggcaaaacttgacttctattacgcagtcgatttggctgatggttcgcgtcggtcagaaagcagctcgcccagcactgcctggcagtaccaaatttgcgccacgacgccgctgccgcaggccacgctgattaccctcacctccccgcaggcgatggatgacgctattcaggcggtaaaggcgaaaaatagcgagtcgatcccgctgctcattaccactaccgatgcgatgggcaacccggtgccttatgcgactttttcgcttaaacgcgacgccgggaaggcgcgcaaccctgactataataaatttgtagccactaacggcaccaacatgacggtgacgccgctcaccggtgcgcagcaacagttttactatgccacatcggttctgaccggtgccaccggcgcggatggtacgctggccctgacgcttgccgaacccggcggcatagggttgaaaaaccagctgaccgcgagtctgtacgatacgccgacggcgacctcatcgctgccggtggtgttcaccgtcctcaccagcccggacagcgacaaggccaacatgtacggccatatgccggagaccttcaccgccagcaacggtgcggagtttaagcgcccgctggtggcaggcgagccctcatcggaggcgcacacggatacctatttcgaaaccaatgaaaactggatcatggtgaatagttttaataccggcaattacggcgggtgtccgatgaaccagatggctgcgatagatgatttcactgcgctgtacaacgatcacccaagcggcaaggtggcgaccgatattggattgcccgtcgggaagcggtggtgggcgggggatagcctgctgaaaggctcaaccctttactggcagtataaagatctcaagacggggaaaaactacagcatgtcggaaaacccgggtaactactacttacaactctgcctgacaacatcgcgcagcgggctgaatatcgcgctctcttccgacgcatggaacgccgataaatcagcggctgtggcgaaaaaaggcgaaacgataccgatgacggtaacggtgactaacgacgccgggcagccgcaggccggggtggccgtactgttgacgcgtgaatactcttattcgcgcggtgcggtggataagcaatacattgaaccaggcgtgattggcgagccggttccgtttacaacttcgccggcgaatatgatgctgacgccggttgcacctgcgggtacggcagtggcgtttaataaccagaatggcctcagcacaaaatggtctggcttcaccggcgatgacggtaagttgcggtttacgttaactcaggataaatcgctggggttaaaaacgtctgtcacggcggcgcttgcgaatcaatttgatgaggcggcgagcgtagatgcaatctttacggtacaaaccagcccggatacgccgtatgcgtcatactggggtcatatgccggataccgtgcaggtgaacggcgttacgctgcgccgcccgtacctgaaagccgagctctctgccgcgccccgggatacctggccgtttaataatgaattctgggggacgaactattattatcagtccgaacacgtggaaacgtcgttgacgcatctttgcggatcgcaggaaaatatagcctcgctggacgatctgaaagcgttgcagagcgttatcggcacgttgcaatggccgacgacatcatcctgggactatgtgtcgcaagatgaaggtcaaagcaataagtactactgttcatttaacgaaacgaccggccagacaacctgtactcgtgaaaaagcgacgacctcgggcttaggctcgtgccgggtgccgtag

SEQ ID NO: 372691 - DNA, 6153 bp, Salmonella enterica
ttgaacaggacctacagtattgtctggagcgccgtgcgaaatatgtatgttgtggcttcagaactggcgcgaggccacagcaaagttaaagcgcaagtatgcgtgagtgaaacccattccccaaacaaaaagtccgaatatggacaaataataaaagcaacgcgcgcggcgctggcttgcgtcgtggctgcggcgctcggatttttcagcccgctggctatggccgataatcaggtgtcatatgctgatgcgcagccccacgttctggatgagtcaacgccggcgatgacctattcgggagttgaggatggcgcggcactgtatgtctcgggtgtcgccaccgtcggctggcaatccaccacggtcaaagggacggggctcgtcattgaaacgaccggaggcggggccaatgctccggatggcggtaagtatgtttccaaagccatttcgatagatcattatgccatccttgagcttaccgacacggagataaccactgatagtatttattcgctgggtatttccgcagcggatggcagcacactgacgttaacggacagcacgctgaatattggcggcaattacggcgtaatgacgttgtatacgggttcagcagcgacactgaacaacaccaccgttgaggcagctaacagcagcagcgcgcaggtgcaacaaggcagtacgctgaacgtgctggacggtagcacaatcaccctggcgcaaggccagataaacgttgttgccggaaacaccgcgacagacgagggttccaccctgaacctgtctgatagctcggtcagctctgcaggtacgatgagcaccatccagggtaccaataaggccgctcttaatctcaccaacgcgaccataacacataccaatgccagcggcgcggcggtacaggccaataacgccactaccctggatattacaggcggcaacattacctctgccggtacgggcgtgtatattctggcgtcggacgccaggatcgacggcgccaccatcaacgccgacggcgacggtatctttataaccagcaaaagaaaactcgacgggtatgaggatctcaacgcgctgacggtcagcgacgcaaacgtcacctcaaaaactgtcgcactgaacattgatggcagcacgaccattaacgaccccattgagctcaccaacagcacctttacggcgccgaccgcgatcaaattaggcagcaaagcgactattcaggccgaaaaaacgatgctgaccggcaacattgtccagactgacgcgtcatcgtcatcgctctctttaagccaggggtccacgttaaccggtagtgtagatgcgatgtttactacgctgtcgctcgacgacaccagccagtggaacatgaccgacccgtcaaccgtcggcaatctgaccaacgacggcgatattacgctgggcaacgcgagcggttcgacaggtacgctgctgacggtggacaataccctgaccttgcaggacggcagccagataaacgcgacgctggataccgccaacagctcgccaattatcaaagccgccaacgtcacgctggacgggacgctgaaccttagctcaacggccacctttgtcgcgcccgaaaccgacgaacactttggatcgatcacgctgattgattcgcaaactgcgatcactaccgattttgacagcgtaacgctggatgccgacacctccgctatgccggattatctgacgatcaacgcgggcgttgatgcgaatgataataccaactacgagctgtctacgggcttgagttggtacgcgggcgcaaaatctgcgcgcgctgcgcatggcacttttaccgttgatgcaggcagtacctttaccgtcaccagcgaactggacgaaaccacggcgacctccgactggaacggcagcaagctaaccaaacaaggcgacggcacgctgatcctcagcaacaccggcaacgactacggcgatactgaaattgacggcggcattctggccgccaaagacgccgccgcgctcggcactggcgatgtgacgattgcagaaagcgcaacgcttgcgctgagccagggaacgctggataacaacgtcaccggcgggggccaaattgtcaaaagcggtaacgatgagctgatcgtgaccggcgctaacaactacagtggcggcaccactatttccggcggtacgctgacggctgaccatgcggattcgctgggcagcggcgatatcgacaacagcggcgtgcttcaggtcggcgaaggcgagctggaaaatacgcttttcggcagcggctcgctggtgaaaaccggcacaggcgaactgacgctaagcggcgataacacttactccggcggcaccactatttccgacggtacgctgacggctgaccatgcagattcgctgggcactggcgctgttgctaacagcggcgtgcttcaggtcggcgagggcgagctggaaaatacgctttccggcagcggctcgctggtgaaaaccggtacgggcaagctgacgttaggcggcgataacagctattccggcggcaccaccattactggcggcacgctgacggctgaccatgcagattcgctggggaccggggctattgccaacagcggcgtgtttaaggtcggcgagggcgagctgaaaaatacgctttccggcagcggctcgctggtcaaaaccggcacaggcgagctgacgctaagcggcgataacagttactccggcggcaccaccattatcggcggtacgctgacggctgaccatgcggattcgctgggtaccggagctgttgccaacagcggtgtgcttcaggtcggcgagggcgagctggaaaatacgctttccggcagcggttcgctggtgaaaaccggcacaggcgagctgacgctaagcggcgacaacacttactccggcggcaccaccattactggcggcacgctgatggctgaccatgcggattcgctgggcactggcgctatcgccaacagcggcgtgcttcaggtcggcgagggcgagctggaaaatatgctttccggtagcggttcgctggtgaaaaccggtacgggcgagctgacgttaagcggcgacaacagctattccggcgccaccactatcactgacggcacgctgattgccgccaacgtcaacgcgctgggcagcggcaatatcgacaacagcggtacgctgatgctggacgcggagggcgaattcaaccttgcgaatgtcgcgacccagtctggagcaacgactgagctggccagaggtacgacgctcaacgtcgactcgctgactcagcaagccgatagtacgctgaatattgacctcagtaaggccaacggtgaaagcgccattaccgccgacagcgtcacgctgggcggcacgctgaatgttaccggcatcggcagcgttacggacagctggacgcctgaggcatacacctacacgctgattggcagcgacagcgccattacgaccgatttcgacaatctgaccgtcgcgggaatgaatagagaagatgttgacttcctgactatcgacggaaaagtcgatgaagcagacaacacccactatgatctgacggcctccctctcctggtatgcgaacagagacaacgccactaccgacgcccacggcacctttaccctgagcgaccctgacggcagctttaacgttgcggctacactgacagacgttgatgatacgctggatccgggtagcagatgggacggtaaatcgctgaccaaagaaggcgcaggcacgctgatcctctccggcgacaacgactacagcggcggcaccaccatcaatgaaggtacgctggtcgccgccagtacgacggcgctgggcaccggtctggtagacaataacgccacgctggtgctggacgcagacggtgaagtcagcgcggtgggcggcatcaccactcatagcggcgcgacgacccaactggcgctcggcacctcgttggatctcggcgacagcgcgttaattcaggaagatggcagtacgctgaacgttgagctgaatagtgactcagtgcaaccgctgattaccggcagcagcgccacgcttggcggcgatttggtcgtcagcgacgccagcctgcaagcgcgcgcctccgacgcggagttccagtcctttaaactgatggatatggacagcgatatcagcggcgactttaccagcctgacgatgaacctcactgaccagccggactatctgaccgtaaccgggacaatcaatcctgaagatgcgtcagaatatctgcttaccgaagggctgagctggaatgcgaccgccacgtcagcgacgccagcacacggcacgtttactctgggcgcaggcgacagttttgaagtcaccagcgtactgggcgataaaaccggcaacggcgactgggacggtaaatcgctgaccaaactgggcgcgggtaaattgacgctgagcggcgcgaacacctacaccggcgatactaacgtacaggaaggcacgctgtggctggccggagacggtacgattggcgaagtgggcagccagcaggcggtgaacgtcgcttccgacgcgacctttggcggcagcaatggtacgaccgttaacggtaaggtgaccaatgaagggacgctggtctttggcgacagcgaggagacaggcgctatcttcaccctcaatggcgatctgatcaatatggggacaatgaccagcggtagcagctccagcacgcctggcaatacgctttatgttgatggcaattacaccggcaacggcggctcgctttacctgaataccgtcctgggcgacgatgattcggcaaccgataagttggtcattaccggcgatgcctccggcaccaccgatctgtacatcaacggcatcggcgatggagcacagaccactaacggtatcgaagtggtggatgttggcggcgtatcgaccagcgatgcgtttgtgttaaaaaatgaagttaacgccagtctgtatacctaccgtctgtactggaatgaaagtgacaacgactggtatctggcgtcaaaagcacagtctgatgatgacgacagcggcggtgatgacacgccttcggatggcggtgacgatggcggtaatgtcacgcctccggacgacggcggcgatggcggtaatgtcacgcctccggacgacggcggcgacggcggcgatgtcacgcctccggaccacggcggcgatgtcgcaccgcagtaccgtgcggatatcggcgcgtacatgggcaaccagtggatggcgcgcaacctgcaaatgcagaccctctatgaccgcgagggcagccagtatcgtaatgccgatggcagcgtatgggcgcgcttcaaagcgggtaaagcggaatccgaggctgtcagcggcaatatcgatatggacagcaactactcccagttccagttaggcggcgacattctggcctggggtaacggccaacagagcgttaccgttggtgtcatggcgagctacatcaacgccgataccgacagcaccggtaaccgtggcgcggacggtagccagttcaccagtagcggcaacgtagacggctataaccttggcgtctatgccacctggtttgccgatgcccaaacgcatagcggcgcgtatgtcgacagctggtaccaatatggtttctacaacaacagcgtagagagcggtgatgcgggatctgaatcttatgattcaaccgctaacgccgtctcgctggaaaccggttatcgctacgatattgcgcttagcaacggcaatactgtcagtctgacgccgcaggcgcaggttgtctggcagaattactcagcggatagcgtgaaagataactacggcacccggatcgatggtcaggatggcgacagttggacaacgcgtctgggcctgcgtgttgacggcaagctgtacaaaggcagccgtacggttatccagccgtttgctgaagctaactggctgcacaccagcgatgatgtgtcggtatcgtttgatgatgccacggtgaaacaggatcttccggctaaccgtgcggagctgaaagtaggtctgcaggcagatattgataagcagtggagcgttcgcgctcaggttgccgggcagactggcagcaatgactttggcgatctgaacggtagcctcaatctgcgctataactggtaa

SEQ ID NO: 372692 - DNA, 462 bp, Salmonella enterica
atggacactactgaaacattgaatggtacgtacttctacggcgggttatccaacctgacaccacaacaactatggtgggctatcaccatcgccgttgtgagcgatcatctggggatctcagcggtcgatgctgcactggttatctcagggcaaccagttctacctacgaggggtaaacctcgtgggacaactccaggaacatcaattgcttctaagtacatcagtaattggttgaactataaactgccacctgggatcagattaccaacgttgacaggcaaaaccatcaactcattacagctaagctcaacgaataatttaggtcgtttcgttggtcgtaatgtaccctggctcggttgggttatgacattcactacgatttatgatatccagcgtgatattaaagatacatttaatcgtgtggcggttcctaaagatcgcattcagtggacgtacttctaa

SEQ ID NO: 372693 - DNA, 2214 bp, Salmonella enterica
atgaaactaaataaaacttatataaatatcagagataaatggtggggactaccgctcatccttccttcgattttactacctgttttaagtagcgcaaatacttatgcgcttaccagcactggaaatgtggttcttttttacctgccgttagcttttatgcttagcctgatgctctttttcggctgggcagcactgccgggcattgtgcttgctatcttctggcgcagatacccgcagacagggctgtatgaaaccctttctgtgacgatgcactttatcattactatcgtgctaagctggggcggctatcgtgtcttttccccacggcgaaacaatgtttcccacggcgacgcccacctgttgtttcaacgaatattctggcaggtattttgttctgcaacattatttctggtcatctaccagtttgccgcttttgttggcatgtacgaaagcaaagccagcctgatgggggtaatgccctttaatatcaacacgctgattaattaccaggcgttactggtcggtaaccttgtcggcgtgccattgtgctattttattattcgtactctccgcaatccgctgcacctgcgggggtattatcagcaattaaagctacagattgatagcaaggccactaaaaaagagatcgttatttggctggccgtattgactacactaatgtttatactgtgtatgccattgactgataatagttcaatatttagtaccaactatacgctttcgttattattgccggtcatgctgtggggtgcgatgcgctatggctataagtttatttcaattatctgggccgtcgtgctaattacgtcgattcattattatcagcgttatatgccctggtattcaggttatgatacgcaattagcgattacctcttcgagctatctggttttttcttttattgttaattatatgtctgtactggccacgcgtcagcgcgtagtgagtggtcgcgcacggcggctggcctatcttgacccggttgtacatcttcccaatttacgtgcgttaaaccgcgcgctccaaaatgcgccctggtctacgatctgttttttacacgtgccgggcctggagctattgggtaaaaattatggcgtcatgttacgcatccagtataagcaaaagctctctcactggattacgccgatgctggcctcaaatgagtgcgtctaccagatgtcagggcacgacctggtgctgcgtcttaatacagagtcgcatcagcagcgtattgaagcgctggataaacatattaagcagtttcggtttatctgggacggactgccgctacagccccctgtcggcgtgagttactgctgcgtgcgttctccggttagccacctttatctgctgttgggcgaattaagcaccagttccgatctttcgttgacgactaacgcgccggaggatttacagcggcgcggcgcaatgcacctgcagcgcgatttgaagggcagaattgcgatgatgaatcgcctgcaacaggcgttggagcacgatcattttttcctgatggcgcagcctattttcggtgttcgtggggacgtttaccatgaaatcttactgcgactcagggatgacaacggcgacgttatcaacccggacaattttttacccgtggcgcatgagtttggtttgtcttccgctatcgatctctgggtgattgaaaacacgctgcggtttatggcggccagccgggaatatatgcccgcgcatcgttttgccattaatctgtcgccaacatcggtatgccgcgctcgtttccctgcagaagttaagcagctgcttacgcaatatcaggttgaaccctggcaactggtttttgaggtaacggaaagcaactctctcaccaatgctgagcaggcgcagttgacgctgggacagctacagcagtttggctgtcagatagcgattgatgatttcggtactggctacgccagctatgcgcggctgaaaaacgttgacgccgatattcttaaaattgatggcagttttattcgcaatatagtgtcaaacagtctcgattatcagattgtggcttctatttgtcatttagcgcgaatgaaaaatatgcaggtcgtcgcggagtatgtcgagagcgaagaaatacgaagcgtagtgctctcgttgggaatcgactatcttcagggatatttaattggcgagccgcagctattatctgagattcagtaa

SEQ ID NO: 372694 - DNA, 1701 bp, Salmonella enterica
gtgacggttaaacgcccggtctcggccagtctggctaaggcttttttctatattgtgctgttgtctattctgtccaccggcagcgcattactgacgctgaccagcagtttacgggatgccgaagcgatcaatatcgccggttcgctacgaatgcagagctatcggctgggttacgatctgcaaagccgtagcccgcagattaatgcgcatcgtcaacttttccagcacgcgctcaactcgccggtactgcaaaatctcaacgcctggtatgtgccgcaggcggtgaaaactcgctacgcgcgcctgcacgccaactggctggagatgaatagccgcctacaggacggcgacattgcctggtatcagaccaatatcaacaattacgtcgatcaaattgatctcttcgttctggcattacagcattacgccgagcgtaaagtcatgctggtcgtcgccatatcgctggcgggcggtatcggcatatttacgctggtcttttttaccctacggcgtattcgccagcaggtcgttcgcccgctgaatcaactggtcaccgccagtcagcgaattgaacatggtcagttcgccccgctgccgctggataccagcttacccaatgagctgggattgttggcgaaaacgtttagtcagatgtcgagcgagctgcataaactttatcgttcgctggaagcctcggtggaagaaaaaacgcacgatctgcacgaagcgcaccgccgcctggaggtgttataccagtgctctcaggcgctgaataccagccaaatcgacgtccactgttttcgccatattttgcaaattgtccgtgaacatgacgccgcctggtatctggagttaaccgtgggcgataactggcggattagcgaaggcacgcaaagccccgacctgccgatgcaaatgctgccagtgacgatgcaggacacggtctatggcgaactccactggcaaagccccaacgttaatgcctctacgccgctgctgaacagcgtctccacgatgctggggcgtggtttgtactttaatcaggcgcaaaaacacttccagcaacttttgttaatggaagagcgcgcgacgattgcccgtgagctacacgattcgctggcgcaggtactttcttatttacgtattcagttaacgcttttgaagcgcgccattccagaagataacgccggcgcgcaaagcatcatggcggatttttccagagcgctgaacgacgcctaccgtcagcttcgcgagctactcaccacgttccgtctgacgttacagcaggccgatttaccctccgcattgcatgaaatgctggaagatttacagagtcagaccccggccaaactcacgttggattgccgtttacccacgctggcgctggatgcgcaaatgcaggtgcatttgttgcaaattgtgcgtgaagcggtcctgaacgccattaaacacgccaacgcgagcgaaatcgccgtgagctgcgtcaccgcgcctgacggcgatcataccgtttatattcgcgataatggcattggtatcggcgaaccgcatgagcctgccggacactatggtctgaatataatgcgtgagcgcgcggagcgccttggcggcacgctgaatttttcgcaaccctccggcggcggcacgctggtcagtatcagttttcgctcctccaacaaggaagagagtcagttaacgtaa

SEQ ID NO: 372695 - DNA, 1299 bp, Salmonella enterica
atgaaatttactctcgttgcgacggttctactgacgttttccctttcagcttttgccgttgagtatccggtattgaccaccgcgagccctgaacaggtggggtttgatagccaaaaacttcaccgacttgatggctggattcaaaatcaaattgatgccggatatcccagcatcaatcttctggtgataaaagataatcatattgttctacaaaaagcctggggctatgccaaaaaatatgacggttccacgctgttagcccatcccattcgggcgaccactaacacgatgtatgatctggcttcaaacacaaaaatgtatgccactaacttcgcattgcaaaaactagtgtatgaaggaaaaatagatgtcaatgatttggtatcaaaatatatccccggctttaaggatatgcctggggataaaataaaaggcaaagataaactccgcattattgatattcttcatcacgtcgcgggctttcctgccgacccacaatatcccaataaaaacgtcgccggtaaattattttcacagagtaaaagcactactctggagatgattaaaaagacaccgctggaatatcaacctgggtcgaagcatatctacagcgacgtggattatatgattcttggttttatcattgaatcgataacggcaatgccattagatcgctacgtcgaaaccaccatttataaaccgctcggattaaaacataccgtctttaacccgctgatgaaaggcttcacgccgccgcaaatcgccgcaacggaactacacggcaatacgcgtgacggcgtgattcatttccccaatattcgcaccaatacactatggggccaggtacatgatgaaaaagcctggtactcaatgggcggcgtttcaggacacgccggactgttttctgatacccatgatatggctgtgttaatgcaagtcatgctcaatgggggcggctacggtaacgtgaagctattcgacgacaaaacagttgcgcagtttactcgccgctcgccagaagacgctacctttggtctggggtggcgcgttaacggcaacgcctcaatgacccccacgttcggggtattagccagtccgcaaacgtatggacataccggatggaccggcacgctgacgtctatcgatccggttaatcatatggcgattgtgattttaggtaacaggccgcactcgccggtagcaaatcctaaagtgaatccgaatgtttttgtcagtggattattacctgcggcgacgtatggctggattgttgaccagatatatggttccttaaaataa

SEQ ID NO: 372696 - DNA, 1680 bp, Salmonella enterica
atgactcagcatactcaaactccttcaatgccttctccgctctggcagtactggcgcggtctttccggctggaacttctattttctggtcaagtttggcctgctgtgggcaggctatctgaattttcatcctttactgaatttggtattcatggcgtttctgctcatgccaataccaaagtatcgccttcaccggttgcgccactggattgccattcccgtcggcttcgcgctgttctggcatgatacctggctgcccggcccgcaaagcattatgagccaggggacgcaggtggcggaattcagctccggttatctgctcgatctgatcgcccgttttattaactggcaaatgatcggcgccatcttcgtactgctggttgcctggctttttttatcacagtggattcgggtcacggtgtttgtggtcgccatcatggtatggctgaatgtcctgacattaaccggcccggtttttacgctgtggccggcaggccagccaaccgatacggtgacgacgactggcggtaatgcggccgctaccgtcgcgacagcgggcgataagccggtcatcggcgatatgcctgcgcaaaccgcgccgccgacgaccgcgaatctgaacgcctggttgaacaccttctatgccgcggaagaaaagcggaaaacgacgttcccggcgcagcttccgcctgatgcgcagccgttcgacctattggtcattaatatttgttcgctctcctggtcggatgtcgaagcggcaggcttgatgtcacatccgctatggtcgcactttgacattttgtttaaacactttaattccggtacgtcttacagcggcccggcggccattcgtctgctgcgcgccagctgtggtcaaccatcgcatacccgactttatcaaccagccgataacgaatgttatctgtttgataatctggcgaagctgggctttactcagcatctgatgatggatcataacggtgaatttggcggcttcctgaaagaagttcgcgaaaacggcggtatgcagagcgaactgatgaaccagtccggcctgccaaccgccctgctgtcattcgacggctcgccggtatatgacgatctggcggtcctgaaccgctggttgacaggggaagaacgtgaagccaattcccgctccgcgactttcttcaacctgctaccgctgcacgatggcaaccatttccctggcgtcagcaaaacggcggattataaaatccgcgcgcagaaactgttcgatgaactggacgccttctttaccgaactggagaaatccgggcgtaaggtgatggtggtggtcgtaccggagcacggcggcgcgctgaagggcgacagaatgcagatctcaggcctgcgcgatattcccagcccctccatcaccaacgtcccggcgggcgtgaaattttttggcatgaaagccccgcatgagggcgcgccgattgatattaaccagccgagcagctacctggctatttccgaactggtcgtacgcgccgtggacggtaagctctttaccgaagacagtgtgaactggaacaagctgaccagcaatctgccgcaaaccgcgccggtttcagaaaacgctaatgcggtggtgattcagtaccagggtaagccctacgttcgtctgaatggcggcgactgggtgccttacccgcagtaa

SEQ ID NO: 372697 - DNA, 1560 bp, Salmonella enterica
gtggaccccgtattttctctcggcatctcatcattatgggatgaactgcgccatattccaaccggcggcgtctggtgggttaacgccgatcgccagcaagatgccatcagtctggtgaatcaaacgattgcgtcacaaacggagaatgcaaatgtcgccgtcatcggcatggaaggcgatcctggcaaagtaatcaaattagatgaatctcacggtccggagaaaatccgcttatttaccatgccggattcagaaaaagggctatactctttgccccacgatttgctttgttctgttaacccgacgcattactttttcattcttatttgtgcaaataacacgtggcggaatataacgtcagaaagcctgcataaatggctggaaaaaatgaataaatggactcgttttcatcactgttcattgttggttattaacccttgtaataatagcgataaacagtcctcgttgttgatgggtgagtatcgctcactttttggcctcgccagtttacgttttcagggcgaccaacatttgttcgatattgccttctggtgtaacgaaaaaggcgtcagcgcccgacagcagttattgctgtgtcagcaggacgaacgctggacgctatcccatcaggaggagacggcaattcagccgcgtagcgacgaaaaacgcattcttagccacgtcgccgtccttgaaggcgcgccgccgctctcggaacactggacgcttttcgacaataacgaagcgctattcaacgacgcgcgcacggcgcaggccgcgacaattattttttcgcttacacagaacaaccaaatcgagccgcttgctcgtcgcattcatactttgcgacgccagcggggaagcgcgctgaaaattgtcgtgcgcgaaaatatcgccagtttgcgcgccaccgatgagcgcctgctgctgggctgcggcgcgaatatgatcattccctggaacgccccgctttcacgctgcctgacgcttattgaaagcgtgcaggggcagcagttcagccgttacgtaccggaagacatcaccacgctactgtcgatgacgcagccgttgaaactgcgcggttttcagccgtgggataccttctgcgatgccatccatacgatgatgagcaacaccctgctccccgccgacgggaaaggcgttctggtcgcgctgcgcccggtaccgggcattcgggttgagcaggcgttaacattatgtcggccaagccgaaccggcgatattatgaccatcggcggcaaccgtctggtgctgtttttatcattctgccgggtcaacgatctggataccgcgttaaaccatattttccctttgccgacgggcgatattttctctaatcgtatggtctggttcgaagataaacaaatcagcgccgagctggtgcagatgcgcttattgtcgccggaactgtggggaacgccgctaccgctggcaaaacgcgccgacccggtaataaatgccgaacacgatggccgcatctggcgtcgtattcctgaacccctgcgattgctcgacgacaccgcggagcgtgcatcatga

SEQ ID NO: 372698 - DNA, 753 bp, Salmonella enterica
atggcgattctgggactgcagggcgtgcgcggcggggtgggaaccacatctctcaccgcagcactcgcctgggcgttacaaatcttaggggaaaatgtcctggtgattgacgccagccccgataacctgctgcgcatgtcgtttaacgtcgacttcgtccatcagggcggttgggcgcgatcgttgctggacggccaggactggcgcgatgccggattacgttatacctcgcagcttgatctactgccgtttggacagctcaccgcgcaagagcgggaaaatccgcaggcctggcaggagacgctgggagagatcggatcggctatccaggcgctgaaagcgagcgggcgttatagctggattttactggacttgccctacggcgcgtcaccgctgacacggcagctggtgagcctctgcgaccatacgctggcgatagcccaggttgacgctaactgccatattcgccttcatcagcaggcgttgcctgccggagcgcatattctgatcaatgacttacgcattggcagtcagttacaggacgatctgtaccaggtctggctgcaaagccagcgccggttgctgcccattgtgatccatcgcgatgaggcgatggcggagtgcatggcgtcgaaacagccgttaggcgaatatcgcagcgattcgttagctgccgaagaggtgttaacgctggcgaactggtgcctgctgcatgatgcgggcgacaaaacgtccgccgggagcctgcgatga

SEQ ID NO: 372699 - DNA, 3543 bp, Salmonella enterica
atgcgtaagttcacgttaagtctcatgcacgcttttttgccggctggcggtcgaaacgccttacctggcaaaaggggcgtttctcgggcattgttgggtttatcgcttggtatggcgctaacaccgcttgccggcgcagcgacctccgcgcagcaacagttgctggagcaggttcggctgggcgaggccacgcaccgtgaggacttagtccgtcagtcgctctatcgcctggagctgatcgaccccaatgatccacaggttatcgctgcccgtttccgctatctgttgcgccagggggacagcgacggggcgcagaagctacttgatcggctggcgcaactggcgccggagtcgacggcgtatcaatcttcccgcaccgcgatgctgctctccacgccgcaaggacgccagtctttgcaggaggcgcgtttactggcgacgaccggccatactgaacaagcgatcgccagctacgacaagctgtttaaaggttatccgccggagggcgaactggcggtcgaatactggacgaccgtggcgaaattgcccgcccgccgtcacgaagcgattaaccagctacagaaaattaatgccgtcagtccgggtaataacgctctgcaaaatgcgctggcgcaactgttgttcgccagcgggcggcgcgatgagggattcgcggtgctaaaacagatggcgaaatccagtacgggacgcagcgcggcctccgccatctggtaccagcagataaaagatctcccggttagcgacgccagcgtaaaagcgttgcaagactatctgacgcagtttagcgaaggcgatagcgtgtctgccgcccgcgcccagcttagcgagcagcaaaaacagttagccgatccggcgttccgcgcgcgctcgcagggcatcgcggcggttaatgccggagaaggcggtaaggccattgcgcaattgcagcaggcggtaagcgcccggcaggacgacagcgaggcggtcggcgcgctggggcaggcatactcacagcgtggcgatcgcgcccgcgccgtcgcgcagtttgaaaaggcgctggcgatggcgccgcacagcagcagccgcgataagtgggagagtctgctgaaggtcaatcgctactggctgttaattcagcagggcgacgcggccttaaaagcgaataatctggcccaggcggagcgtttctatcagcaggcacgagcagtggataacaccgacagctacgcggtactggggctgggggatgtggcgatggcgcgcaaagataatgccgccgccgaacgttattatcagcagacgctgcgtatggatagcggtaataccaatgctgtacgcgggctggcgaatctttatcgccagcagtcgccgcaaaaagccgccgcgtttatcgcttctctttccgccagccagcggcgcagtatcgacgatatcgaacgcagtctggaaaatgaccgtctggcgcagcaggcggaaacgctggaaagcgagggcaaatgggcgcaggccgcagacctgcaccgtcgtcggctggcattagatccggggagcgtgtgggtaacgtaccgactgtcacgcgatctgtggcaggccgggcagcacgcccaggccgatgcgcaaatgcgctctctggcgcagcagaagccaaacgatccggaacaggtctatgcttatgggctttatctttccggcagcgatcgggaccgggcggcgctggcgcatctcaataccctgccgaccagccagtggaacagcaatattcaggaactggcgggccgattgcaaagtaaccaggtgctggaaagcgctaaccgcttgcgcgatagcggcaaagaacgcgaagcggaagcgttgttacgtcagcagccgccctctacgcgcattgcgttaacgttggcggactgggcgcagcagcgtggcgataatgcggcggcccgcgccgcttatgacgccgttctggcgcgggaaccgggtaatgtcgatgccatgctggggcgggtagaaatcgacatcgcacagggcgataacgccgcggcgcgcgctcaactggcggcgctgcctgcgtcgcaaatcacctctattaacatgcagcgccgcgtcgcgctggcgcagctccagcttggcgatatcacggcggcggcgcggatctttaaccgcattacgccgcaggcaaaagcacagccgccatcaatggaaagcgcaatggtattgcgtgacgccgccgcttttcaggcgcaaacgggcgagccgcagcgggcgctggagacctacaaagaggcaatggtcgccgcggcgattacgccggttcgcccccaggataacgatacctttacccgcctgacgcgcaatgatgaaaaagatgactggctaaaacgcggcgtgcgtagcgatgcggcggagttgtaccgtcagcaggatctcaatgtcacgttggcgcacgattattgggggtcgagcgggactggcggctactccgatctgaaggcgcataccacgatgcttcaggtggatgcgccctggtcggacggatgggcgttctttcgtactgatatggtgaatatggatgttggccgtttctctacggatgcggacggaaaatacgataataactggggtacctgtacgctggagaaatgcagcggacatcgtagccaggccgatacgggcgcgagcgtggcggtcggctggcagaatgagacctggcgctgggatatcggcacgacgccaatgggctttaatgtcgttgatgtggtcggcggcgtcagctacagcgacgatatcgggccgttgggttataccctgaacgcgcatcgtcgcccgatctccagttcgctgctggcgtttggcgggcaaaaggacgccagcagcaataccggcaccaaatggggcggcgtgcgggccaacggcggcggcgtcagtctcagctatgataaaggcgaagcaaacggtgtctgggcgtcgctcagcggcgaccagttgagcggtaaaaatgtggaagataactggcgcgtgcgctggatgaccggttattattataaggtgattaacgagaataaccgccgcgttaccgtcgggctgaataacatgatctggcattacgacaaagatctgagcggttattcactgggtcagggcggttattatagcccgcaggaatacctgtcgtttgcggtaccggtgatgtggcggcagcgtacggaaaactggtcgtgggagctaggcggctcggtatcctggtcgcactcccgcacccgtaccatgccgcgttatccgctgatgaatttgatcccggcggattatcaggaggatgcgcgtgaccagaccaacggcggcggcagcagccagggatttggctataccgcgcgggcgctcattgaacgccgtgttactgccaactggtttgtgggtacggctgtcgatattcagcaggcgaaagattatacccccagtcatctgctgctgtatgtccgttattccgcagcgggctggcagggggatatggatttaccgccgcagcctctggtgccttacgctgactggtaa

SEQ ID NO: 372700 - DNA, 546 bp, Salmonella enterica
atggaagatgttaaattatatgtggaacgggtaggcgtagacccggccagcggcgcggatattcgtattgcacggcgtgaatccacttcgtggcataaagatattgttgctgagctgattaatcaggtcctccggtgtggtgcaacattaatcatcatcgctgtgctgaccgcctgcgatgatcgccaggtaagctactttcctgattatgccgccatacccgagcagtccggtatctggacctggctgcctgtgttctttccatcgtccgccagtgaaatagaaatgacgtttaacctggacagcaatcttttttatgctgaatttagcgtggccgacggtgataaacgtgcgcattttgaaagcgtgctgggggaggagagcgtggttcattatgccaactttcctcataaaagctggtgtaaaacggggaaaactctctggaatagcgaagcgcgggcaaaacccttctttattaccaaaataagtgtcgatcgctaccgtatcactaatcatatgcccggctgtacaaaacccggcgagtga

SEQ ID NO: 372701 - DNA, 759 bp, Salmonella enterica
atgaaacaaacacaacggcatgacgcgatcattgaactggtgaaaaaacaggggtacgtcagtacggaagagctggtggagcatttttctgtcagcccgcaaaccattcgtcgggatcttaacgatctggcggaacagaatatgattttgcgccaccacggcggcgcggcgttgccatccagctcggtgaacacgccgtggcacgatcgtaaggcgacgcaaacggaagaaaaagagcgcatcgctcgcaaagtcgcggcccagatccccaatggttcaacgctgtttattgatatcggcacgacgccggaagccgtagcgcacgccctgttagggcacagtaatttgcggatcgtgaccaacaatttgaacgtagcgaacacgctaatggcgaaagaggattttcgtattatcctcgctggcggcgaactccgtagccgcgacggcggcattattggcgaagcgacgcaggactttatcgcccagttccgtctcgatttcggcattctcggtattagcggtattgatagcgacggctcgttgctggaatttgactaccatgaggtacgcaccaagcgcgcgattatcgaaaattcgcgccacgtgatgctggtggtggatcactctaaatttggccgtaacgcgatggtaaacatgggcagcattagtatggtcgatgcggtctacaccgataccctgccgccgccgggcgtgatgcaggtgttgacggagaaccatatccaactggagctgtgttaa

SEQ ID NO: 372702 - DNA, 2706 bp, Salmonella enterica
atgttgattccgtctaaattaagtcgtccggttcgtctcgaccataccgtggttcgtgagcggctgttggctaaactttccggcgcgaacaatttcaggctcgccctggtaaccagtcctgctggctatggcaaaaccacgcttgtctcacagtgggcggcgggcaaaaatgaattgggctggtactctctcgacgaaggcgataaccagcaagagcgattcgccagttacttaattgccgctatccaacaggccaccggcggacactgctctaccagcgaagcgatggcgcaaaaacgtcagtacgccagcctgacgtccctcttcgcgcagctctttattgaactggcgcagtggcatcgcccgctttatctggtgattgacgactaccatttgattaccaatccggtgattcacgacgcgatgcgctttttcttacggcatcagccggaaaatttcaccctggtggtgttatcgcgtaatttgccgcaactgggcatcgctaatctgcgcgtgcgcgatcagctgttggaaatcggcagccagcagttagcttttaaccatcaggaagcaaagcaattttttgaccgtcgcctttcgtcgcccattgaagccgctgagagcagtcgtatgtgcgacgatgtggccggttgggccactgcgctacagttgatcgccctctccgcgcgccagaaccatacctctgcgcatcactccgcccgccgtcttgccgggattaatgccagccacctttctgattatctggtggacgaagtactggataacgtggatgtcagcacccgacattttttacttaaaagcgcgatcttacgctcaatgaatgacgcgttgattgtgcgcgtgaccggcgaagaaaacggccagatgcggctggaggagattgagcgccaggggttattcctgcaacgcatggacgacacgggcgagtggtttagctatcacccgttgtttggtagctttctgcgccagcgttgccagtgggaactggcggcggaactgccggagatccaccgcgcggccgcggaaagctggatggaacaaggttttcccagcgaagctattcatcatgcgctggcggcgggtgacgcgcaaatgctgcgcgatatcctgcttaaccatgcgtgggggctgtttaatcacagtgaactggcgctgctggaagagtcattaaaagcgctgccgtgggaaagcctgctggaaaatccgcggctggtgttgttacaggcctggctgatgcaaagccaacaccgctacagcgaagtgaatacgctgctggcgcgcgccgagcaagagatcaaaggggtcatggacggcacgctacatgctgaatttaacgcgctgcgcgcccaggtcgccatcaacgacggcaatccggaagaggcagagcggctggcgaaactggcgctggatgagcttcctctcgcctggttttatagccgcattgtcgcgacctccgttcacggcgaagtgctgcactgtaaaggcgatcttagccagtctttatcgctgatgcagcaaaccgaacaaatggcacgccatcatgacgtctggcattacgcgctgtggagcttaattcaacaaagcgaaattcagttcgcccagggattcctgcaggccgcatgggaaacgcaggagagagccttccagttgatcaaagagcaacatctggaacaactgccgatgcatgagtttctggtacgtatccgcgcgcaattgctgtgggcgtgggcgcgccttgacgaagcggaggcctcggcgcgcagcggtatcgctgtgctgtccaccttccagccgcaacaacagttgcagtgcctgacgttactggtgcagtgctcgctggcgcgcggcgatctggataatgcccgtagtcagcttaaccgactggaaaatttattaggcaatggtcgttatcactgcgactggatctctaacgccgataaggtgcgtgtcatttactggcagttaaccggcgacaaaaaatccgccgccaactggttacgtcatacgcccaaaccggcgtttgccaataaccattttctgcaagggcaatggcggaatatcgcccgcgcgcagatcttgctgggcgaattcgagcctgcggaaatcgtgctggaagagttaaatgagaatgcccgtagcctgcgcttaatgagcgatttaaaccgcaatctgctgttactcaatcagctttactggcaatccgggcggaaaaacgacgcccagcgcgtattgcttgatgccttacagcttgccaaccgcaccggatttatcagccattttgtgattgaaggcgaagccatggcgcaacaattgcgtcagcttatccagctcaatacgctgccggagatggagcagcatcgcgcgcagcgcatcctgcgagagattaaccaacatcaccggcataaattcgcccattttgacgaaggcttcgtcgagcgcctgcttaaccatccggatgtcccggagcttattcgcaccagcccgctcacccagcgtgaatggcaggtgttagggcttatctattccggttacagcaacgaacagattgccggcgaactggcggtggccgcgaccaccattaagacgcatatccgcaacctctaccagaaactcggcgtcgcgcaccgtcaggacgcggtacagcacgcgcagcagttgctgaagatgatggggtacggggtttaa

SEQ ID NO: 372703 - DNA, 2394 bp, Salmonella enterica
atgtcacagccaaccttcaataaagatcaattccaggccgccctgacgcgtcagtggcagcgtttcggtttactgtcggcgtccgacatgacgcctcgtcagtggtggcaggccgttagcggcgcgctggcggaattactgagcgcgcaaccggtagcgcagccgacgaaaggccagcgtcatgtgaactacatttcgatggaatttttgattggccgcctgacgggaaataacctgttaaatctgggatggtaccaggacgttagcgatgtgctgaaagcgcacgatattaatctgaccaatctgctggaagaggaagtcgatccggcgctcggcaacggtggtctgggacgtctggccgcctgcttcctcgattcgatggccaccgtcgggcagtccgctacgggctatggtctgaactaccagtatgggctgttccgtcagtcatttgttgagggcaagcaggtggaagcgccggatgactggcatcgcggcagctatccgtggttccgccacaacgaggcgctggacgtccaggttgggatcggcggtaaagtcaccaaagaagggcgctgggaacccggttttgtgattacaggccaggcctgggatctgcctgtgttaggctatcgtaacggcgtcgcgcaaccgctgcgtttgtggcaggcgacccacgcgcatccgtttgatctgaccaaattcaacgacggcgctttcctgcgggcggaacagcagggtatcgatgcggaaaaactgacgaaggtcctttatcccaacgataaccacacggcgggcaaaaaactgcgcctgatgcagcaatacttccagtgcgcctgctcggtagcggatattctgcgccgccatcatctggctggacgcaaactgcatgagctggcggattacgaggtcattcaattgaacgatactcacccgaccatcgccattccggaactgctgcgcgtgctgattgacgagcaccaactgagctgggatgacgcctgggctatcaccagcaaaaccttcgcctacaccaaccacaccctgatgccagaagcgctggagtgctgggatgagaagctggtgaaagcgctgttgccgcgtcatatgcagattatcaagcagattaacgatcgctttaagacgctggtcgataagacctggcctggcgataagcaggtatgggcaaaactggcggtggtgcacgaccgtcaggtacgcatggccaatatgtgcgtggtcagcggctttgcggtcaacggtgtggcggcgctgcactccgatctggtggtgaaagatctgttcccggaatatcaccagctttggccgaacaaattccacaatgtcaccaacggcattacgccgcgtcgctggattaaacagtgcaatccgcagcttgcggcgttgctggataaaacgctgaaaaaagagtgggctaacgatctcgaccagttgatcaacctcgaaaaatacgctgacgacgccacattccgtcagcagtatcgcgacatcaaacgggcgaacaaagaacggctggtgaaattcatcaaggcccgtaccgggattgagatttcaagcaacgcgatttttgatattcagatcaaacgcctgcacgagtacaagcgtcagcatctgaatctgttgcatattctggcgctgtacaaagagatccgcgaaaacccgcaggctgaccgcgtaccgcgcgtattcctgtttggcgcgaaggcggcgccgggctattacctggcgaagaacatcatttttgctatcaataaggttgcggaagccattaataacgacccggcggtgggtgataagctgaaggtggttttcctgccggattactgcgtctcggcggcggaaatgctcattccggcggcggatatttccgagcaaatttctactgccgggaaagaggcgtccggcaccggcaacatgaaactggcactgaacggggcgttgactgtgggaacgctggacggcgctaacgttgaaatcgctgagaaggtgggtgaagagaatatctttatctttggccatactgtggaagaggtcaaggcgctcaaagccaaaggctacgatccggtgaaatggcgtaaaaaagacaaagtgctggatgcggtgctaaaagagctggaaagcggtcaatacagcgatggcgataaacatgcctttgaccagatgctgcatagcctcggcaaacaggggggcgatccgtacctggtcatggcggacttcgccgcttatgtcgaggcgcaaaagcaggtggatgcgctgtatcgcgaccaggaagcgtggacgcgcgccgcgatcctcaataccgcgcgctgcggtatgttcagttccgatcgctctattcgcgattatcaggcccgtatctggcaggcaaaacgctaa

SEQ ID NO: 372704 - DNA, 5826 bp, Salmonella enterica
atgcaaaagaaaaaacttatttctatcgctatcgctttaacgctacaaagttattacattccggccatcgccgcagaaaataacgatgatgaaaaagaatgtcccagtaatatctcctccctgcctaaagaaaaacgcgcaaaactctcaccgacctgccttgctacacctgaaaatgataatcactggggctgggttgctggcggcgttgctgcactggtcgcaggtgtggctattggcgttgaaaataacggtggcggagattctaatcattcttataccccccctacgcccgataatggcggcgacgttaccccgcctgacgatggcggcaacgtcaccccgcctgacgatggcggcgatgacaatgtgatcccacccgatgatagcggcgatgatgatgtgaccccacccgacgatagcggcgatgacgatgtaaccccgcccgatgatagcggcgatgacgatgtgaccccgcccgacgatagcggcgatgacgatgtaaccccgcccgatgatagcggcgatgacgatgtgaccccgcccgacgatagcggcgatgacgatgtgaccccgcccgacgatagcggcgatgacgatgtaaccccgcccgatgatagcggcgatgacgatgtgaccccgcccgacgatagcggcgatgacgatgtaaccccgcccgatgatagcggcgacgacgacgacacgcccccagatgactctgttattaccttcagcaacggcgtcaccatcgataaaggcaaagacaccctgaccttcgatagcttcaaactggataacggcagcgttctcgagggtgccgtgtggaattattcagaacaggacaaccagtggcagctcaccaccgcagacggtaaaacgctgaacgtcaccggctgggacgtgaccgacgccaatgccgccgtgattgaaggcacccaggaaaacggtctctactggaagtacgacagccgtggctatctgattattgccgacgataaaaccaccgttatcagcggcgatgaccaggagcataattccgatcgcggcatggatatcagcggccaggatcgcaccggcgtgattatttccggcgatcgaaccgtcaacacgctcaccggggactccagtgtgaccgacggcgccaccggcatggttatctccggtgacggcactaccaacaccatttcgggccactcaacggtggacaacgccaccggcgcgctgatttccggcaacggcaccaccactaatttcgccggtgacattgccgtgagcggcggcggcaccgccatcatcatcgacggcgacaacgccacgattaagaataccggtacctctaacatcagcggcgcaggctccaccggcaccgtcattgacggcaataacgcccgcgtcaacaatgacggtgatatgaccatcaccgacggcggcaccggcggccacattaccggcgacaacgtggttatcgataacgccgggagcactaccgtcagcggcgcagacgccacggcgctgtatatcgaaggcgacaacgcgctcgttatcaacgaaggtaatcagactatctccggcggcgccgtcggtacgcgcattgacggcgacgacgcccataccaccaataccggtgatatcgcggtggatggcgcgggctctgccgccgtgattatcaacggcgacaacggcagcctgacccaggcgggcgatctgctggtcaccgacggcgcgatgggcatcatcacctacggcaccggaaatgaagcaaaaaataccggcaacgccaccgtgcgtgatgcggactcggtgggttttgtggttgcaggcgaaaaaaacaccttcaaaaacaaaggggatattgacgtcagccttaacggcaccggcgcgctggtgagcggcgatatgtcgcaggttacgctggatggcgatattaacgttgtctcagtccaggacagcgaaggcgtgtttagctcagcgacaggggtgagcgtgagcggcgacaacaacgccgttgatatcaccggcaacgtaaatatcagcgccgactacgggcaggatgatctggctgccggggctcccccgttaaccggcgttgtcgtcggcggtaacggcaataccgttacccttaatggcgcgctgaatattgatgacaacgatctgtccgccaccggcggacaatacctggacgttgttggcctgagcgtaacaggtgatgataacgacgttgagattgacggcggtattaatatcacccacagcgaggatccacttgatggaacctctgcagacattaccggcatcagcgtcagcggtaacagtaccgttacgctaaacggtcattctaccattgataccaacacggtagtgggaggtcacgttgtactggcgcgggtcaacaacggcggctccctgattctggatgatgactcggttgttgacgttaatgtcagttatatacccacaggctattacacctacaacgcgttgctgatggctgatggcgaaggcacatcaattgaaaataaaggcgatattacaagccatggcgtgtattccgtcattcgcgcagataacggctcggaagtcagcaacagcggagatattctggtctacgcgaccagtagcaacagtagtgaggatcgtgcagccatcacaagggctagtggcgagggatcggctgttcataacaaagccggcggcgatatcaccctcatttctgatcagacgccgcagggcagtggcggtattgaagtatacccattgaaatggtacacccacaccttttacgccatgatggcttcggattatggcgatgtcgttaacgatgagggcgccacgatccatttgcagggggcaggtgtatatggcgttaccgccagccgaggtaaagcactaaacgaaggcgatatctatctggatggccttgtcccgacgctggacgatgaaaataacatcaccagcaccagctactggcagccatcatcgctctatctcaccagctcaggaatggtggcgggttccaccgatgccgatggcgacgccaccgccatcaacaccggcaacattaccgtcaacaacgccgggttcggcatgatggcgcttaatggcggcaccgccattaaccagggcgtgatcaccctgaccgccgatgacggcgtgaccggccaggcaaacgagctggtcgggatggcggcgctcaacggcggcgtcgtcatcaacgacaccagcggcgtgattaacatcgacgccgattacggccaggcgtttctgagcgacagttccagctacatcatcaataacggctctatcaaccttaacggcagcccgatggatgatactgattcacacatgggcggcacgccaacggacaaaatctggattcagtctctgcccggcagcggcgacagcgacaccaggacctccgacacaggtttcttcaccgccggtacgctggccaactacggtactgaaaccctgaacggcgatgtggacgttaacgggggctggctgtacaacgaagcgggcgcctcgctcaccgtcaacggcaccgtgacgattaacggcggggctaacgcgctggctaactacgggacgctggacgcggacgctatttccacctggcacagcctctttaatgaagcggacggcagcatcaccaccgatctgttaacccttaatggcgacgtcactttttacaataacggcgatttcaccggctccatagcgggcaccagctaccagcaggaaatcgtcaatactggcgatatgacggtggcggaagatggcaaatcgctggtcagcggcagcttctatttctataacgaagaggacgcaacgcttaccaacagcggcagcgcggtggaaggcggcgagaacaccatcatcaatctgacgcgcgccaacgattcgctgacccaggtgaacagcggcaccatcaccgccactaacggttacagcgccatcaccacggtcaacggcagcaatgaccccaaatggatctggaacaccgcaaccggcgtgattaacggtattaacccggatgcgccgctaatcaatttgggccgcggctataacttcggcaaccagggcactatcaacgtgcagggcgataacgccgtggcgattagcggcggcaccagcagttatgtcattaacctggtcaatagcggcaccatcaacgtcggtaccgagcagggcaaggaggacggcaccaacggcaccgggcttatcggcatcaagggcaacggtaatgccaccaccataaacaacaccgcagacggcgtgatcaacgtttacgcggatgactcgtatgcgtttggcggcaagaccaaagccatcatcaacaacggcgaaatcaacctgctgtgcgacagcggctgcgacatctacgcgccgggtactacgggcacgcagaacgaccataacgggacagcggacatcgtcatcccggatgcgactaccgccccgaccgagggcagcatcccgacgccgccagcggatcccaacgcgccgcagcagctctccaactatattgttggcaccaacgccgacggtagctccggtacgctgaaagccaataacctggtgattggcgacaacgtgaaggtggataccggctttaccagcggtacggcggataccaccgtggtggtggataacgccttcaccggcagcaatatccagggcgcggacaacatcacttccaccagcgtggtgtggaacgcccagggtagccaggatgccgacggcaacgttgacgtcaccatgaccaaaaacgcctatgccgatgtggcgaccgacggctcggtaagcgacgtggcgcaggcgctggacgccggttacaccaacaacgagctgtacaccagccttaacgtgggtactaccgccgagctgaacagcgcactcaagcaggtgagcggtgctcaagccaccacggtattccgtgaagcgcgtgtactcagcaaccgctttaccatgctggccgacgccgcgccgcagatcaaagatggcctggcgttcaacgtggtggcgaaaggcgacccgcgcgcggagctgggcaacgacacccagtacgatatgctggcattacgccagacgttggatctcaccgccagccagaatctgacgctggagtacggtattgcgcgtctggatggcgacggttcgaaaaccgcaggcgataacggcctgaccggcggctacagccagttctttggcctgaagcacagcatggcgtttgatgaaggtctggcgtggaacaacagcctgcgttatgacgtgcacaacctcgacagcagccgttctgtcgcctatggcgatgtcaacaaaattgccgactccgacatgcgtcagcagtaccttgagtttcgcagtgaaggggcgaaaactttcaccatgatgagtgatacgctgaaagtcacgccgtatgccggagtgaaattccgtcacaccatggaagatggctacaaagagcgcagcgccggagattttaacctgtccatgaactctggcaacgaaacggcggtagactctattgtcggcctgaagctggattacgccgggaaagacggctggagcgccaccgctaccttggaaggcggcccgaacctgagctacagcaagagccagcgtacagcgtcattacagggtgcggcgggtcaatcgttcggcgtggatgacggtcaaaaaggcggcggcgttaatggtctggcaaccatcggcgtgaaatacagcagcaatgataccgcgctacatctggatgcctaccagtggaaggaagacggtatcagcgataaaggctttatgcttaacgttaagaaaacatttcgttaa

SEQ ID NO: 372705 - DNA, 810 bp, Salmonella enterica
atgtttacagacactatcaataagtgtgcggctaacgctgcgcgcatcgcacgcctgtcggcgaataatccgctcggcttctgggtcagttcggcaatggccggggcttatgtcggtctcggcatcattcttattttcaccctcggcaatctgctcgacccgtccgtacgtcctctggtgatgggagccaccttcggtatcgccttaacgctggtcatcatcgccggttccgaactgtttaccggccacaccatgttcctgacgctgggcgtcaaagcaggcaccatcagccacggtcaaatgtgggctatcctgccgcaaacctggctcggcaacctggtcggttccgtgtttgtcgccctgctttacagctggggcggcggcagtttgttgccggtcgataccagcatcgttcactcagtcgcgctggcgaaaaccaccgcgcccgccacggtactgttcttcaaaggcgcgctgtgtaactggctggtttgtctggcaatctggatggcgatccgcaccgaaggcacggcaaaatttcttgctatctggtggtgtctgctggcgtttatcgcttccggctacgagcactccgtcgcgaatatgacgctgtttgccctctcctggtttggtcatcacagcgacgcctataccctggccggaatcggacacaacctgttatgggtcactctgggtaatactttgtccggcgtcgtgttcatgggattgggttattggtatgctacgccgaaatcggagcgtcctgttccgcaaaaaaccaaccaaattaaggttacagctaaccattaa

SEQ ID NO: 372706 - DNA, 303 bp, Salmonella enterica
atgtttgcggtaactgaccggacggaaccggcgcgaggctttcgcccgcagcccctgccgacgcaggctggccgccacggttttcacgttgaactggtaaccctgagcacgaagctcatccgtcaggcgtggcgcaccatagcgttgttttgcgtcactgaatgcttcccggaagacgttatcacagacaaggtggaaccgctgacgccggtttatctgatgacgacgctgatgccagacgtaccgcttacagatgcaggctatcgccagcgagctaagcgcccggttaaataccccagttga

SEQ ID NO: 372707 - DNA, 402 bp, Salmonella enterica; identical to SEQ ID NO: 372303

SEQ ID NO: 372708 - DNA, 159 bp, Salmonella enterica
atgaattctaaatactttagagaggtgttttttgtctcggtagttgttatattattattttatttggtgttatttgcagccagtgctcatgctgaaggcggcttcagctctggaggcattgggttatttatgacgggaacaagagagatgctactgtag

SEQ ID NO: 372709 - DNA, 618 bp, Salmonella enterica
atggttaaatatcaccccgtgcatgtaacaaaaaaccgcattaaaacagatgatgttactgatatttatttcgttgaacccttctggaaagaaggcgaaaaccacataattgagtcattgatgttttttgaagagttacaaaagtcatttaatttattcaaccataaatatgggttaaataaatatatactcaggattccctgggaatttgtgctcatacatatggaaaggatcagtaaattaaatagcgtcgggttatttgctgtttctgttgactttaataacaaccacaaatttctgagcgagtacatcaggagtcgcagagattatggtatggaagtttggtttgatttttgtggtaaacattcttattccagtgaaattaaaaaccttgggttcttttttcaggcttgcgtagtgcctcgtgatcctaattttattagtagtgtttatcattatcataagttccaaaagattcttgtcggggatataaatgatgtagaacagagggccgtgtaccagaacgaagttgattacatgtatggaatgcaatggccatcgtcatatgacggttttttctttcgggatcataaaaaaaatgaaacttggtgtatataa

SEQ ID NO: 372710 - DNA, 348 bp, Salmonella enterica
atgactgagtatttagatgataaagataaagaattattgaaagaaatccaaaaagattgtgcgcaaactttatggcaacttgcatataaagtgggacttacgcccacaccatgtttcaaacgtttaaaaaaacttaaagacaggggggttatcattggtcagttcgctttattggataaagaaaaactaggtctttcacttaatgtctttattatgattaacatatctgaggagcaatacgctagtatttctgagaaaataaagtcaatgcctgaggttattgccttttatcgaatttctggatcatttaatgcatacagtatttacagatatgaacgattactatag

SEQ ID NO: 372711 - DNA, 1053 bp, Salmonella enterica
atgacagcctattggtcagcaattattaatttcatccgaaaatatgtttatccagcaaggataattgccatcctgctgatggctggcgctacactgccacaagtcgccgatgcgattaccgtcgacctgaattacgacaagaacaatgtaccggtcatcactcctgtctggtcccaagaatggagtgtagcaaatgtgttggggggatgggtatgtcgttcaaacaggaatgaaaatgagggggcgtgtgaagaaacacatttggtatggtggtatgcttttggagcttattcaaaaattcgtctgcgtttcagagaacaaatcagccatgctgaaatcacgctcatactgctcggcagtgttcgtaatgcctgttatactggtgtcgtgaacatgaacgctgctgcatgtcaatggggtaggtcgctgaaacttaggataccttcagaagagcttgcgaagatacctacaagcggaacatggaaagcaacgttagtcctggattatttacaatggggcggagacgatcctttaggcacatcaactacagatatcacgctgaatgtaacagaccactttgcagaaaatgcggctatttactttccgcagtttggtactgcaacccctcgtgttgacctgaatcttcaccggctgaatgcctcacaaatgtcgggcagggctaatctggatatgtgtctgtatgacggaggtgtgaaagcccgttcattacagatgaagatagaaggaagcaataagtcaggtacgggatttcaggttataaagagcgattctgctgatacgattgattatgcggtcagtatgaattatgggggacgaagtattcctgtcacccgtggcgtggagttcagtctggataacgtggataaagcagcaacgcgtccggtgctacttcccgggcaacggcaggcggtacgttgtgtgccagtgccccttaccctgacaacacaaccctttaacatcagggagaagcgttctggtgagtatcagggaacgctgacagtgacaatgctgatgggaacacaaaccccctga

SEQ ID NO: 372712 - DNA, 2688 bp, Salmonella enterica
gtgagtcgttatttctggatgtattatttactgggattgtgcagttttaccagccaggcaactcttattcccccacctggatttgaatctctgctggaaggacagactgagcaaattgaagtgttgctaccagggcattcactgggattatttccggtggtggttaaaccggacaccgtgcagttcatgtccccattgatggtacttgaaagcagtgggcttgccgcgttgccggtcgcagaacggcaaaaagcgctggctgcactcagccgtccgttgctacgtaacagcaatctggtctgtggtgtctcagaagcaaaagacagcagcgagtgtggttacgtggcaacagataaagaggatgttgcggttatttttgatgagaacaacggtcagttatctttgtttcttaaccgggactggttgccggatgaagaacgacgtgataaacgctggctgactccgaccccggagggtgtcagcgcatttattcaccgccagacgctgtatctgagtgatgatctccacagtcgtaatatgacactgaatggtagcggtgccctggggcttggtgacggtcgttatctgggaggcaactgggcggctatctggaatcagtcagaacattacaataacagtcaggcctggtttgacaatctgtttgtccgtcaggatctcggcaatcagtattatctccaggctggtcggatggatcagcggaatctgtccagcgccacggggggggattttgggttcagtctgcttcccctgagccggtttgatggattacgaaccgggaccacccaagcttatgttaaccatgaggtggaccagaatgccactccggttatggttcaggttacccgaaatgcccgtattgatatttatcgtggcagcgagttgctggggagtcagttcctgaccccgggaatgcataccctggatactcactctcttccaccgggaagctattctctggcgttgcgggtgtatgaggatgggattctgcggcgaacggagacccagcccttcagtaaggggggcaatagcttcagtgcacagacccagtggtttattcagagcgggctggaagataccggggataaagccagccattatgacggtgagactgtcatggctgccggattccgaactgggctgcggaaaaatatcagtctgaccgaaggtatctctctggcacatgaggcctggtacagtgaaacccgactgaattcacagcatgcagtgctggatggcacgctggacctttctgccgggatactgcatgggacagacagcacgagcggtaacactgagcaggtgacatacaacgacggattttccgcgagtctgtggcgtaaccatacggaaagtgatgcctgtagtggtcgtcatccacagtcagtgcatgccagtatgacctgccagacttcgatgaacgcctccctgtcggttccggtggggaactggtatgccctactgggatacagtaccagcaggacagaaggtcggccggtttaccggggatatgatgataacagtgacaaagaaaatgtgttctggcgacaggcatacatccctgcctctcaccgcgaatctgctcaggctagtgcaacgtacagccttaatatggctggcatgaatattaatacccatgggggagtatggcgaacccgaaatgacggagtgaatgatgatggcttgtttatgagtgtcagtgtgtcatatgcctctcaaccaccgacaatgactggcagtaatgggtatacctcagccgggaccgatattcacagtagccggaatcaaaaaacacagacgtcctggaatgtgaaccatgtgagatcctggcagcaggatctgtatcgtgaactgtcggtgggtttctccggttataacgacgacagctggagcgggagtctcggcggacgcatgagcggccgtatgggtgaactgagcgccactatcagtaactcccatcaacgtaatgcgggcagcgccagttcactcaccgctggctacagctcgtctctggcgttatcccgtaatggactgttctggggaggtggtcaggacggtgaaccggcctctggcatggcggtgaacgtggagtcagagggggacgagggcagtagcgggaaagtagtcagcgttcgtggcagcagccagccgttcagtctcggttttggtcagcagtcgctgttgctgatggaaggctataacgccacggaggtgaccattgaggatgcaggggttagttcacagggtatggcaggcgtaaaagcgggagggggaagcaggcgttacttcctgacacccgggcatctgctggttcacaacatcagcgccagtatgagccgactgtacgttggccgcgtactggacaaggatggcagaccgctgctggacgcacagccactgaaccatccatttttgtcgttgggaccttccgggcgatttagcctgcagagcgagcataaagaatccagcctgtggctgctgtcaaaaaacaggatcctgcgttgtccgatgtcagtacataaacgtcgggatgttatgcaggtagtgggtgatgtgcggtgtgaattaagtgacgtggatgccctgccacaggcgttgcaaatatcgccgcgggtcatccgtttgctgaacgtggcaggtttgctgcgccattccgttcaggaagcatga

SEQ ID NO: 372713 - DNA, 519 bp, Salmonella enterica
atgaacatgaaaacatcttttattgccgcagctgtggcattggccaccgtttattctttttctgtttctgcggttcagaaggatattaccgtcactgccaatattgacagtacacttgaactgctgcaggccgatggttcatccctcccgtcgactatgaagctggatttcatgccgggtaagggcctggtccataaatcactccagacccgcctttacagcaacgatcagaccaagtcggttaatgtaaaactgttgaatgctccacaacttatcaacgtcctggatcccaccaaaaccattgatatggaagtgactctgggaggacggtcactgaccaccaccaattctgtactggaagctaaaaccctgttcccggacggaaaaactggcgatgcttcagctctgctgaacctggatattggtcagaaggctggagcagccttacaaaacctgcctgccggtgaatacagcggattggtcagtctggtgatttcacaggctgtcactgccggctaa

SEQ ID NO: 372714 - DNA, 636 bp, Salmonella enterica
atgctcgtttatcccatggcggcagaaattaatagtagccgcgaagaggccacctcgctgttcgtctattctaaatcagatcatgtgcaatatattcgaacaagaatcatgcgtattgaacaccctggtatgccacaggagaaggaggtaccagcagggaatgatatagagacaggacttgttgtctccccggagaaatttgccctttccccgggaacaaaaaaaacaatacgtgttatcactactcaggcaccggaaagagaggaagcctggcgggtatacttcgaggctgttcctgaactggaagatgatccacaggcaggtggaaagcaaaattcatccgtaagtgtgaatcttgtctggggggtgttgctgcgtgtttctccgtcagaccccaggcctgcgctggtaacggacggtcaccacctgctgaatacgggaaacacacggctttctcttattcgggctggcaactgcgacaccacatgccactggcagaatataggcaaaagtatttatcccggcgggagtgctgatattccggccggaataaaaagtaatgcatttcgtgtggaatatcgtacgggtgcaaattcaccggtaatctctgctgatttaacagcagccggaaagtaa

SEQ ID NO: 372715 - DNA, 378 bp, Salmonella enterica
atgaaagcgaagctggaaaaccgcctggagcgccagctacaacaactgagctatgcgcgggggctgatcctggacgaaataggttacctgccaatgaccagtgaggaagccagtctgttcttccgactgctgaaccgacggtatgaaaaagcgagcattatcctgacgtcaaacaaaggcttcgcagactggggagagatgttcggtgataacgtgctggcaacagcgatcctggatcggctactgcatcactcaaccacactgaatatcaaaggagaaagttaccaactgaaggaaaaacgcaaagtcggggcgctgaccaaaagcgcaacgccaatcagtgaagatgaaatggcggaaagcggacagcagaagtga

SEQ ID NO: 372716 - DNA, 564 bp, Salmonella enterica
atggtgttatgtattctggatgtgctggattattttaatttggttaaaaaaaaggtggttattcaaatgaaaagcataaaaaaattgattatcgcaagtgcgttgagcatgatggctgctagttgttatgccggctcgctcgtgccgaatacaagcactggcgtgtcggcggatgtaaacttcagcaatcctggacaactacaagcacagcttactccagtgtctggcttggtggcagggcctcataagggtgatgaggctattgctacgctttcggtaagcggttcgagcaaacaatacgtggtaacgggagattattctaaacctgaaacagtgggcaacaacagcgatgtgtggacggtaactggtaaaagtggtaataccattaaagttacctttgggggggtagcctgtgccaataaaggttcattagtggatggtgcttcgcataagtggtgggtatataacatgacagataaaatcgctgtgaaattgtctggatcacaaacggtaaaggctgatacttatccagtgacgctacacatagcggagtatcaagcttaa

SEQ ID NO: 372717 - DNA, 198 bp, Salmonella enterica
atgcgtaaagcccgttttactgcgcaccagatcatcgctgtgattagatcagtcgaatccggacggactgttaaagatgtctaccgggaggccggtatttctgaagccaccagggacaactggaagtctggatacggcggcagggatacgcgtggaatcacaaaaggctccaccgtatttactgtctgctcaagctga

SEQ ID NO: 372718 - DNA, 345 bp, Salmonella enterica
atgaatcagttagaatatagaaaggcttataatttagatgagttaatatctaaaattatgagtggatataagaaagataatttctgtttgtatacaaaggaatacgaatcatctgctagagcggatcttatttgttatttagaaatgtatcctgttattagcgatgatgatgatgaagtatatccagagtttgttattaataactcattagaactttttttctatggagatcaatttttagatgtactaagaaatatatctacccagaaagaaaacccatcaatggaagattttatcgcaggattaaatttttatttagagaacgataatttcatagatctttga

SEQ ID NO: 372719 - DNA, 4743 bp, Salmonella enterica
atgggagaagcattctgggcggcaagggaaggcgacgcgctgctgcatacgtcctttctggcagatctggtgggcagtgcgctggaattcgccatcaatgcggttattgattttgcggcactggctgttgtggcgctggcgacgggggctacggtggcaacgctgggatgcagcgctgtattacttgtggggaccgtggtcggcgcgacgatgttgctgagtggcgccggggagaaaatcagtaaagcctgtgaagacatagccaacagcctttttccgccgaaaattgagggatatatcctgaccggctcaggcgacacccggattaacagcaaacgggcggcgcgggcggcggcaacggcattatcacgccatgatgtggaaaccctggacgcgcaggcgcaggcagaggcagaagaagaaaaacgcaggcaggacgccaaatcaatgtgggatgtggccggggaatatctggatgcagtaaaaggccgggcagagaatatggctaagggcgtcgtttccgtggtgagccggatgggatcagcggaaggatgggcctcgctgggaaatgatgctctgacggaggcgggcgatatgctttccgacacgggccactttatttcagagatgtggcagcccacggtggcaacggcatatccggggtctgacccgaaacaggatgataaaatcgactgccacaaacatccctcttcattcacccagtttatggcgcagaaactgcaggcgctgacggatgacccggtggggacggtactgggggcgatgaacactttcgatgtgctggaaaccggttttcaggcggcaagcgcgcttatcggcagcgtttcgaacctgttcaaaggcgacgatgagccgcccgcagcagaatatatcgccgaagggacgcgggatgtgcgtatcaacagccagcctgcggcgcgcagcggggtacgctgtacctgcgaggcaaaagtggtggatgagcctgagaacggcgtacatgtatccggtgatgtacgtatcggcgggccgcttctggtggtacgggatatcaaaagcggtaagtcacaaataaccctggtgaccaccattgcgctgacgttcatgcagcccggacgggcgttagctaaaagtgcctgctttatgatgggattgggcattaacatgatggttcagaaggcggggagtgcgctgaaccgcccggtaaacgccgccaccggagccaagtacctggcaggcgatgatgacgttgatttcagtctgcccggccacttcccgctggagtggcagcggacctacagcagccgtgatgaacggacggaggggatgttcgggcggggctggagcgtgctgtatgaagtgtgcctggagcgtacgccggacaacccggatgaaaactgcatgacgtatgtatccccaatgggacggcgaattgacctgcaggcggtggagccggggagcggtttttacagccccggcgaggggctggcagtgcggcgcagcgaacagggccactggcttatcagcagtgatgacggcgtgtacaggctgtttgaagcggacccgttcagcccacagcgtcggcggctgaaaatgctgggcgaccgcaacagtaactgccagcacctgacctacgacaaccacgggcgtctgctggaaatcagcggcgaccggcagcgcccctgcatccggctgcactatgagctggcagcgcacccgcagcgcgtgacgcgcatcttccgccattacccggaaggggagccggagctgctgcggcgttaccgctacgatgaggcggggcggctgaacggggtggtggacaacgcaggtcagtatcagcgcgagtttgcgtacgacgacaacgactgcatgacgatgcaccgggagccgggcggcgaacggtattactacacctgggcgtggtttgaaggcccggacgatgcggcgtggagggtgacgggccatcatacggacagcggcgagcagtaccgtctggactggaatctggcagaacgttcgctgtgcgtgacggatagtctggggcgtacgcgctgccactggtgggatgcgcagggcctggtgacggcgtaccgggacgaggccgggcagatgaccactttccgctggagcgatgaagagcggttactgctggggatgacggacgcgcagggcggcaaatggcgttatgtctatgaccgtctcggccacctgacggagacgcatgacccgctgggccgggttgagcagacgcagtggcatccggtgtggcaccagccggaaacggaggtggatgccgcgggggcggcgtggcgttatgagtatgatgagcggggcaacctgcaggcggtcagcgacccgctgcaccagcgcacggtatacgggtacgaccggcacggtcaggtggtgcggataaccgacgcgcggggcggagataaatacctgcagtggaacgaagacgggcagcttatgcgccacacggactgttctggctcgcagacggcatggttttatgatgaacgcacgcggctggaaagggtgacggacgcggagagtaacagtacgcgttacagctatgacggcaacggacatctgacggaggtcatgttcgcggacgggcgtacggagcgttaccagccggatgcggcgggacggctggtgaaatacaccagcccggcggggcagataacacgctggcagcgggacggccaggggcgggtgcgcaggcagacggatgcgacgggtcgcaggacggcgtatgagtacgacgcttacgggcggctgaccacgctcacgaacgagaacggggaaaactaccggttccggtacgatgttctggaccgggtgacggaacagacggaccccggcggcagccgccgggcatacgggtataacgcgctgaatgcggtgacggcggtgatatacggcggggagcgcgggggagaaatccgtcacggtctggagcgtgatgcggcggggaggctgacggcgaaaatcacgccggagacgcgcacggaataccggtacgacgcggcggaccgtctgctggaaatccgccgcaggcggcatgatgcggcggaaggcggagagccggaagttatccggttcagctacgacagtgcgggtaacctgctgagcgaggagacggcgcagggcgtgctgcagcaccggtacgatgttcagggcaaccgcacagaaacgcagatgccggacgggcggacgctgcggtacctgtactacgggagcggccatctccagcaaatcaacctggggcgtgatgtcatcagcgagttcacgcgcgaccacctgcaccgtgaggtgcagcggagccaggggcggctggacacgcggcggatgtacgaccggacgggccggttaacgcggaaactgacctgtaaaggaatgcgcggtgtggtgccggagacgtttattgaccgggaatatgcgtacagcggccaggatgagctgctgaaaaagcggcacagccggcagggggtgacggattatttttacgacacgacggggcgtatcacggcgtgccggaatgaggcatacctggacagctggcagtacgacgcggcggcgaacctgctggacaggcggcagggagagaccgcgcaggcgggtgcaggcagcgtggtgccgttcaaccggataacgtcataccgtgggctgcattaccgttacgatgaatatggccgggtggtggaaaagcggggccgcaacggtacgcagcactatcgctgggacgcggagcaccggctgacggaagtggcggtcatccgggggagcaccgtacggcgttacgggtacgtgtacgacgcgccgggcaggcgggtggagaagcacgagctggacgcggaaggaaagccgtataaccggacgacgtttttatgggacggaatgcggctggcgcaggagtgcaggctgggaagaagcagcagcctgtatatctacagcgaccaggggagccacgagccgctggcgcgggtggacagggcggcgccgggcgaagcggatgaggtgctgtattaccatacggacgtaaacggcgcgccggaggagatgacggacggcgggggcaatattgtctgggaagcgggctatcaggtatgggggaacctgacgcatgaaaaagaaacccggcccgtacagcagaacctgcgtttccaggggcaatatctggacagggaaacggggctgcattacaatttatacagattttatgatccggatatcgggaagtttatatcgggcgatccaatctcgctgaggggcggaataaacttatatgcgtatgcaccgaatccgttaagttggatcgatccgctggggttagcaaatagaccaaataacgggaagtataatatatttcatgattactctcttgaccctaaatataaatattcgagtgatggtgttcaatttaatagagcaaacactgattttattaatagaatgaacagtgatccttcatttagaagagatatgctgggacgtcatcccgcattaggcgattggttgaaaaacccgaataaagcatcaagccctccaggtttaacatggcatcatcatgaagatgttaatagactggtattagttgaccgcatagaccatgccgataatcagggtctgtatcaccctaccgggaaaggtggacgtgatatgtggggcggaggagaacttggtcgtagaggtaaactggatggggtaacaggtaaacctagagggaggagatgtggatga

SEQ ID NO: 372720 - DNA, 459 bp, Salmonella enterica
atgacgaactattatatcaacgaagccatcttgagtttctccggtaatatatcccaggacagcaccctcaatatgatccgcctgagcgatccggatgcggcgctgattatcagccgcggcaaaatgcaggacggtgatgagctggcgtcccaggttgaacaacagatgaaaaaactggaaaagcaggttaaggaactgcgttatacgccagcacaggttgtccggctgggtattgacgggaaaatggaagggctggaaatacagagtcagttcatccggggtaatgagcatgtatatcagtaccaggcggtatttgtgctacagagcagccgggtaatgatggccctgacctatgcccgctcaacagcgttaaccgaagcggatagggtgcgctgggcggatatcaaaaagaatctgcgtttcaggttggacccggaaaacacggcaaccggacaataa

SEQ ID NO: 372721 - DNA, 2232 bp, Salmonella enterica
atgagttttgtatccacaaataataaatccggtatgggagggctgacgacaaccacgccgccgataaccggagaaagtggcggtgtcaccgcagattcagtcgccggaagcgtggcagatgcggcagaagccgccgtggaacaggctgcgggatcgctgtttggcgcattgccggagccatcaggactggtgaaagccgcggtggcagcggcgcaggccgccgccgcaggtatggcgcaggatgcggtatcggccatcgtctccgctgttgcaggcgggccgggggcgcataatgtgacggtcagcggcagcgccgtaccgccgggcgcattactgttcgccagcctggacggcggcgaaacattaagtgaactgttcagctatgtggtacagctaaaaacgcccgacaccctgaatctgggctatgtctccccggcggccaacctgccgctcaaaccgatggtgggcaaagatctgtgcgtcaacatcgaactggatggtggcggtaaacgacatatcagcgggctggtcacggcggcgcgggtggtgggccatgaagggcgttcggttacctatgagctgcgtatggagccgtgggtaaaactgctgacccataccagcgactacaaagcattccagaataaaaccgtggtggatattctggatgaagtgctggcggaatacccctacccggtggaaaagcggctggtggaaagctacccagtacgcacctggcaggtgcagtacggtgaaactgattttgattttcttcagcgactgatgcaggagtggggcatctactggtggtttgagcacagcgaggacagccacacgctggtgctggcggatgccatcagcgcccacaaagcatgtccggactcgccgctggtcgagtggcaccaggaagggctgaagctggacaaggagtttatccacactatcacggcaaacgagagtctgcggactggccagtgggtgctggatgatttcgattttacgaagccacgttcattgctggcaaacacggtggcaaacccgcgtgaaaccggtcatgccacctacgagcattatgagtggccgggagactacttcgacaagggtgaaggcgagatgctgacgcgcattcgtatggaagcgcagcgcagccccggtagtcgggtgctggggggagggaatatccgcacactcatgaccggttataccttcacgctggaaaactatcccactgccgaagtcaatcaggaatacctgctgatgcagaccttgctgtttgtgcaggacaacgcgcagcacagcgggcaggaccagcactttaccttttccacccgttttgaactgcacccgacccgtgaggtgttccgcccgcagcggacggtgagcaaaccccacaccaaagggccgcagagcgccatcgtcaccggcccggcgggccaggaaatctggacggatcagtacgggcgggtaaaggtacagtttggttgggatcgctacggcaaaatggatgaaaacagctcctgctggatacgcgtcagctacccgtgggcgggcaaaggcttcgggatgatccagatcccgcgtatcggccaggaagtgctggtggatttcaaaaacggcgatccggatctgccgatcatcgtggggcgtacctacaaccaggacaccatgccgccgtggggactgccgggcgcggcaacacagagcgggatatacagccacactatcggcggcggaccgaccaatgccaacgctctgcgttttgaagataaacccggtagtgaagaggtctggctacatgctgaaaaagatcagcgtattgaagttaataataatgaaagtcactgggtggggaataatcgggttaaggtcattgatcagtcagaaatagccactattggcgctgtccgcgaccataaagttcagtatgacgatacctctctggccggaggaaataaaaccattcagacggtaaaagagttatatctggcagcgggtgattctattactctgagttgtggtgacaccgttctgtacatgagcagtaagggggaattttacgtaacctgtaaaacgttcaatattactgcaacagatgccgatggtcagattaatactataaaagggcagctggatttaaatatggataaaagagaacccaaagtaggaacatttggtgagtcagaaaaaacagcaatggcagcagtaattaaggaaactttcccacccaaagaatag

SEQ ID NO: 372722 - DNA, 519 bp, Salmonella enterica
atggcagtaagactgacttttgacgggcaaaagctgacatggcctggtatcgggatatttaaggcgaccacggggttaccggatttacagtggccagataaacagtgtgtgccggatgcggcgataccggaagggaattataaattgtttattcagtttcagggggaggcaccgataagaaatgctgcggattgtgatctgggaccatcatggggctggagtaccattccgcgaggccaggctgccggaacatgtgagatgtactgggctaactggggatataaccgtatccggctggaatcagcggatgagaagacccgaaaagcctgtgggggcaagcggggtggtttttatatccatgattccaccaaaggttacagccatggttgtattgaagtggaaccggtttttttccgtattctgaaacaggagacggaaaaagaaaatggtgaaaagacatttacggttaatgttaagtatgtttctggtcagcaaacgaatggtggaacaaaacaataa

SEQ ID NO: 372723 - DNA, 462 bp, Salmonella enterica
atgccccgtaaaataatgcttgttttttttctctttatatctgaggtctgttatgcccaagtggttgtatctgaatttaatttgtcagatataaatcgcggtggaatgacgaaagtacaggcagaaaaactactcattattgcacttaaatatcaaaaatatgatttatcgctggatggcgtttttgttgacggtgatttgcaggataaacacggaaatcctccccatccgggatattatgattttagccttggttatgatacaccgactgccggagcaatcgattattggggactgttttcagtaagttctcaaactggtgatatatgggaaataaataaatgtgagagaattatatttccgcagttgcaaaaaatacaacaagaaataatgaaaaaaactggcgcgacatttgccagtgaagtggtacagcgccgggggctgggctgtacagatgaatag

SEQ ID NO: 372724 - DNA, 471 bp, Salmonella enterica
atgggtaattatgataaagcgtgtaataacgtgggtgcggtaagatttgtccaggagcacatgaaggtttgtgagataattgcaaaagagcttgacgtaccggtagagaatatactgggtcttgctgctgccgaaagtcaatatggtacaggtcgtattgccagggaatataataattacttttctctccaggctcctgcatcatttcagtcaggtcgggttcatccaaaggatagtaacaaaacttgggtggctattttttcttcgttttcagtttgtgcgcgatcttttgctgtcaagtatggtgacgctgttcgggggaaaaaagatgctctggccttctctgaagctctggtagctgctgggtttaattcaggatctcatattactggtggtacggataattacgccaggataactgctggaataattattatggtgggtcggagaatagcatgccccgtaaaataa

SEQ ID NO: 372725 - DNA, 768 bp, Salmonella enterica
atgcgccggccagcagtggtatcagccccggcgatgttcggcaggctgccggaccagcgcgactatgtgcgctggcgagtgggcgctgaagagggacgaatatggcaggactggctgaaccgccagacgtgggtgggcagcgggcggcatatcgtgttgccgggaggccagacgaccgatgaagagcgtgacggctggatgcacctgtcgccgcgtggcgaacatgatatgcccgcgccggaacaccatccgctgccgtggagctttgtgatgtcgccgggatttttgccgatgggtgggacgacggactggctgaccggagtgctgatggcgtcacgggatagcgtgggacgcccgtggccgctggtgatttaccagcgctgcggtcgggagtggctggacgagagtttgcaggagacgcagggctggctgtactggctggcgaggctggcggcgcagcatatcacgccggacacgatgcggcgcgggcggctgacggagcaggtggaccagctatgggtgatatggcagccggggccgtggtgggcgcagtggctgcgcgggttacgacgaacatcgcagctcagccgggaactgactgggctgccggatgaagcaccggtagtagaactgccgggcgtgcgttatctgccgtggccgggctggccgggtaagacgttggggcaggcaacaccggggcaaggctggttctggcagcagaacagtgaagggcggtatgtggatgcgctgcgactggcggagaaataa

SEQ ID NO: 372726 - DNA, 3870 bp, Salmonella enterica
atgcaaaaatttcttagtctgcttttttcccggcgcgcgctggcgattgtgggcgttctggttctggcgctgctggtctggtttgtcgggccgctggtgtcatttgataccctgcgcccgctggcctccgtgggcagccgggtggtgaccattgccctgttgctgatgttgctggtactgtggctggtcaactggtcgatgagtatcatcggcatcagtgtcctgtgcctggcgattggcttcgtcacaccgctgctggccctgggcgatgtccatccgtttgcgccgctgtgggtccgcctgaccctgattggtttcatcctgctgatgtacgcgctgtacggcctgtaccggctgtggcgtgcgctgcgtatggatgaacaactgctgcgtcgcttcctgcatccgcgcggggaagaggtaccggtggcaggcgagatcaaagccgacctgcgcaccgtcaaccatattgtcacgcaggccatccggcagctgcggcagttgcgggtggatatgcctggctggcgtaaaatcttcgagggaaaacgctttctgtatgagctgccgtggttcatggtggtcggcagtcccggcgatggcaaaaccacggccctgctgaacaccggattgcagttcccgctggcggagcaaatggagcagacctcgcgtatcctgacagtgccgggtggcggcacgctacactgcgactggtggtttaccaacgaagcggtgttgattgataccgccggacgctacgcccgccacgatgacggtggtgaagcgagcgccgcgcagcgtaacgccggagagtggcagggctttctcggtctgctgcgtaaacatcgccccggcgcgccgcttaacggcgtgatcctgacgctaaacgtggcggatttaaccgcacagtcaccggcggaacgcctggcggcctgcgccgctctgcgggcgcgactggcagaactgcgcgagaccctggggattcgctttccggtctatctggtggtcaccaaaatggatttgttgccggggttcagcgagtattttcgcacgctgaccagccatcttcgcgcacaaatctggggcttcacgttgccgtacagccgcaggcgaaaagcgggcgacccgcaggcgctgcacgccgcctgcgcgcaggagctggcgcgcctgacgctgcggttggatcagggactggatacccggttacaggaagagtacgaccttaaaagccgccagcggctgtataccttcccgcgtgagttcgccgccctcggcgagccgttgctggaggctattgaacagatcttcctcgattcaaaattcgatgccacgcaactgaataacacgctgcgcggggtgtttttcaccagcgccgcgcaggcgcaggccgacgccgtggccgaccagttgagtatctggcagcgctttgtccgggcgataaaaaccgcccgtggcgaatcctccgcctctctcccacacgctctgccggacggcaaccgcagctactttctgcatgacctgctgacacagtttattttccgtgaagcgcacctggtggagccaaacctccagtgggcctggcgttaccgcctgctgcgcctcggcgggcacctgctggtactggtgctggcattcctgttgtggcaggggatgcagaccagccagcagaccaacggcgactatctgaatgaaatcagcgcccgcgcgacccggctggacggtgaagtgaaagcctacaccggtaaaccggcgatggctcccgtcccggcactgctggatagcgcaagggaactgtccgcctggccggaactggacccggacgcgccgccgctgacctggcgctacggcctgtacagcgtaccgccggtaaccgacagcgtggcgtcgctgtacaaccgtctgctggatcaactgctgctgccgccgctggtgaaacggatggagtatgtgctggcggacgccattgcccgtcaggatagtaaagcggcctacgatgccctgcgcatctatctgctactgaatctggataaagatcacgaagataaatacaacgcggcggagatccagtcgtgggtgattaacgatctggggaacagcgacagcgtggccgggttcggcgggcgcgccgccgtgctgacgcatatcgaagcgctgtttgacggcagccgggtggtgcattcaccgtatgagaaagatgaggcgctgatccgccaggcgcgggcattcctcgacggtcacaccagtaccgagcgtatctacgcgcgggcgctggcggcaatggagagcgaagcgccgcaggagttcacgctggtacgcgccgtcggcgcggatgcgggaacggtgtttgtgcgtagcaacggcgcgccgctggatcggggcgtgccgggtatttttacccgtgaaggataccgggagctgttcgacaaacgattaccggaatttgtggcggcggcgacggcgaacgatggctgggtgatgggccgggagagtacgccaaaaaagctgactgacagcctgcgcagccagataccggggcaggagcagtctgtcgcccgcgaagtccgccgtttgtacctgacggaatatgcccgccgctggcaggattttctggacagtatccatagtatcaacagtgccggggaagagggcagttccggcctggcctatgatttacaggtgctgcgcaccctggcgtcgccggactcaccgctgatgcggctgggaaaagcggtggtggagcagaccacgctggtgccgccgccggacccgcaggccagacagaaacaactggcgcagcgcgcatccggtaacgcggggaaagtggtacagacggcaaaactgttccaggatattcacccggaagaacggctggaaaaaacgctggtggatgatcgtttcgccgcgctgcgcgaggtcattgccgggcggacggacggcggacagagcggcggtgggacgatgcagatcgcttcgctgctgaccatgctcaacgagtattacacccaactgaccattgctgatagcgcgctggcggcggggacgttgccagcgcgcattactgccgcagacaagttgcaactggaggcggcgaaactgcctgcgccgctgaaaaacatcctgctggatctgacgaagcagggaacgcgcaaaatcaacgccgggaccggcgacgtgctgaacacccagatggaggcgatgatgggcgacgactgccgtgacgccatcgacgggcgctatccgttcgccgacagtccgcaggaggtcagcgccgaggactttaaccgcatcttcgccagcggcggcgtactggatgctttctggagcaaacaactggctccgctggcggacaccgccagcgacccgtggcgctacaaaccgaccgaaggcaacatgacattgcaggggccggatctgacgccgtttcagcaggcgaagcagatccgcagcgtattttttaacagcgagggcgggaaaaaattttcctggtcgatgcagattagcgtggtggatatggacccggccatcacggaactggtgattgatatcgatggtcaggtgctgcgctacgcccatggtccggaccgtcccctgaaagtaacgtggccgggaccgcgcaacggctcgatggcggaaatcaccgccagcccgcgtattcgccaggacacctcaacgctactgaccggcgggccgtgggcgctgtttcatctgctggacgccggaatggtacaggaaacggcggtgcgggggcgtcaactggtggaatatgattttgacggtcgccgggtggtgctggaaatcaccgccgggcgggattttaacccggtcagccgggagctgttgcagaacttcagttgcccggcgagggcgctgtaa

SEQ ID NO: 372727 - DNA, 357 bp, Salmonella enterica
atggagtcatcattatttgatgccataaaaaatgacctgaatatagatgtcgctactattataaaggataaaacaaaggtagagattcttgatatctcacctgtatctaaggtctatgcagaatctctggccaggatggattatgaaaaagataaggccaaaaataaagtggcaatattagataaaaaatcctatttcgatagttattatgaaaatcaggttaaatctatcgtggcaaaatatacctatattaacaaagataaagaaaaagatattttcattgcatccagcttcatgaatgctgatgagtgttctgtaagatttaatggttatattactttatccagggaattttaa

SEQ ID NO: 372728 - DNA, 774 bp, Salmonella enterica
atgatgaaaaaatcaacctatgatgtgtctcatcattcggcagtatgtggcgtgacgggggattattatcggatctcagcgacatatcacataaaacgatctatccgtgtttttttgatcattttatgttgtttattacccggtggcgtttttgccgggtccctgattaacgcaggattcatttcccccgataatgtcaacctcagtatacgggattttctgggattttatgccagtgataacttacaggaaaaagataatacactgatgtatgtgttgggggtagcggatgccacagaaggtaagacgtggtgtggatatggtcaggttgacagtataacaataaaccatactgtgctggcctggcttgatcggtactctgtgaaaaagcctgatgcaagagcttcggtgctgatagaggaagcattagttaaaaatttcccctgtcaggggactgaaccctccgtaaaaattgcttcccggtcatctcccattttatccctgactccggatgcgcttaatctttcaggtaatgacttttttaaattttgggtgtctggtaatcaacgggataaactcagggcgggtgtctatctgctcggcgtggaggatgcgacagagaacaaactgtggtgtggatacgctttatttaagacgctaacattaaatgaattagtctatgtttctcttaaaaataaaaccaatgaggaactgaattctcgcgcggctgaacttatcataaataaattaatagagtatacctgtaagatataa

SEQ ID NO: 372729 - DNA, 1305 bp, Salmonella enterica
atgacagacagtaccctgacgccgccagcggcggacatgatgtcctttttgtccaccacgccggagcataaggacagtgaatatgaaacgccggtacacaccagccagcgcacggaactcaatgtcatcgttgaagacggtccggacagcaaactccggctggctgaaatcagcgcggcggctaacccgttgctcgccgctgcccggcctttattgtgcgctctcgcagccatgcccgctaaactggatgcggccctggtagagccttaccgtaatctgttggtacgcgagatgcatctgtaccagacattatgcgatcaggcgaacctgcggcgcgagcacgtactggcggtacgttactgcctgtgtacggcgcttgatgaagccgccaataacacaacctggggacggcgcggcgtctgggccggaaaaagcctgctggtaacatttcatggtgaaagcgaaggcgggataaaacttttccagatcatcgggcgtctggcggccagcttccaggaacatggcaacgtactggaggttatctaccacctgctggggctgggatttgaaggccgctacagcgtgcagccagacgggcgtaagcaactggacaatattcgtcagcaactgctgacacagctttcacagcgtcgcgatccggtcatgcccgcgctctcgcctgactttcagggggcgataagcggacgactgcggcggatgcgccgggtgccggtctggctgagcgccgggatagccctgttggcgatgctgacgctgtttggcctttacagccaccggatggatgtgcagaccgtcaccgtacaacagcatattgatgcgattggtataaaactgccgccgccgcccgtgccggttcataagctgcggctgaaaatcctgctggcaaacgaaatcgcccgtggcctgctgaccgtggacgaagatgaccagcacagtagggtggtcttccgtggcgacgccatgtttgtgccgggacagaaaacggtgagtgacgcaatccggccagtgattaacaaagcggcgcgggaaatcgcccgcgtgggcggcgcagtcactgtaacgggtcacactgacagccagcccattcattcggctgaattcccatccaacctggtgctgtcggaaaaacgggcggcggaagttgcggcgttgctgacctccggcggcgtacctgccggacgggtacatatcgtcggcaagggcgatacggtgccggtggcggataacggcagtaaagccgggcgggcgaaaaaccgtcgggtggaaattctggtagtggagtga

SEQ ID NO: 372730 - DNA, 1344 bp, Salmonella enterica
atgagctggaatgaccgcgtagtctggagtgaaggacaatttttactgccgcagatgtttcagcagcaagagcgttatctggaacacgtcatgcattaccgcagcctgccgctgaccccctttttctggggattcagccactacaatattgatggcgaagcgctgaacatcggtaaactgatactgaaagaggcatcagggatttttcctgacggcacgccgtttaacgcaccggaccacaccccgctgccgccgccgctgaccatcctgccggagcacctgaaccagcagatttgtctggcggtaccggtacgcgcgccgaacagcgaagaaactacgtttgacaataacccggaatcactggcgcgtttctcggtacatgaacacgacatccgcgacgccaactcgctgggacgtggcgcgcagttattacagctcagtcacctgcgcctgcggctgctgccggaaaaagcggtgacgggcgcctggattggcctgccgttgacccgcatcaccgggttgaaccctgacgggcggatagatatcgaccacgacctgatcccgcccatcattaattatcaggccagttcactgatgtgtacctggctgtcgtggatcaacgatctcatccggatgcgggccgattcgctggcggaacggctgaccggcagcgacaaccacggccatgaagcagcggaggtctccgattacctgctgctgcaaattctcaatcgctttgagccgctgctgactcacctggcgaaaaccccgctggccccggaagtgttgtatcgctacctgtccgaactggccggggaactctccacctatgtgcgtccacaaacgcgacggcccgctgaatacaaagagtacaaacacctgacgccctatgccgggttgaaatcgctggttgatgaggtgcagttcctgctgaatgcggtactgatccggggcgcgcagcgcatcgagctgaaagaggggacttacggcatcctgaatgcggtggtggctccttccgatcttgccgatttcagcacgctggtgctggcgataaaggcttcaatgccgaccgatgtgctactgcaacattttgccgcccagaccaaaatcgggccatccgatcgcctgccggaactgatccgctcgcatctgccggggctggctttgcaggttctgcctgtaccaccgcgccaaatcccgtttcaggccggatacatctattacgacatccgccgcgagggagcattgtgggaacacattgcccgttacggcgggatggccatgcataccgccggggaatttccggggctggagacagaactgtggggagtgcgcgataaatga

SEQ ID NO: 372731 - DNA, 537 bp, Salmonella enterica
gtgaataaatggcgtaaccccactcggcggttatgtgcggtagctatgccttttgtactgctcctgctttccggatgcggcagtagcgatgcgttacctgacctcgaatcacagcgactcgacctgagcgtgaaagcctccgataaggtgaatcctgacaatcagaagaaggccgcgcccattgagattcgtgtttatgaactaaaaaatgacgccgctttcacgacagctgattactggtcgctccatgacaacgacaaatccgtccttaccgacgatttagtgcgtcgcgacagctttattttgcgtcccggcgaagagaaaaaactgcgtcgcccgctgaatgcgcagaccacggcaatcggcgtactggccggataccgtaacctggccaaatcggtctggcgggtaacctacaaaatcccggaagccccggaaaaagcctggtacagcagcttcataccggggaaaggaaaagtgcagttggaggcggaactggaacaaagcgccattgtaattacggaacgggataaatga

SEQ ID NO: 372732 - DNA, 486 bp, Salmonella enterica
atgtcttatgacatttttctgaaaattgacggcattgacggcgagtcaatggatgacaaacacaaaaatgaaattgaagtactgagctggcgctggaatattcatcaggaatccaccatgcacgccggtagcggtctcggttccggtaaggtctccgtcactaatctttcatttgaacattacatcgatcgcgccagcccgaacctgttcaaatactgctcttccggtaagcacattccgcaggccattctggttatgcgtaaggctggcggcaatccgctggagtacctcaagtacactttcacagatctgattattgcaatggtatcgcccagcggaagccagggaggggaaattgcgtctcgcgaatcaattgaactctccttcagcaccgtgaagcaggaatacgtggtgcagaaccagcagggcggcagcggcggcaccatcaccgcaggctacgacttcaaggccaacaaagaaatttaa

SEQ ID NO: 372733 - DNA, 384 bp, Salmonella enterica
gtggatactgccgtgaaatggttaatattagttactttcagcataagtggaatgctggtatggcagccatcctttgcacaagaagcattgaccacacaatattcacagtcggaactcttaaaaaactgggcgctgagtcattgtctggcattagtatacaaagatgatgtcgttaaaaacgatgccagagctacggccagtgcttaccttgaatatggtaaacaatctgtggagatttaccatgaaattgatgagattgcgaaaaaatattcagggttgaaatataacggttcgatatcatcagattttaataccatgaagtgcatagattttatccatgacagggaattaaatgaattaattaaaaggcgtgtcgagaagtaa

SEQ ID NO: 372734 - DNA, 486 bp, Salmonella enterica
atgaacagaccttcattcaatgaagcgtggttagcttttaggaaggtgaatcattccgtcgctgatgtgggtagcattattggtggaaacgttgggaaaaatataactggtggttattttcaaaatgcctgccctattcgaatgagctatgttttgaatgcgacaggattcccaatagcccgtaactctccgtatgcaaaggttagtggtgccgataataaattctatatttatcgcgtgaatgatatgattgattatcttactcatactatgggcaagcctgatcttattgttaataatccgaaacagagtgactttatagggaagaaaggaattatcgtagtaaaagggcatggctggagcaatgccagaggacacgttacattatggaatggcagtatctgttcagatcagtgccacttattaaatgatccagataatggaccatttgttcctgaagttgggactctgtggatactgccgtga

SEQ ID NO: 372735 - DNA, 486 bp, Salmonella enterica
atggcttatgacatttttttgaaaattgacggcattgatggcgagtcaatggatgacaaacacaaaaatgaaattgaagtactgagctggcgctggaatatccatcaggaatccaccatgcacgccggtagcggcctcggctccggtaaggtctccgtcaccaacctggattttgatcactatatcgaccgcgccagcccgaacctgttcaaatactgcgcctccggcaagcacattccgcaggccattctggttatgcgtaaggctggcggcaatccgctggagtacctcaagtataccttcaccgacctgattattgcaatggtatcgcccagcggaagccagggaggggaaattgcgtctcgcgaatcaattgaactctctttcagcactgtgaaacaggaatacgtggtgcagaaccagcagggcggcagcggcggcaccatcaccgcaggctacgacttcaaggccaacaaagaaatttaa

SEQ ID NO: 372736 - DNA, 426 bp, Salmonella enterica
atgcagaagcctattttatcgttgaatagcacctgtattgtcgggggcattctgtggttacttccggtaatagttgttcatgccgatgagattgtctgccctgcggttattcatttttctcaggctccaataatttcctcagcggaaggatggaatgtctcatcccgtgcagcgcgtatgttgaatgatggtggttttctttcgtctggcgatcccaaagagcaagcagatctgaaaggtgaagatgcagtcgttgatgggaaaaaggggcgtctgtgggagatagacccggaggataatcgccgggggatctggttctcatgtagttatggacagtgggctgttctgcttgccagaaaagttcagggaacggtcgcgacatgctggagcccggatgtcttaccggcaaaattgatttgtaaataa

SEQ ID NO: 372737 - DNA, 402 bp, Salmonella enterica
atgccatatgtttatgctaatgcaaaggctttacaggatacagaaaaggtaggaaaccaccatcagtgtgttgaacttattcaacactatatacgagtaggacaaacgagtacatggcagcaaggggccgcagtatttggaaacaaaaacattgaagtcgggacagttatcgctacttttgtgaatgggcgatatccgaaccacaatagtggcaaccatgctgcattttttctggggcaagatgctggcgggatatgggtgatggatcaatggaaagatgatatcgcaaaaccccgtgtgtccaaacgttatataagaaagttgcataatggaagtgttcgtagtgacgggacttatataaggatgagtaataatgcagaagcctattttatcgttgaatag

SEQ ID NO: 372738 - DNA, 1509 bp, Salmonella enterica
atggcaaacagtaatatgcaggcaaccgacgcagttgctcaggataccgtctccgcatccggtgaatttgatgcgttgctgaatcaggccttccgacccaagactacccaggcggcaaaagccgtggaagccgcggtgcagacgctggcgcaacaggcgctggcgaacacgatcaccgtcagcgatgacgcctataaaagcatcagcgctattattgcgcagatcgactttaaactgaccgaacagatcaaactgatcctgcaacatcccgactggcagaagctggaatcctcgtggcgcggtatggagcatctggtttacaacaccgagaccgacgaaaagctgaaaatccgcttcatgaatctgtcaaaagatgaattgcggcgcaacatgaagcgttacaagggcatcgcctgggatcaaagcccgatgttcaagaaactgtatgaagccgaatacggccagttaggcggcgaaccttatggctgtatcattgcggattactacttcgaccatacaccgcccgatgtggatctgcttggctctatcgccaaagtcgccgcgtcggcccatgcgccgtttattgccggggcttccccctcggtactgcaaatggactcctggcaggagctggcgaatcctcgcgacctgactaaaatcgtcactcagaacctggaatatgcgccgtggaactccctgcgggccagcgaagactcccgttatattggcctgacgatgccgcgttttcttgcccgcctgccgtatggcgcaaaaaccaacccggtggacgagtttgattttgaagaagatgcggatggttctgaccataccaaatacgtctggagcaacgcggcctacgcgatgggcgtaaacatcaaccgttccttcaaacactacggctggtgtacgttgattcgcggtgtggaatcaggcggtgcggtggaaaatcttccctgccataccttcccgactgacgatggcggcgtggacatgaaatgcccgaccgaaatcgccatctctgaccgccgcgaggctgaactggcgaaaaacggttttatcccgttaatccaccgtaaaaactcagactatgccgcctttatcggtgcacagtcgctgcaaaaaccacaggaatactacgatccggacgcgacggccaacgctaacctgtctgcccgtctaccgtacctgttcgcctgctcgcgcttcgctcacttcctcaaatgtatcgtccgcgacaaaatcggttcctttaaagagcgtgaggatatgcagcgctggctaaatgaatggattatgaattatgtcgacgccgatccggtgaactcctcgcaagaaactaaagcccgtcgtccgctggctgccgctgaagtagtggtggaagaggtcgaaggcaatccaggttattacgacgcgaaattcttcctgcgtccgcatttccagcttgaagggctgacgggatcgctgcgcctggtgacaaaactgccgtcagtgaagcagggcaatgcctga

SEQ ID NO: 372739 - DNA, 543 bp, Salmonella enterica
atggctatcaacaatagcgcgcagaaattcatcgcgcgcaaccgcgcgccgcgcgtgcagattgaatatgacgtagagatttacggctctgagaaaaaaatcgagctgccgttcgtgatggcggtgctggccgatctggccgggaaaccgcgtgaagaactgccgccggtgacggatcgcaaattcctcgatattgatattgataacttcaatgagcgcatgaaagccattgcgccgcgcgtggcgttcgctgtgccgaatacgctgacgggtgaaggtcagttgatggtcgatatcacgctggaaaatatggacgacttttcgccggcacagattgcccgcaaggtggacgccctgaaccagttactggaagcccgcactcaactggcgaacctccagacctacatggatggcaaggccggggcggaaaatctggtcaataaactgttgcaggacccgactctgctgaaaacgctggcgaatgcacctaaatcggccgctacccagcaaggtgtgtcagcggttaatgaatcagcggaataa

SEQ ID NO: 372740 - DNA, 2640 bp, Salmonella enterica
atggaaactcctgtttcacgcagtgcgttgtatggaaaactggccggcccactattccggtcgctggaatcggcaacggcattttgcaaactacgctctaatccctgggttgagctgactcactggctgcaccagttaacacagcagcccgataacgatattctccacgttcttcggcattaccagatccctctttctgatgtggagaaagcgttactccggcaactggatatgctgcccgccggggccagcgccattagtgatttttctcaccatatcgatctcagcgttgaaaaggcctggatgctggcgagcgtccgttacggcgataacaaaattcgcagcggctggttgctgctggccttgttgaccacgccagaactgcgtcgggtactgagcagtatctgtgcgccgctggccacgcttccggttgatgaactgacggaaatactgccctcgttgatcgaaacatcgccggaagcgcaggagcgcccttacgacggctccggcctggcatcagccattcccggtgaaagcagtcaggcgattcccaacggcgggcaggacggtaaatccgcgctggcaaaatactgtcaggacatgacggcacaggcgcgcgacggcaaaatcgacccggtgacggggcgtgagcatgaaatccgcaccatgacggatattctgctgcgccgtcgccagaataatccactactgactggtgaggcgggcgtcggaaagacggcggtcgtcgaaggttttgccctcgcgattgcgcagggggaagtgccgcccgcgctgcgggaagtacggctactggcgctggacgttggcgctctgttggccggagccagcatgaaaggcgagtttgaatcgcgtctgaaagggttactggaagaggccgggcgctcgccgcagccggttattctgtttgtcgatgaagttcacactctggtgggcgcgggcggcgcatccggcacgggcgatgccgctaacctgctgaaaccggcgctggcgcgcggcaccctgcggactatcggcgccaccacctggagcgaatacaagcgccatattgagaaagatccggcgctgacccggcgttttcaggtgttgcagattgccgagccggaagagatccccgcaatggaaatggtgcgtggtctggtggatacgctggaaaaacaccataacgtactgattctggatgaggcggtacgtgcggcggtacagctttctcaccgctacattcccgcccggcagttgccggataaggccatcagcctgctggataccgccgcggcccgcgtggcgctgacgctgcacacgccgcctgccagcgtacagttcctgcgccagcagctaaaagcggcggaaatggaacggtcgctgttgcagaagcaggaaaaaatggggattcagtcagatgagcggcgcgatgcgctgacggcgcgaattttctcgctcaacaatgaactgactgcatccgaatctcgctggcagcgggagctggaactggtacatacgttgcaggaactgcgtgtcgcagagtctgatgctgatgacaaaaccacgctgcaacaggccgaaacggcgctaagggagtggcagggcgacgcgccggtggtgttcccggaagtcagcgcggcggttgtcgcggcgattgtcgccgactggaccggtattcctgccgggcgcatggtgaaagatgaggccagccaggtgctggaactgcctgcccgactggcgcaacgcgttaccgggcaagacggcgcgctggcgcagattggtgaacgtattcagaccgccagggcgggactgggcgatccacgcaaaccggtgggcgtgtttatgctggccgggccgtccggtgtcggtaaaaccgaaaccgcgctggcgctggcggaggctatctacggcggtgagcagaacctggtaaccatcaatatgagcgagttccaggaggctcacaccgtttccacgctgaaaggcgcgccccccggctatgtgggctatggcgagggtgatgtgctgacggaagcagtgcgtcgccacccctggagcgtagtgctgctcgacgagatcgaaaaagcgcaccatgacgtccatgaactcttctatcaggtgtttgacaagggcgggatggaggacggtgagggaacacatgtcgatttcaaaaacaccacgctattactcaccaccaacgtgggttccgacctcatcagccagatgtgtgaagatccggctttaatgcccgacgctacggggcttaaagaggcgctaatgccggaattacgcaagcatttcccggcggcatttctgggccgcgtgacggtgatcccttacctgccgctggacgaaacgtcgcgtggcgtgattgcccatctgcaccttgaccggctggtggcgcggatgagtgaacagcacggcgtgacgctgacgtatagcgaggaactggtcgcacatattgtggcgtgctgtccaatgcatgaaacgggcgcgcggttgctgattggctacatcgaacagcacatcctgccgcaactgtcgcgctactggttgcaggccatgacggaaaaagccgctatcaggcaaattgatatcggcgttaatggtgatgagcagattgtttttgagatcgtttgctga

SEQ ID NO: 372741 - DNA, 903 bp, Salmonella enterica
atgaaacaagacatgtgggaattacggaaaatacagtcgcagggtataacggataacgcacagtatcccgcagggacatacatcgtatttactgccgcctccccctacattccgctttttgagcaacatgggaaagacgatatcgcgctcagtcttgttcgccacgaagaggcgtggtggattgttaatcactctgatgaactgtgctgtgccgtcaatgagcaggtgatggaacctcatcaccgtatgcggctgaatgatggagatacgattgaatggggtctgtcatcctggtgccttgcccgcaccaatgatgagtcccgtcccgatgtttcgtttcctcagttggttcagtcatctgaatccgttgctgagtacctggatctggactggtttaaacaacaacagctcaatccgcagaacccgttcgatattattcccgtccgggaaaccgcgtcctcttacaccggccatgaagcggatagcacgctacaccagctttaccaggaatatcagcaggcattgcggccctccgggcaggaaaagcccctccgtcctaaaccgtttccccgaaatgaagacgctgtcacccaggatttgacgtcgttatacgataaaaagggcgacaccgacacgttacaggatatggtggcaggcgcgcccggtattgatgccattctggatacgctggacacgaccggtgagggtgaaatgcactggctggcgatggaatcaatgcccgatatcctacaactgctctcgccggaactgggggggaaaaccgcacatagcgagatactgcccgatctgacccgccgcgagcatcgtattattggcatcgacagccactaccgaatcactccgacacagaaaaatggaaataccgcccatgaaaaaaactga

SEQ ID NO: 372742 - DNA, 825 bp, Salmonella enterica
atgaaaaaaactgacacgcttcctgctaccctgtccgcgctgatacaggaatactctattgcggaggggattcagatggcggagcagcaggttcgggaaaatccggcgaaagcgctctgccgccacagcctgtttcagttgctgtgtgtggccggagactggtcgcgggcgctacaccagcttcagctatgcgccaggatagaggccaattatacccaggaggcccggctgtaccgggagctggttcgctgcgaaatgttccgccacaccgtttttcagggtgaacaacgacccggttttcttctgccgcagcccgtttgggtggagtcactgctggcggcactcgcctgtcatgacgataccggtgaggttgataaacaccgtaataccgcactggaagccataacagacacgggcgggcagtggaacggcggcgcatttgactgggcgagcgacagcgattcccgccttggcccggtacttgagctggtcaccggcggcgtgtatatctggctaccgttttcgcaaatacgctcgctggaatcgccgcaaccgacgcgcctgaccgatctgctgtggaaacccattaatatcaccctgatgaatggcgatacgcacggtgcctggctctttacccgttacagcggttcggaaagtgcatctgacgccctgcgtctgtgccgggaaaccgcctggcaggacggccccggcgaaaccaccgtgcgggcgctggggcagaaagtgtggctgaccagccacggcgatatcagcctgctggacatggcccattgtacctttcatgctcaggaaaacgatggcgcatga

SEQ ID NO: 372743 - DNA, 495 bp, Salmonella enterica
atgagcacgtctcgttttacacccgctaaccacctgctgcccaccctatttgatcggctgtgtgacaatgctccgtatcagaaaattgaccgggatatcagcgtcacgccggtacaactgaaggagatcattcgtcgggatctctcctttttgctcaataccattagccacgagggtgacatcgacgcccggcgctatccgcaggcagcggcgtcagtgctcaactatggcctgccgccgctggcgggcagctttatgtatgagcataagtgggacgatatcagcgaggcgatccggcgcgccattatccgtttcgaaccccggctgaacgccgccacactcagggtcacgccattgctcgataaaacccggcagggtagctataacacgctacagtttgaaattcgcggacaaattctgacgcagccgtatcccacggagtttctggtacgcagcgcgctggatatggagctgagccgcattacgttcttttaa

SEQ ID NO: 372744 - DNA, 1884 bp, Salmonella enterica
atggatccacggctactggagtattacaaccgcgaactgagctacctgcgggagaccggtgctgagttcgccaccctccatcccaaaattgccgcccgactggggatgcagggaaccgatattgccgacccgtatgtggaacgcatgatcgaggcgttcagctttctgagcgcccgcactcagctaaaaattgacgccgaatttccccgcttcacacagcggttactggaagtcgtcagccccaattatgtcacccccacgccatcgatagcagtggtaaagctgtatcccgatacgcaggaaggcgacctggcgaaaggggtcaccgtgccgcgcgataccgcgttcgtttcccccatcccggaaggcgaaaataccgcctgccagtttcgcagcagccaggacgtcacgctgtggccgctgtccatcgaggaggtacgcctgaccgccgcgccgccggatatgcccgccctgcaccgctatctgccgcctaatattcatgtcgccggggcattgcgcatcaccctgcgaaccttcggggaactgactttcagcgagctggccggtccggcacggctgcccttttacctctgcggcgaagaacgcattgcgtcacacctgtttgagctgctacataccagcgccgtcgccacactggccggtgaacccggtcactttgacggcgaactgaatgtgaatcttcaacacccggtggcgcacgaagggctggagccagggcaggggctgctgccgctcgcctggaacgtgtttcacggccataatctgctgcatgaatttttcgcctgtccggaacggttttacttcttcaccccgaccggattgtctgccgggttacaaaaggtgcagggcaatgtggcggaaattgttatactgcttaaccgcctgccgccggactggctgattcatcagacggacgccgcacagttcagcctgttctgtacgccggtgatcaacctgtttccccgcaccaccacccggattgaagtcacacacagcgtgacggaacagcatctggtggtggatcgtacccgtccgctggattacgaggtgttttctgtccaggaagtcgaaggcctggaagcggaaaccacacggaagatgatttttcgtccgctgtatcacacccgtaataatgacgaaggcaaccacgggcgttatttttcactgcgtcgtgagccgcgccgatcgtcagaaagcgcccgccgctatggcacccgaaccccctataccggctcggaagtcttcctctcgctggttgatcagcatgaagcgccctacccggaaaatctgcgccatatcaccgtcacggcaatggtgactaaccgcgatctgccctgccttattccacgtaatggccgggatgatctgaccgtagatgcggcgattccggtggcgggcgtgggtcttatcagaccgccgcgcccgccgcagccgccgctggctgaacgcgaaatggcctggcggctgatccggcagttgtcgtttaattatctgccgctggccgatctggatcaccgcaccggcggccaggcgctgcgcgatctgctgaatctgtttatcccggctcacgacagcccgcagtcgcgccaggtgcgcagcctgattggctgcaaaaccaccccggtgacccgccgactgcccggctccggcctgttggtctatggccggggcgccagttgcgaactgaccgtggacgaagaaggattttccggtatcagtccttacctgttcggtctggtgctggaacactatattgcccgccatgtttccattaataccttctcgcagatgacgctgcactcgatgcaacgcgggcatgtcatgacctggccggtcagaaccgggcaacgggggagcgtatga

SEQ ID NO: 372745 - DNA, 1242 bp, Salmonella enterica
atgaaatggtttaacacgttgagccacaaccgctggctggagcaggaaaccgaccgcatctttaatttcggtaaaaacgccgtggtgccgacaggcttcggctggctgggaaataaagggcaaattaaagaagagatgggcacccatctttggatcacggcgcgtatgttgcacgtttattccgtggcggcgtcgatgggccgaccgggcgcttatgatctggtcgatcatggcatcaaagccatgaacggcgcgctgcgcgataaaaaatacggcggctggtatgcctgcgttaacgatcagggcgtggtggatgcctctaaacagggttatcaacacttcttcgccttgctgggcgcggccagcgccgtcacgaccgggcatcctgaagccaggaaattgctggattacaccatagaagtgattgagaaatacttctggagtgaagaagagcagatgtgcctggagtcctgggacgaagcctttagcaaaaccgaagactaccgtggcggcaacgccaatatgcacgccgtcgaagcgttcctgattgtttatgacgttacccatgacaaaaaatggctggatcgcgcgctgcgtatcgcgtcggtaattattcatgatgtggcacgcaacggtgattaccgcgtcaatgagcacttcgattcacagtggaaccctatccgcgactacaacaaagataatcctgcccaccgtttccgcgcctacggcggtacgccaggtcactggattgagtggggccgtctgatgctccatctccatgctgcgctggaggcccgcttcgaaacgccgcccgcctggctgctggaggatgcgaaaggtctgttccatgccactatccgcgacgcctgggcgccagatggcgcagacggctttgtctactcagtcgactgggacggtaaacctatcgtacgtgaacgcgtgcgctggccgattgtggaagcgatggggacagcctacgccctctacaccctgacgggcgatagccagtatgaagagtggtatcagaaatggtgggactactgcattaagtacctgatggactatgaaaatggttcctggtggcaagagctggacgccgataacaaagtgaccaccaaagtgtgggacggcaagcaagatatttaccatctgctgcactgtctggtcattcctcgtctgccactggcgccgggcctggctccggcggtcgcggcgggtctcctggatatcaacgcgaaatag

SEQ ID NO: 372746 - DNA, 780 bp, Salmonella enterica
atgacgactctggcgggaaatctcgcctatgtctcattactctccttagtaccgcttattgccgtcgtttttgcccttttcgctgcttttccgatgttttctgatgtcagcattcagttacgccattttatttttgctaactttatgccagccaccggagacgtgattcagcgctatattgagcagtttgtcgctaactccaacaaaatgacggcggtgggcgcctgtggactgattgtgacggcattgctgttgatgtacgccattgatagcgccttaaacactatctggcgcagcaaacgcacacggccaaaagtgtactcttttgcggtgtactggatgatcctcacgctcggcccgcttctcgccggtgccagcctggcgatcagctcctacctgctttctttacgctgggccagcgatctgaatacggtcatcgacaatgtattgcgcatccttccgctgctgctctcgtggatctcattctggttactttacagtattgtcccaacaactcgcgtaccgaaccgtgacgcccttgtcggcgcgtttgtcgcagcgttgctgttcgaggccggaaagaaaggtttcgcgctttatatcaccatgttcccgtcatatcagctcatttatggcgtactggcagtgatccctatcctgtttgtctgggtatactggacctggtgtatagtcttgcttggcgcagaaataactgtcactctcggggaataccgaaaactcaaacaagccgcagaacaagaagaagctgaccaaccatga

SEQ ID NO: 372747 - DNA, 930 bp, Salmonella enterica
atgccactggaaaaaggaattgccgaactggtcgccgggtttatcgctgcgggccgcccttcttcacgagagcagaatattgatgatcggagagcgggttatattgccagcacgtcgctggcggatgagaaagaaattcgggtgagttcggaagatatcgtgctggaagggatgacatttcgcgtcgtttcgccgccaaacgcatccggttctctaccctgtatcctctactatcacggcggctgttttgttagcggcggctttctgactcatgacccccagctacggcaactggcctggaaaagcggctgtaaggtgattgccattcagtatcgccttgcgccagagcacacctttcctgcggctcatgacgacgctgaacgcggggccaatatcgtctatcaatacgcggagcagttaggcatcgatcgtgaacgtatcacgcttgctggcgatagcgcaggcgggcatttggcattggtcagcgcgctacgcctgaaatccaccgcccactggtctccggcgaagctgctgttgatctacccgatgcttgacgctaccgccagtttccccagctatgccagcaacgggcaagactacatcatcacccgcgatacgctgttatcgggtttcgaaatgtatctccagggtaccgacctccgccacccggaagccagtccgatatggcgtgaagattttgccggtttaccgccggtgcatatcctcaccgcagagttcgacccactgcgtgatgaaggcgaagcgctatatcaccgtctgaacgaccagggcgtggcgtgtacttgccagcgctatctcggtgttatccatggctttttccagctcggaggcgtgagccaggcggcacgaagcgccatgcgagatgtggcctggcgtgttgtaagtccatcaacaggcaaaatgacctaa

SEQ ID NO: 372748 - DNA, 516 bp, Salmonella enterica
atgaacacattcagaaaaggacttgatttattgctgggcgctatctgttgcctggtgctggcgataatggtgggcatcgcctgctggcaggtggtgagccgctacattctgggcgttcccagcacccttaccgaagagatgctgcgatttctcctggtatgggtatcaatgctgggcatggcttttgtcgctggtcagaaacagcatatcagcctgactctcttactggataaggtgtcgccgacgattcgcggctggtgggatattattctgcaggtcatttttatcgcgttttccatttgggtattgattatcggcggcttaaagatttctgcgatttctatgctgcaaatctcccctgcgctgggcattccgatggggaaaatttattacgcgctcccctgcgcaggcgtactgatcatcctctatgggctgctgaatatcgttgacgccctgaaagctatccattccgccacggataccactgagcacactctggagaaatcacatgattga

SEQ ID NO: 372749 - DNA, 984 bp, Salmonella enterica
atgaagcaacctggttttatacgtctggctacgttggccttactctccacactctctttcttctcccacggcgaaaccattttgcgcctggcctacgctgaaaatagccagccggtaaaagatgcgttgcacttcctggggcagcaagttgaagagaaaacgggcggcgatatcaaagtacagtacttcccggacggacagcttggcggcgagcgcgaactggtggagttgacgcaggtcggcgtcgtcgacatcactaaagtgtcgtccgggctgatggagagtttttcgcctgagtacggcgtgttctcacttccctacctgtttgccaccgtcgaggaatactaccgcgtaatggataacccacaggtgatggagcctgtttatcagtccaccgccgcgcaggggtttatcggcgtaggctggtatgattccggtgcgcgtaatttttatatgagcaaagcgccggttaaacgcattgaggatttacgcgggaaaaagatccgcgtcatgcagagtgagacggcgatccaaaccctcaaactgctgggcgcttcgcctatcgccatgagccaggcggaggtctatacctcgttacaacaaggcattctcgacggcgcggaaaacaatgagttcgctctcaccatcgcccgccacggcgaagtcgcccgttattacacctacgatatgcacacccgcattcccgatatcctgctaatgagtaccctcacgctggaaaagctgacgccggaacagcagcgcatcgtcgaagccgccatcaaggcgtcgatcgaatttgagaaagccgcatgggacaaggaaatagagaaaaccaggctggcggcggtaaaagatttcaacgttgaattctacgagatcgacaaaaaacccttccaggaggcagtacagcctatttacgacggtctgaaaaacaaaccgcggctttacgggctgtatcaacgtatccagacagcaaaaaattaa

SEQ ID NO: 372750 - DNA, 981 bp, Salmonella enterica
atggcaattaagaagctcgatgatggtcgctatgaagtggacattagacctcgcggtcgcgacggaaaacgcatccgcaggaaattcgaaagaaaagctgaagcactagcatttgagcgatacacaatcgccaatgccagtcagaaagaatggggaggccagcgagcagaccgccggactttgagtgagttgctggacatctggtggaaatatcacgggcaaaaccacgagcatggaacaaaagagtttaatcatctactcaaaaccatcagcggcataggtgatataccagtgagcaggatgagcaaaagggctttgatggattatcgttccatgcgactacgtgatggtatcagtgccgcaacgataaaccgtgacatgtacagattatccggcatgttcacaaaattaattcaattggatgaattttccgggcaacacccaattcacggactgccgccactggcggaggccaaccctgaaatgacgttcctggaaaaagcagaaatcgaaaaactgttaaatgttttggctggtgatgacttacttgtcgcgcttttatgtctgagcactggaggaagatggacggaagttgccacgctaaaaccagcacagattacaaattgcagggttaccttcctgaaaaccaaaaacggtaaaaagcgaaccgtgccgatttctgaggaactggagaaaaaagttaaagaggaggccagcgccaaattattcaaagttgattatgagaaattttgcgggattttacgcagagtgaaacctgatataccacccaatcaggcaacccacatcctgcggcatacattcgcaagccatttcatgatgaatgggggcaatataatcgcactgcaacagattctgggacatgcgagcattcagcagacgatggcctatgcgcaccttgcgcctgactatctgcaaaatgccgtcgctctgaatccactaaaaggcggagtgacgttataa

SEQ ID NO: 372751 - DNA, 294 bp, Salmonella enterica
atgaaattaagcgaaaagattaaggccttgcgtgaggctgaagggctaagccaatcaaaattctgtgaaatcatagagttaccgctaagcacacttaaaaaatatgaaggaggaaactttgaacccggtggcacagctttgctaaaaatcactatgcatcccacattccaaaaatatgctctatggcttatgacagataaaaccgcgccggacgcaggacaaatcgcaccggctctcgcgcacattgggccagagtcaacagagtccaaccactccgcgaaaaggattggctaa

SEQ ID NO: 372752 - DNA, 273 bp, Salmonella enterica; identical to SEQ ID NO: 6431

SEQ ID NO: 372753 - DNA, 501 bp, Salmonella enterica
atgacagtgatgacgctcaatctcgtcgaaaaacagccagcagctatgcgccggataattggtaagcatcttgccgtccctcgttggcaggatacatgtgattattataatcagatgatggagcgcgaacggctaacagtttgctttcatgcgcagttaaaacaacgtcacgcaacgatgcgttttgaagaaatgaacgacgtcgaacgtgaacggctggtttgtgcaattgatgaattgcgtggggcattctcaaaacgccgtcaggttggcgcaagtgagtatgcatatattagttttttaacagtcagtcagcgtcgtactttatttatgcatgccggattgactgaaaaagaattcaaccagccatactggcgaattaatgaagaatcatgttactggcgtgatgctttattccgtgcattacgtgaactattcagtctgtttgagtatgcaccgacaattctgacgtcggtaaaaccagagcaatatttgcattaa

SEQ ID NO: 372754 - DNA, 225 bp, Salmonella enterica
atgcatacagtttctgaaaatcagtgcggtaaatacgcattactgctgcaacaggccagaaccgaagcacaggccgacgctgcgacgcgcttttcttctcatcttgacgccatgattcgccatatcacaaaggcggagttatcccgcgtggagatagtcgagctgctcagtcaggagtcggaaaaatttcacaatatcggattgtctcgcggggaggtgctttga

SEQ ID NO: 372755 - DNA, 300 bp, Salmonella enterica
atgtcctgttctcattcagttgtattactgaataacgccttaaaaatcgccgttatgaaaaatggcgatttgtctcttattcaactttgtcttgataaagaaaaacgcgacatcactgaatctgttatcgcgatttatcagaatgaattaaacctcctgtctgatgtggtcaatttacttgttaaacgcgctgtattccacaagcaaatttcctccgtggatgaactgacaaaattaacgacagaacttgccagttattgcgctgatgtatccaggaaacttaacgataaaaggagctga

SEQ ID NO: 372756 - DNA, 276 bp, Salmonella enterica
atgagtattcgtattgaaattggcgaacgttatgtcgttaccagtgacagctttcagtttattctccacgagaaaaagagagcggaaagcggtaaaaacgccggtcaggaatggctgtcggtggttggttattacccgaaattaagccagctcgtttccggcctgatgcatcacgatattctgaccggaagcgcaaagtcttttgctgatttaaacgtgcaggttgagcaactcagcaagcgttgttcagaggcttttggctcatatggccgttaa

SEQ ID NO: 372757 - DNA, 2277 bp, Salmonella enterica
atggccgttaaagcctccgggcgttttgtccctccgtcagcatttgccgcaggcaccggtaaggcgtttaccggtgcttatgcatggaacgcgccacgcgaggctgtcgggcgcgaaagaccccttacacgtgacgagatgcgtcaggtgcaaggggttttatccacgattaaccgcctgccttactttttgcgctcgctgtttacttcacgctatgactacatccggcgcaataaaagcccggtgcacgggttttattttctcacatccacttttcagcgtcgtttatggccgcgcattgagcgtgtgaatcagcgccatgaaatgaacaccgacgcgtcgttgctgtttctggcagagcgtgaccattatgcgcgtctgccggggatgaatgacaaggagctgaaaaagtttgccgcccgtatctcatcgcagcttttcatgatgtatgaggaactctgcgatgcctgggtggatgcgcatggcgaaaaagaatcgctgtttacggatgaggcgcaggctcacctctatggtcatgttgctggtgctgcacgtgctttcaatatttcccctctctactggaaaaaataccgtaaagggcagatgaccacgaggcaggcatattctgccattgcccgtctgtttaacgatgagtggtggacccatcagcttaaaggccagcgtatgcgctggcatgaggcgttactgattgctgtcggggaggtcaataaagaccgttctccttatgccagtaaacatgccattcgtgatgtgcgtgcacgccgccaggcaaatctggaatttcttaaatcgtgtgatctcgaaaacagggaaaccggcgagcgcatcgaccttatcagtaaggtgatgggcagtatttctaatcctgaaattcgccggatggagctgatgaacaccattgccggtattgagcgttacgccgcagcagagggtgatgtggggatgtttatcacgctgaccgcgccgtcaaagtatcacccgacacgtcaggtcagaaaaggcgaaagtaaaaccgtccagctaaatcacggctggaacgatgaggcatttaatccaaaggatgcgcagcgttatctctgccgtatctggagcctgatgcgcacggcattcaaggataatgatttacaggtctacggtttgcgtgtcgtcgagccacaccacgacggaacgccgcactggcatatgatgcttttttgtaatccgcgccagcgtaaccagattatcgaaatcatgcgtcgctatgcgctcaaagaggatggcgacgaaagaggagccgcgcgaaaccgttttcaggcaaaacaccttaaccggggcggtgctgcggggtatatcgcgaaatacatctcaaaaaacatcgacggctatgcactggatggtcagctcgataacgataccggcaggccgctgaaagacactgctgcggctgttaccgcatgggcgtcaacgtggcgcatcccgcaatttaaaacggttggtctgccgacaatgggggcttaccgtgaactacgcaaattgccgcgcggcgtcagcattgctgatgagtttgacgagcgcgtcgaggctgcacgcgccgccgcagacagtggtgattttgcgttgtatatcagcgcgcagggtggggcaaatgtcccgcgcgattgtcagactgtcagggtcgcccgtagcccgtcggatgacgttaacgagtacgaggaagaggtcgagagggtggtcggcatttacgcgccgcatctcggcgcgcgtcatattcatatcaccagaacgacggactggcgcattgtgccgaaagttccggtcgttgagcctttgactttaaaaagcggcatcgccgcgcctcggagtcctgtcaataactgtggaaagctcaccggtggtgatacttcgttaccggctcccacaccttctgagcacgccgcagcagtgcttaatctggttgatgacgatgttatcgaatggaatgacccggaggtcgtgagggcgctcaggggcgcattaaaacacgaccggagaacgccaaaccgtcagcaaagaaacggaagcccgttaaaaccgcatgaaattgcaccatcggccagactgacccggtcggaacgattgcaaattacccgtatccgcgttgatctcgctcagaacggtatcaggccgcaacgatgggagcttgaggcgctggcgcgtggcgcgaccgtaaattatgacgggaaacctttcacttatcaggtcgctgatgattggccgggatttttgttacccatttga

SEQ ID NO: 372758 - DNA, 486 bp, Salmonella enterica; identical to SEQ ID NO: 6438

SEQ ID NO: 372759 - DNA, 600 bp, Salmonella enterica
atggctgatattgatttatctggacagtccccagagcaaggaaccactcctaagggcgattcagatcctgatatccttataaggcgagatagacgggatggtatagagcgtagaagtatgcgattagtgctctctgccgttgtgctttgttttgcttgtacatttctatggcaggggcttaactttgctttggctgttggaaatggcttgctggaagcgaaaagcagtattgccgcagcgataacacaaaaagtagatacacaaacttgtgtttcagcagaaaaatgttctgctttatcttcggatccgaagatggctgatgagaggataacaccatcttcagacactaataaagttagaaaatctatttctggtttatccaccgattggttatcggccagttctctaatagctattgttgcattcatccttggtgtgggtttaactttgcttttgactcttcttaaatcagcatttcaacacccgacagataaagactttagaacaaagtcgacatctaatactattgagttggccacgccaatcagtgaattaataattggtgttctgaatataattaaagacaaactatctaagtaa

SEQ ID NO: 372760 - DNA, 942 bp, Salmonella enterica
atgcaaggtaaagttgacgaacagcaatccaatgatattgaagctgagtttggatactatccagtagaagttaacgttgaaactgatgatttttctttacttactttacccggtctagcggaaaaaacaaatcttataaacaatcacagaaatgttattaacggttggatatacccaggaaaccaagaagtatataacctcaatggaggcatatccacaatgccttttagccaacgagtatttggcttacccaaaacacactcactaaaattaaaaaatacatcttcactagaaactctcaattttgctgtgtggtgtctgtcttttttcaaagggataagattaacaactactgatgccggttttttagacgcaaccccaataaaacccagcaaattaactgactttattctggtcaagtgctctgaaaaagaggttatagaattagcactcaaatacatgtctagcgagacaaaaaccaaacacgcaccaataaatatagcagcaatagtgcatgcactatttttatcccaaaacccacaataccttagcttcgaaaaattccagtatctttatatggcactggatagttgctttgctttaacatgggcagaaaagaacaagtgtacagaaaagactctaaatcactccaggcgcttgaagtggatctgcaaaacttatggaataccacgaccatcatgggttacaggcaaaaaaaacattacaaacatccgcaatgaaaactttcatgaagctatgtttcatggtcaaccacttggctttaccactattaacaattatcaatatggagatgacatattacaacaaatgcaggctttaatttgccgattactcgttgcgattcttggtgttaacgcccccgattacatcacatcgaacgtgaactctcgtgaatatcattcactaacattaaaaatataa

SEQ ID NO: 372761 - DNA, 1035 bp, Salmonella enterica
atgagcaagaaaaaagggaaaacaccgcaacctgcggcaaaaacaatgaccgccagcgccccgaaaatggaggcattcacctttggtgagccggtgccggtactcgaccgccgtgacattctggattacgtcgagtgcatcagtaacggcagatggtatgagccgccggtcagctttaccggtctggcgaaaagcctgcgtgctgccgtgcatcacagctcaccgatttacgttaaacgcaatattctggcctcgacatttatcccgcatccgtggctttcgcaacaggatttcagccgctttgtgctggattttctggtgttcggtaatgcgtttctggaaaagcgttacagcaccaccggtaaggtcatcagactggaaacctcaccggcaaaatatacccgccgtggcgtggaggaggatgtttactggtgggtgccgtccttcaacgagccgacacctttcacgcccggctcagtatttcacctgctggagcccgatattaatcaggagctgtacggcctgccggaatatctcagcgcccttaactctgcctggctgaatgaatcggccacactgttccgccgcaagtattacgaaaacggcgctcatgccggatacattatgtacgtcaccgatgccgtgcaggatcgcaacgatatcgaaatgcttcgcgaaaacatggtcaagtcgaaaggccgcaacaactttaaaaatctgtttctctatgccccgcaggggaaagccgacggcattaaaattatcccgctcagtgaagtggcaacgaaggacgatttttttaatatcaaaaaagccagcgccgctgacctgctggacgcgcaccgcatcccctttcagttgatgggcggcaagccggagaacgtcgggtcgctgggtgatattgagaaagtggcaaaggtctttgtccgcaatgagcttatcccgttacaggacaggatccgcgagataaacggctggctcggtcaggaggtcatccgctttaaaaactactcactggacactgacaacggctga

SEQ ID NO: 372762 - DNA, 1773 bp, Salmonella enterica
atgaccatcaccacagacaccactcttttacacgacccgcgtcgtcaggcggcgctgctgtactggcagggattttccgtgccgcagattgccgccatgttgcagatgaaacgcccgacggtgcagagctggaaacagcgcgacggctgggacagcgttgcccccatcagccgtgtcgaaatgagtctggaagcgcggctgacccagctcatcatcaaaccgcagaaaaccggcggtgacttcaaggaaattgacctgctcggacgccagattgaacgactggcacgggtaaaccgttacagtcagaccggcaacgagacagaccttaatccgaacgtcgctaaccgcaacaaaggcgggcggcgcaaaccgaaaaagaattttttcagtgacgaggccatcgaaaagctggagcagattttctttgagcagtctttcgaatatcagttgcactggtatcgcgccgggcttgagcaccgcatccgcgatatcctgaaatcccgccagattggcgcaacgttttatttttcccgcgaggcgctgctgcgcgccctgaaaaccggccataaccagatttttctgtcggccagtaaaacgcaggcgtatgtgttccgcgaatacatcatcgcctttgcccgtctggttgacgttgacctgaccggtgacccgattgtcctgggcaataacggcgcaaaactgatttttctcggcaccaactccaacaccgcgcagagccataacggcgacctgtacgtcgacgagattttctggatcccgaattttcaggtactgcgtaaggtggcatcaggtatggcctcacagagccacctgcgctcgacctatttctccaccccgtccacgctggcgcacgacgcctacccgttctggtcgggtgaactgtttaaccggggacgcgccagcgccgccgaacgcgtggaaatcgacgtcagtcataacgcccttgccggaggtcttctctgtgcggacggccagtggcggcagattgtcaccattgaggacgccctgaaaggcggctgcacgctgttcgacattgagcagctcaaacgtgaaaacagcgccgacgattttaaaaacctgttcatgtgtgaatttgttgacgacaaggcgtcggtgttcccgttcgaggagctgcaacgctgcatggtcgacacgctggaagaatgggaagactatgcgccgtttgccgccaatccgttcggctcccgcccggtctggattggttacgacccgtcacaccgtggcgacagcgccggatgcgtggtactggcaccgccggtggtggccggtggcaaattcagaatacttgagcgtcaccagtggaaaggcatggactttgccactcaggcggaatccatccgcaaactcaccgaaaaatacaacgtcgaatacatcggaattgatgccaccggcctcggtgtcggcgtgttccagctcgtgcgctcgttctatcccgccgcgcgcgatatccgctacacgccggaaatgaaaaccgcaatggtgctcaaggcaaaagacgttatccgccgtggctgtctggaatatgacgtcagcgccaccgacatcaccagctcgttcatggctatccgcaagaccatgaccagcagcggacgcagcgccacctatgaggccagccgcagcgaggaagccagccatgccgacctcgcctgggcgaccatgcacgccctgttaaatgagccactcaccgccggtatcagcaccccgctgacatccaccattctggagttttactga

SEQ ID NO: 372763 - DNA, 855 bp, Salmonella enterica
atggcaaaaaaagtctcaaaattctttcgtatcggcgttgagggtgacacctgtgacgggcgtgtcatcagtgcgcaggatattcaggaaatggccgaaacctttgacccgcgagtctatggttgccgcattaacctggaacatctgcgcggcgtcctgcctgacggtatttttaagcgttatggcgatgtggtcgaactgaaggccgaaaagattgacgatgattcggcgctgaaaggcaaatgggcgctgtttgcgaaaatcaccccgaccgatgaccttatcgcgatgaacaaggccgcgcagaaggtctatacctcaatggaaattcagccgaactttgccaataccggcaaatgttatctggtgggtctggccgtcaccgatgacccggcaagcctcggcacggaatacctggaattctgccgcacggcaaaacacaaccccctgaaccgcttcaaattaagccctgaaaacctgatttcagtggcaacgcccgttgagctggaatttgaagacctgcctgaaaccgtgttcaccgccctgaccgaaaaggtgaagtccatttttggccgcaaacaggccagcgatgacgcccgtctgaatgacgtgcatgaagcggtgaccgctgttgctgaacatgtgcaggaaaaactgagcgccactgagcagcgcctcgctgagatggaaaccgctttttccgcacttaagcaggatgtgactgacagggcggatgaaaccagccaggcattcacccgcctgaaaaacagtctcgaccacgccgaaagtctgacccagcagcgccgcagcaaggccaccggtggtggcggtgacgccctgatgacgaactgctga

SEQ ID NO: 372764 - DNA, 1074 bp, Salmonella enterica
atgcgccaggaaacccgctttaaatttaatgcctacctgtcccgtgttgccgaactgaacggcatcgacgccggtgatgtgtcgaaaaaattcaccgttgaaccgtcggtcacccagaccctgatgaacaccatgcaggagtcctctgactttctgacccgcatcaacattgtgccggtcagcgaaatgaaaggggaaaaaattggcatcggtgtcaccggctccatcgccagcaccaccgacaccgccggtggcaccgagcgtcagccgaaggacttctcgaagctggcgtcaaacaagtacgaatgcgaccagattaacttcgatttttatatccgctacaaaacgctggacctgtgggcgcgttatcaggatttccagctccgtgtccgtaacgccattatcaaacgccagtcccttgatttaatcatggccggttttaacggcgtgaggcgtgccgaaacctctgaccgcagcagcaatccgatgctgcaggatgtggcggtcggctggctgcagaaataccgcaatgaagccccggcgcgcgtgatgagcaaggtcactgacgaggaagggcacaccacctctgaggttatccgcgtgggtaagggcggtgattatgccagccttgacgcactggtgatggatgcgaccaacaacctgattgagccgtggtatcaggaagaccctgaccttgtggtgattgtgggacgtcagctactggcggacaagtattttcccatcgtcaacaaggagcaggacaacagcgaaatgctggccgctgacgtcatcatcagccagaaacgcatcggtaacctgccggcggtacgcgtcccgtacttcccggcggatgcgatgctcatcacaaagctggaaaacctgtccatctactacatggatgacagccatcgccgcgtgattgaggaaaacccgaaactcgaccgcgtggagaactacgagtcaatgaacattgattacgtggtggaagactacgccgccggttgtctggtggaaaaaattaaggtcggtgatttctccacaccggctaaggcgaccgcagagccgggagcgtaa

SEQ ID NO: 372765 - DNA, 744 bp, Salmonella enterica
atgacgagtcccgcacagcgccacatgatgcgggtctcggcagcgatgaccgcgcagcgggaagccgccccgctgcgacatgcaactgtctatgagcagatgctggttaagctcgccgcagaccagcgcacactgaaagcgatttattcaaaagagcttaaggccgcgaaaaaacgcgaactgctgccgttctggttgccgtgggtgaacggcgtgctggaacagggcaaaggtgcacaggatgacattctgatgacggtcatgctgtggcgtctggataccggcgatattgccggtgcgctggagattgcccgttatgccctgaagtacggtctgaccatgccgggtaaacaccgccgtaccccgccgtacatgttcaccgaggaggtagcgcttgcggccatgcgcgctcacgctgccggtgaatctgtggatacccgcctgctgacggagacccttgaactgaccgccacggctgacatgcctgatgaagtgcgcgcaaagctgcacaaaatcaccggtctgtttctgcgtgacgctggtgatgccgccggtgcgctggctcacctgcaacgtgcgacacagctcgactgtcaggcaggcgtcaaaaaagagattgaacgactggagcgggagctgaaaccgaagccggagccgcagcccaaagcggccacccgcgccccgcgtaagacccggagcgtgacaccggcaaaacgtggacgcccgaaaaagaaagccagttaa

SEQ ID NO: 372766 - DNA, 510 bp, Salmonella enterica; identical to SEQ ID NO: 32640

SEQ ID NO: 372767 - DNA, 204 bp, Salmonella enterica; identical to SEQ ID NO: 32641

SEQ ID NO: 372768 - DNA, 282 bp, Salmonella enterica
atgacagcagaagaaaaaagcgtcctgtcgcttttcatgattggggtgctgattgttgtcggcaaggtgcttgccggtggtgaacccatcaccccgcgtctgtttatcgggcgcatgttgctcggtggttttgtctcgatggttgccggtgttgttctggtgcagtttcctgacctgtcactgcctgcggtgtgcggtatcggctccatgctgggtatcgccggttatcaggtgattgagattgccattcagcgccgctttaagggcagggggaaaccgtaa

SEQ ID NO: 372769 - DNA, 498 bp, Salmonella enterica
atgccggttattaacacgcatcagaatatcgccgcctttctcgacatgctggccgtgtccgaagggacggcaaaccatccgctgacgaaaaaccggggctatgacgtgatagtcaccggactggacgggaagccggaaattttcaccgactacagtgaccacccgttcgcacatggccgaccggcgaaggtgtttaaccgtcgcggtgaaaaatccacggcctccggtcgctatcagcagctttacctgttctggccgcattaccgcaaacagcttgccctgccggatttcagtccgttgtcacaggacagacttgccattcagttgatccgcgaacgcggtgcactggatgacatccgggcgggacgcattgagcgcgccatttcacgctgtcgcaatatctgggcgtccctgccgggtgccggttacggtcagcgtgagcattcactggaaaaactggtcaccgtctggcgtaccgctggcggcgtaccggcttaa

SEQ ID NO: 372770 - DNA, 426 bp, Salmonella enterica
atgaagaaattatccctttcactgatgctgaacgtgtcgctggcgctgatgctggcactgtccctgatttacccgcagagcgtggccgtcaattttgtcgccgcctgggcgattctggcgacggttatctgtgtggttgccggtggtgtcggcgtgtatgccactgagtatgtgctggaacgctacgggcgggagctgccgccggagtcgctggccgtgaagattgtcgcgtcgctgtttttgcagccggtgccgtggcgcagacgggcagcggctctggtggtgatggtggcgacgtttatctcgctggtcgctgccgggtggatttttaccgcgctgatttatcttgtggcgtcgctgtttttccggctgatacgtaaagcctgtcgtcagcgtcttgaggggcgggaattatgtcaaagctga

SEQ ID NO: 372771 - DNA, 426 bp, Salmonella enterica
atgtcaaagctgatgattgtgctggtcgtgttgttatcgctggcggtagcggggctgttcctggtgaaacacaaaaatgccagcctgcgcgcctcgctggacagggcgaacaacgtcgccagtgaacagcagacgaccatcaccatgctgaaaaaccagcttcatgttgcactcaccagggcagacaaaaacgagctggcgcaggtggcactgcgtcaggcgctggaaaacgccgcgaagcgtgaagcacagcgcgagaaaaccatcatgaggttacttaatgaaaacgaagattttcgccgctggtacggtgctgacctgcctgatgctgtgcgccggttgcaccagcgcccggcctgcactgacgccagtgattgtccacaacgcctgcccgaaagtgagtctttgcccgatgccgggcagtga

SEQ ID NO: 372772 - DNA, 159 bp, Salmonella enterica; identical to SEQ ID NO: 6452

SEQ ID NO: 372773 - DNA, 468 bp, Salmonella enterica; identical to SEQ ID NO: 245444

SEQ ID NO: 372774 - DNA, 453 bp, Salmonella enterica
atgaatgagtttaagcgttttgaagaccggctgaccggactgattgaatcgctgtcaccgtcagggcgtcggcgactgagcgccgaactggcgaaacgtctgcggcagagtcagcagcgtcgggtgatggctcagaaagccccggacggcacaccctacgcgccacgccagcagcagagcgccagaaaaaagaccggtcgtgttaagcgaaaaatgtttgcgaaacttatcaccagtcgttttttgcatatccgcgccagccaggaacaggcatcaatggagttttacggcgggaagtcaccgaaaatcgccagcgtgcatcagttcggtctgtcggaagaaaaccggaaagacggtaagaaaattgattatccggcgcgtcctctgctcggctttaccagtgaggatgtgcagatgattgaagagattatcctggctcacctcgaccgttag

SEQ ID NO: 372775 - DNA, 636 bp, Salmonella enterica; identical to SEQ ID NO: 121304

SEQ ID NO: 372776 - DNA, 348 bp, Salmonella enterica
atgacagcgcgttatctcggaatgaatcgcagtgatggcctgactgtcactgaccttgagcatatcagccagggtatcggcgatatcctgcgcacaccggtcggctcacgggtgatgcgtcgtgattacggctcgttgctggcgtcaatgattgaccagccgcagaccccggcgcttgagttgcagattaaggtcgcctgttacatggcggtgctgaaatgggaaccccgcgtcaccctgtcatccgtcaccactgagcgcagttttgacgggcgaatgacggtcacgttaaccggccagcacaacgacaccggccagccactttcgttaaccatccctgtgagttga

SEQ ID NO: 372777 - DNA, 909 bp, Salmonella enterica
atgccgattatcgacctgaaccagctacccgcaccggatgtggtcgaggagctggactttgaaaccattcttgccgaacgcaaggcgacactgatttccctttacccggaagaccagcaggaggcggtcgcccgtaccctgacgctggaatccgagcctctcgtcaaacttctggaggaaaatgcttatcgtgagcttatctggcgtcagcgtgtgaatgaggccgcacgggcggtgttgctggcctgtgccgccggtaatgaccttgatgtgattggtgccaattacaacaccacgcgcctgattatcaccccggcagatgattcgactatcccgccgacaccggcagtgatggagtctgacaccgattatcgtctgcgtattcagcaggcgtttgagggcttaagcgtcgccgggtcggtgggagcctatcagtatcatggtcgcagtgctgacgggcgtgtcgcggatatctctgtcaccagtccgtctccggcctgcgtcactatctccgtgctgtcacgtgaaaataacggcgtcgcatccgaagacctgctggccgtggtgcgtaacgcccttaatggcgaggacgtcaggccggtggccgaccgcgtgaccgtgcagtctgccgccattgttgaatatcagataaacgccacgctttacctttacccaggtcctgaaagcgaacccatccgcgctgctgccgtgaaaaaactggaagcgtacatcacggcacagcaccggcttgggcgcgacatccgtctgtctgccatttatgccgctttgcatgtggaaggcgtgcagcgtgtcgaactgactgcacctctggctgacattgtgctcaacagtacgcaggcgtctttctgcaccgaatacagcgtcgtgaccggaggctcggatgagtga

SEQ ID NO: 372778 - DNA, 612 bp, Salmonella enterica
atgagtgattcgcgcctgctgccgaccggctcatcaccgcttgaactcgccgccgcaagagcctgtgcggaaattgaaaaaacgccggtcagtattcgtgagctgtggaacccggacacctgcccggcaaatctgctgccgtggctggcgtggtcattttcggttgaccgctgggatgataaatggccggaagcgacaaaacgcgctgttatccgcgatgcgtatttcattcactgccataagggcactataggcgcaatccggcgtgtggtggagccgctcggctatctgattgaggtaagggagtggtggcagctcaacgaggagccggggacgttccgtatcgttgttggcgtgcttgagcagggtattaccgaagaaatgtatcaggagctggagcgcctcgttgctgatgcaaaaccggcaagccgccatctgacgggactggctatcagtttaagtacaaacggcaacatttttgccggtgcgggatgctatcacggcgacgccctgacggtttatccctacaccccggaggccattattgtcggaggggattatttcccggcctcggccattcatttaattgataacctgagagtaaacgcatga

SEQ ID NO: 372779 - DNA, 1338 bp, Salmonella enterica
atgacagtgaaatactacgccattctgactaatcagggcgcagcacggctggctaacgcgacgatgctcggcagtaagctgaatctgacgcaaatggccgttggtgatgcgaatggtgtcttgccgacaccagacccggcacagacaaaactgattaaccagaaacgcatcgcgccgctgaatcttctgagtattgacccgaacaaccagagccagattattgcggagcaaatcatccctgagaacgagggcggattctggatccgtgagattgggctttatgatgatgaaggcgtactcattgcggtggcgaactgcccggaaacgtacaaaccgcagttgcaggaaggcagtggtcgtacccagactatccgcatgattctggttgtcacgaataccgaagccatcacgctgaaaatcgacccgtcggtggtactggcgacccgtaaatacgtggatgataaagtcctggaattaaagctgtatgtggatgaccagatgagaaaccacattgccgcacaggatcctcatacccagtatgcacagaaacataatccgacatttaccggagaaccaaaagcgccgacgcctgccgcaggaaataacaccacgcggattgcgaccactgcgtttgtacaggccgctattaccgctctgattaacggtgcccctgacacgctggacacactgaaagaaattgccgcagctatcaacaatgacccgaaattcagtaccaccattaacaatgcgctgtcaggtaagcagccactggatgagacgctgactcatttgagtggaaaggatgttgctggtcttctcgcataccttggtttgggagaaggctctgcattacctgttggggtgcctgttccgtggccttcagccactccgccaacaggctggctgaaatgcaacggagcagctttttctgctgaagaatacccggagctggcaaaggcttacccgacaaataaattgcctgatttacgtggtgagtttattcgtggctgggatgacggacgtggtatggatacggggagggcaatattatccgctcagggcgatgccatacgtaatatctatggtgagttcaagactgtaaacaccgaaaattattcaatatgggaatcagtaggctcgtttaagggggcagtagtgcctttgaacccctcaacgaacaatagttatttctccttaatcagaagtatggtgacagaaagaacagatggcgctgtttacccaaaagtgattggccttgatgcttcaagaattgttccaactgcaaacgaaaaccgtcctcgtaacattgcctttaattatatcgtgagggctgcctga

SEQ ID NO: 372780 - DNA, 603 bp, Salmonella enterica
atgaataaagccgtattaaataacgaactcattgccataaaagcgggagtcattaccatttataattatgatggtgaaacgcgggaatatatttccacatcaactgaatatcttgcggttggcgtcggtatcccggcatgttcttgtttagatgcaccagttacacataaagctggttatgcaatctgccgttctgcagattttaactcatgggaatatgtgccagaccatcgcggtgaaatcatctatagcaccgaaacaggagaatcgaaagaaatcacagctccgggtgattatcctgaaaatacaaccactatcgccccgttaacgccatacgataaatgggatggtgagaaatgggtgacggataccgaggcacagcatagcgccgcagtagaagcggcagaagcacagcgccagtcgctgattgatgctgcaatggcttccatcagtctgattcagctgaaattacaggccgggcggaagctgacgcagccagaaaacacccgacttaacgctgtgctggattatattgacgcggtgacggcaacagataccagcacagcgccagacgtcatctggcctgaactgccggaggcgtag

SEQ ID NO: 372781 - DNA, 441 bp, Salmonella enterica
atgcagaaatatattttcagtgccgataaaaatgcgttttttcctgtggagcttaaaatcgcttatcaggaatccggcgaatggcccggtgatggaatcgaaattgacgacactgttgccgccgaatttatgaaggaagcaccagaaggaaaatacagaggtgtcatcgacggaatgcctgcatggattgatattccaccgccaactcatgaggaacaaattgccgcagccgaactggaaaagcagcaattgattaatcaggtcaacgaatacataaacagtaagcaatggcctggtaaagcggcgattggtcgcctgaaaggtggggaactggcgcaatataatttgtggctggattatctggacgcactggaactggtcgatacttccggtgcgccagatattgaatggcctacgcctccggcagttcaggccagatga

SEQ ID NO: 372782 - DNA, 594 bp, Salmonella enterica
atgcttattggctatgtgcgcgtgtcaacaaatgaccagaacacggaattgcagcgtaacgcgctggagtgtgcaggatgtgagctgatttttgaggataaaatcagcggcacgaagtccgaccgaccgggactgaaaaaactgctcagaacattatcagcaggtgacactctggtggtctggaagctggacaggctggggcgtagtatgcggcatctggtcattctggttgaggaactgcgcgaacgcggcgttaattttcgcagcctgacggatgccattgataccagcacgccgatgggacgttttttctttcatgtgatgggtgccctggctgaaatggaacgagaactcattgtcgagcggactcgcgccggactggaagcggccagagctaaaggtcgtattggtggcagacgtccgaaactcaccgcgagtgagtgggagcaggccgggcggttgttggctgcaggggaatcacgtcaacgcgtggcactgatttttgatattggcctgtccacgctctataaaaaattccccgcctccgtgacaaaaaataaattgtgtcatcccttagccaaccgggacaaatag

SEQ ID NO: 372783 - DNA, 1191 bp, Salmonella enterica
atgagtgactatcatcacggcgtgcaggtgctggagattaacgacggcacccgcgtcatttccaccgtatccaccgccattgtcggcatggtctgcacggccagcgatgcggatgcggaaaccttccccctcaataaaccggtgctgattaccaatgtgcagagcgcaattgcaaaggccggtaaaaaaggcacgctggcggcatcgttgcaggctatcgctgaccagtcaaaaccggtcaccgttgttgtgcgtgtggaagacggcagcggcgacgacgaggaaacgaaactcgcgcagaccgtttccaatatcatcggcaccaccgacgaaaacggtcagtacaccggactgaaagccctgctggcggcggagtcggtaaccggtgttaaaccgcgcattctcggtgtgccgggactggacaccaaagaggtggctgttgcactggcatcagtctgtcagaagctgcgcgctttcgggtatatcagcgcatggggctgtaaaaccatttccgaggtgaaagcctaccgccagaatttcagccagcgtgagctgatggtcatctggccggatttcctcgcatgggatacggtcaccagtaccaccgccaccgcgtatgccaccgcccgtgcgctgggtctgcgcgctaaaatcgaccaggagcagggctggcataaaacgctgtccaacgttggggtgaacggtgttaccggcatcagcgcctctgtattctgggatttgcaggagtccggcaccgatgctgacctgcttaacgagtcaggcgtcacaacgctgattcgccgtgacggtttccgcttctggggtaaccgtacctgctctgatgacccgctgttcctctttgaaaactacacccgcaccgcgcaggtgctggccgacacgatggctgaggcgcacatgtgggcggtggacaagcccatcaccgcaacgctgattcgcgacatcgttgacggcatcaatgccaaattccgtgagctgaaaacaaacggctatatcgtggatgcgacctgctggttcagcgaagaatccaacgatgcggaaaccctcaaggccggaaaactgtatatcgactacgactatactccggtgcctcctctcgaaaacctgaccctgcgccagcgtattaccgataaatacctggcaaatctggtcacttcggttaacagcaattaa

SEQ ID NO: 372784 - DNA, 519 bp, Salmonella enterica
atggcaatgccgcgcaaactcaagttaatgaacgtctttctgaacggctacagctatcagggcgttgcaaagtccgtcacgctgccaaaactgacccgtaagctcgaaaactatcgcggtgcggggatgaacggcagcgcaccggtagacctcggccttgatgacgatgcgctgtcaatggagtggtcgctcgggggcttcccggattcggttatctgggagctttacgccgcaaccggtgtggatgccgtgccgattcgttttgcaggctcttaccagcgtgacgataccggcgaaacggtggccgtcgaagtggtcatgcgtggacgtcagaaagaaatcgacaccggcgagggtaaacagggagaagacaccgagtcgaaaatctccgtggtctgcacctatttccggctgacgatggacggtaaggagctggtcgaaatcgacaccatcaacatgattgagaaggtgaacggcgtcgaccggctggagcaacaccgccgaaatatcggcctgtga

SEQ ID NO: 372785 - DNA, 276 bp, Salmonella enterica
atgaacaaagaaaatgtgattaccctggacaatccggtcaagcgtggtgagcaggttatcgaacaggtcacgctgatgaagcccaatgccgggacgctgcgcggtgtcagtctggctgcggtcgcaaactccgaagtcgatgcactgattaaggtgctgccgcgcatgacggcaccgatgctgaccgagcaggaagtcgccgcgctggaactgcctgaccttgtggcgctggccggtaaggtggtcggttttttgtcgccgaactcggtgcagtaa

SEQ ID NO: 372786 - DNA, 2448 bp, Salmonella enterica
atgagtaacaatgtaaaattacaggtattgctcagggctgttgaccaggcatcccgcccgtttaaatccatccgtacagcgagcaagtcgctgtcgggggatatccgggaaacacaaaaatcactgcgcgagctgaacggtcaggcatcccgtattgagggatttcgcaagaccagtgcacagctcgccgtgactggtcatgcacttgaaaaggcacggcaggaggccgaagcccttgccacacagtttaaaaataccgaacgtccgacccgtgctcaggcgaaagtgctggaatcagcaaagcgtgcggcggaggacttacaggcgaaatataaccgcctgacggattccgttaaacgccagcagcgggagctggccgctgtgggaattaatacccgcaatcttgcacatgatgagcagggactgaaaaaccgtatcagtgaaaccaccgcacagcttaaccgtcagcgcgacgcgctggcgcgtgtcagtgcgcaacaggcaaaacttaatgcagtcaaacagcgttatcaggccggaaaggaactggccggaaatatggcctcagtaggcgctgccggtgtggggattgcggcggcgggaacgatggccggagttaagttgctgatgcccggttatgagtttgcgcagaaaaactcagaattgcaggctgtgctcggtgtggcaaaagactccgccgaaatggctgcactacgcaagcaggcgcgccagctcggcgacaacaccgccgcctcagcggatgatgcggccggtgcgcagattatcattgcgaaagcgggtggagatgctgcggctattcaggcggcaacgccggtcacgctgaatatggcactggcgaatcagcggtcgatggaagaaaacgcgcaactgttgctggggactaaagcatcttttcaactgtcaaatgatgatgtcagccatgtgggcgatgtgttgtcggcaacgatgaataagtcggcggctgattttcagggacttagtgatgcactgacttatcttggcccggtcgcaagaacggcaggtgtaagtcttgagcaggcagcggccatgacaggtgtgctgcatgacaataacatcagggggtcaatggcgggtacgggtagcagtgccgttgtcacccgattacaggcaccgactggaaaagcatgggatgcactcaaagagcttggcgttaaaacctcggacaaaaagggaaatatgcgtccgttgttcaccattctgaaagagattcaggccagctttgataaacacaagctgggaacgtctcagaagggggaataccttaaaaccatttttggtgaggaagccctgaaatcagcgaacgttttactggcagcggcagcaagcggaaaactggatacgctgaccgccacgctgaaagcctcggacggtaaaacggaagagctggttaaaatcatgcaggataacctcggcggtgactttaaggagtttcagtccgcttatgaggcggtggggactgacctgtttgaccagcaggaaggcgcactgcgtaagctcactcagacggccacaaagtatgtgttaaaactcgacggctggatccagaaaaacaaatcactggcgtcaaccatcggcctcattgtcggtggcgcgctggcgcttattggcatcatcggtgccattggtcttgtagcctggccggttatcaccggcatcaatgccatcatcgcggcagcaggcgcaatgggggcaatcttcacgacggttggtagtgccgttatgacggccatcggggcgattagctggccggttgtggccgtggtggccgccattgtcgccggggcgttgcttatccgtaaatactgggagcctgtcagcgcattctttggcggtgtggttgaagggctgaaagcggcatttgcgccggtgggggaactgttcacgccacttaagccggtgtttgactggctgggcgaaaagttacaggccgcgtggcagtggtttaaaaacctgattgccccggttaaagccacccaggacaccctgaaccgttgccgtgatacgggtgtcatgttcgggcaggcactggctgacgcgttgatgctgccgcttaatgcgttcaacaaactgcgcagcggtattgactgggtactggaaaaactcggtgttatcaacaaagagtcagacacacttgaccagaccgccgcaaggactcatgccgccacgtatggcaccggtgggtatattccggcgaccagctcttatgcaggctatcaggcttatcagccggtcacggcaccggctggccgctcttatgtggaccagagtaaaaacgaatatcacatcaacctgacgggcggtactgcgccggggacacagcttgaccgccagttacaggatgcgctcgaaaaatacgagcgggataaacgtgcgcgcgcccgtgccagcatgatgcatgacggttaa

SEQ ID NO: 372787 - DNA, 480 bp, Salmonella enterica
atgatgctcgcgttaggtatgtttgtttttatgcgccagacgctgccacaccagaccatgcagcgtgaatcagattatcgctggccgtcaaattcccgtatcggtaaacgggatgcctttcagtttctcggtgttggcgaggaaaacatcacgcttgccggtgtgctttatcccgagctgaccggcggaaagctgacgatgactacgctcaggctgatggcagaggaaggccgggcgtggccgttgctggatggcaccggcatgatttacggcatgtatgtcatcagcagggtgagtgaaacagggagtattttctttgcagacggcacaccccgaaaaattgattttacgctgtcgctcacccgcgttgatgaatcactggccgcgctttatggcgatatcggtaaacaggcggaatcgctcatcggtaaggctggcagtatggcgactaaattcacgggtatgacgggggcgggataa

SEQ ID NO: 372788 - DNA, 1164 bp, Salmonella enterica
atgctggatgcgctgacatttgatgcaggcagtacgctgacgccggattacatgctgatgctcgacagcagggatattaccggcaatatcagcgaccgtctgatgagtatgaccctgacggatagccggggctttgaggctgaccagcttgatattgaactgaacgatgccgacgggcaggtcgggctgccggttcgtggcgctgtcctgacggtgtatatcggctggaaaggttttgccctggtatgcaaagggaaattcaccgttgatgaggttgaacaccggggcgcaccggatgtggtcaccatccgcgcccggagtgcagattttcgcgggacgctcaattcccgccgtgaaggctcctggcatgacaccacgctcggtgcgattgttgaggcgatagcctcccgtaacaggctggaagccagtgtcgcgccgtcactggcaggaattaaaatcccgcacatcgaccagtcgcaggagtctgatgcgaaattcctgacccgtcttgcagaacgcaacggcggtgaggtctcggtaaaaatgggaaaactgttgtttctcaaagcggggcagggggtgacggccagcggtaaaaaaatcccgcaggtcaccatcacccgcagcgacggtgaccgtcatcattttgcgattgctgaccgtggagcctataccggcgtaacggcaaagtggcttcacaccaaagacccgaagccacaaaagcagaaggtaaaactgaaacgcaaaaagaaagaaaaacacctgcgcgcactggaacacccgaaagcgaaaccagtcacgcagaagaaagcgccaaaagtaccggaagcgcgcgaaggtgaatacatggcaggtgaggctgacaacgtttttgccctgaccacggtatatgccacgaaagcgcaggccatgcgcgccgctcaggcgaagtgggataagctgcaacggggcgttgcggagttctccatcagtctggctactggtcgggcagatatttacacggaaacgccggtcaaagtatcaggctttaagcgcgtcatagacgagcaggactggacaatcactaaggtgacacattttctgaataatagcggcttcacgacgtccttggagcttgaggtcaggctttctgatgtggagtacgaaacagaagatgatgagtga

SEQ ID NO: 372789 - DNA, 219 bp, Salmonella enterica
atgtttcattgtcctttatgccagcatgccgcacatgcgcgtacaagtcgctatatcactgacacgacaaaagagcgttatcaccagtgccagaacgtgaattgcagcgccacgttcatcacttatgagtcggtacagcgatacatcgtgaagccgggagaagtccacgccgtaagaccgcacccgttgccgtcagggcagcaaattatgtggatgtga

SEQ ID NO: 372790 - DNA, 990 bp, Salmonella enterica
atgaaaaagtggggcgtggggttcacattattgctggcgtcaaccagcattctggcaaaggatattcagttacttaacgtatcgtacgatccaacgcgtgagctgtacgagcagtacaacaaagcgtttagcgcgcactggaagcaggaaaccggcgacaacgtcgtgatccgccaatcgcacggcggttcgggtaaacaggcgacttccgtcattaacggcattgaagccgatgtcgtgacgctggcgctggcttacgatgtggacgctattgcggaacgtggtcgtatcgataaaaactggatcaagcgtctgccggataactcagcaccttacacttcaaccatcgttttcctggtccgcaaaggcaatccaaaacaaattcatgactggaacgatctgattaaacccggtgtgtcggtgattacgccaaacccgaaaagctccggcggcgcccgctggaactatctggcggcatggggctacgccctgcaccacaacaataacgatcaggccaaagcgcaggactttgtcaaagccctgtttaaaaacgttgaagtgctggactccggcgcgcgcggctcaaccaatactttcgttgaacgcggtatcggtgatgtgctgattgcctgggaaaacgaagcgctactggcgacgaatgaactgggtaaagataaatttgagatagtgaccccgagtgaatctattctcgcagagccgaccgtttccgtggtcgacaaagtggtggaaaagaaagacaccaaagcggtagcggaagcgtatctgaagtatctctactcgccggaagggcaggagatagcagcgaaaaacttctaccgtccgcgcgatgctgacgtggcgaaaaaatacgacgatgcgtttccgaagctgaagcttttcaccattgacgaggtgtttggcggctgggcgaaggcgcaaaaagatcacttcgctaatggcggtacgttcgaccaaatcagcaaacgctaa

SEQ ID NO: 372791 - DNA, 1335 bp, Salmonella enterica
atgaaactttctattgtggaaaaaatcggcttcggcgcgggagatatggcgataaacgttgtgattatcgccatgcagctgctcctcgcctatttctataccgatatctacggcctgagcgccgctgatgttggcgtactgtttgtggttgtgcggatgattgatgccattatcgatccggccatgggggttctgaccgataaactgaatacgcgctggggacgttaccgcccgtggctgctgtggtttgccattccttttggtttcgccgtgtatttgatgtttattacgcctgatatggcttatatggccaagctggcgtgggcctatggcacctatattcttatgaccctggtctataccgcgatcaccattccctatatttcgatgattggcgtgattaccagcgaccccgtcgaacggttaagcgccaacggttatcgctttgtgatgaccaagattgccgcttttctggtgactatcgtcgtaccgatgcttgccgtctggctggggcagggcaacaaggcgctgggttaccagttttcgatggggctgatgggggcgatgggcgccttgctgtttatcttctgttttcttaccacgcgtgaacgcagcgagccggaaattacgtcgttatcggtggggaaacagtttaaatatctgttacgcaacgatcagtggattattctcggcgttgttattctgctgctgatgtgcggttatgttattcgcggttccgttgccgcttattacgccaagtattatctgaacggcggagatagtctgatttcacccttcctgactaccggcgtcgttgcctctattttagcgatgatcgctaccacctggataaccaagttctgggacaaaattaagatgttccgctacacccagattattacctttatcctgagcgcgctgatgtatttctccgtcgggcgtgaaaatcttatcctggcgtttgcgttctattttcttattaatttcttctgcgatatgcaaatgccggtgttctggtcctctatcgccgaagcggtggattacggcgaaaagaaaaccggtctgcgcgtttccgggttggcgtttggcggcatcctcttcttccagaagtttgggatggggatcgcgggcgggatactcggattcctgctgagccactttggctatcaggccgatgttgaacagagcgcgcgttcgctcaccggtattgcgctgatgatgacgctcattccggctctgtttcaccttgcggttgggctgcttatgaaaaagtatctgattaacaacgaatattatcgtgatattcagcttgccctggcgcagaaacaggcataa

SEQ ID NO: 372792 - DNA, 858 bp, Salmonella enterica
atggaaggttttgagttatttccaaaaattaaaggcgcgatcaaatggatggccgagcacagtgactcggtaattcattttggctggaatgttgttgccgccatcattctacttttcatcggtaagttaatagctcgcttactatcgagggggctggaaaaattacttctcaggcggcaagtggatgccactattgtccactttttctccgcgctggttcgctacatcacgatagctttcacggcagtagccgctcttggccgtgtcggtatagaaacctcctcaattattgccgttatcggcgcggcgggtttagccattggcctggcgctgcaagggtcactttccaactttgccgcaggcgtactgcttgtctccctgcgtcctttccgcgccggggaaattgtacaaattggcctggttatcggcacagtagaaaaggtccatattttctccaccactctgctcactgcggatagcaaagaagttgtcatcccgaatggtaaaattattgctgataatattatcaactattcacgacacccctatcgacgtattgatctgattattggcgtggattaccaaagccgtattgctgacgtaaaaagcgtgatacatcgtattattgaacaagatcatcgcattgataaaacccgcgatattacggtccgcctgggcgaacttgcgccctctagcctgaatttctatgttcgcgtatgggtgcccaacgctcagtactggagtacttactacgatcttctggaaaatatcaaggaagcaatggatgaaaacggcatcaatattccttacccccggatggatgtccgggttgagaatgtaaaaagcatcacgccataa

SEQ ID NO: 372793 - DNA, 1104 bp, Salmonella enterica
atggatcgcattattcagtcaccaggtaagtatattcagggtgcaaacgtcatcgcgcgtcttggcgattatttaaaaccaatggcgaacaactggctggttgtgggcgataaattcgtgctgggatttgccgaagagacgctgcgcaaaagcctgacggatgccggtttgtcagtagaaatcgccccgtttggcggcgaatgttcgcaaaatgagatcgacaggctgcgcgccgtcgccgaaaaaagtcagtgtggcgccgtactgggtatcggcggcggtaaaacgctggatactgccaaagcgctggcgcactttatgaacgtcccggtcgctatcgcgccgaccatcgcctctaccgacgcaccgtgcagcgcactctcggttatttataccgatgccggtgagtttgaccgttatctgctgctgccgcataacccgaatatggttattgtcgatacgcagatagtggcgggcgcgccggcgcgtctgctggcagccggtatcggcgatgcgctggcgacctggtttgaagcgcgcgcctgctcacgcagcggcgccaccacaatggcgggcggcaagtgtacacaggccgcgctggcgctggcggagctatgctataacacgctgatcgaagaaggcgaaaaagccatgttggccgccgaacagcacgtcgtcacgccagcgctggaacgcgtcatcgaagccaacacctacctgagcggggtcggttttgaaagcggcggtctggccgcagcgcacgcgattcataacggtttaacggcgattccggatgcgcaccactattatcacggtgagaaggtcgctttcggtacgctgacgcaactggtgctggaaaacgcgccggtcgaagaaatcgaaaccgttgcggcactgtgccattccgttggcctgccgattacgctggcgcaactggatattaaacaggatatcccggccaaaatgcgcaccgtcgcggaagcctcctgcgcagaaggtgaaactattcataacatgcctggcggcgcaacgccggatgaagtgtacgccgcgctgctggtcgccgaccagtacggtcaacgcttcttgcaggaatgggaataa

SEQ ID NO: 372794 - DNA, 123 bp, Salmonella enterica
atggacaggataaaggagcgttacccggatgcgctatgtgacaaatctgccaaaaactggacaaatgtgatgcccttggtaaagtgtgatttacttcacaagttggtgatgattaacgtataa

SEQ ID NO: 372795 - DNA, 1734 bp, Salmonella enterica
atgcaatccacattactccagactaaacccgcgtttagctggaaagccctgggctgggcactgctctacttttggttcttttccaccctcctgcaggccattatttatctcaccggatacagcgggacaaacggtctgcgggattcgctactgtacagctcactgtggctgatcccggtctttctgtttccaggccgcatccgggttattgctgccgttattggcgtcgtactttgggccgcctcgctggcggcactgagctattacgtaatctacgggcaggagttctcgcaaagcgtgctgtttgtgatgtttgaaaccaacgccaatgaagccagcgaatatttaagccaatatttcagtctgaaaattgttcttgtcgcgctggcttatacggtggcggcgattttgctgtggacacgtctgcgcccggtttatattccatccccctggcgttatctggtgtcgtttgccctgctgtacgggctgatcctccatcccatcgcgatgaatacctttatcaagcataagtcgatggagaaaacgctggatagcctggcgtcacgaatggagcccgccgcgccgtggcaatttattactggctactatcagtaccgtttacagctcgcctcgctgaataaactgctgaatgaaaacgatgccctgccaccgctggctaacttccaggaccactccggcgatgcgccgcgcacgctggtactggtgattggcgaatcgacccaacgtggccgtatgagcctgtacggttatccgcgcgaaaccacgccggaactggacgcgctgcataaaaccgaccccgggctgaccgtgtttaataacgtggtaacttcgcgaccatacaccattgagattctgcaacaggcgctaacgttcgcggacgaaaagaacccggactggtatctgacgaagccatcgctgatgaatatgatgaaacaggccgggtataaaaccttctggatcactaaccagcagacgatgacggcgcgtaataccatgctgaccgtgttctctaagcagactgataagcagttctatatgaaccagcagcgcactcaaagcgcacgcgaatatgacagcaacgtgctggcgccgtttaaagcggtgttagccgacccggcgccgaaaaaattcattattgtgcatctgctgggaacgcacattaaatacaagttccgctatccagaaaaccagggcaagtttgatggtaaaactgaccatgttccgccgggattaagcagtgacgagctggaatcgtataacgattacgacaacgcgaacctgtataacgactatgttgtcgccagcctgattaaggactataaagcgaccgatccgaacggtttcctgctttacttctccgatcacggtgaagaagtgtatgacacgccgccgcataagacgcagggacgaaacgaagattcgccaacccgtcatatgtatacggtgccgttcctgctgtggacctcagagaaatggcaggcagcgcatccgcgcgacttctcacaggatgtcgatcgtaagtacagcagttccgagcttatccatacctggtcggacttagcgggcctgacctatgatggctacgacccgacgcgttccatcaccaacccgcagttcaaagagaccacgcgctggattggcaacccgtataagaaaaacgcgctgattgattatgatacgttgccgtatggcgatcaggtcggtaatcaatag

SEQ ID NO: 372796 - DNA, 1224 bp, Salmonella enterica
atgaagatcctggtctatggcattaactattcaccggaactgaccggtatcggcaaatataccggcgaaatggtggcgtggatggcgcgggaaggccatgaggtgcgggtcattactgcgccgccatactacccgcagtggaaggtcggcgagcgctattccgcctggcgctatcgccgggaagagggcgaggctaccgtctggcgttgcccgctgtatgtgccgaaacagccctccaccctaaaacgactacttcatctggggagctttgcattgagcagttttttcccactgatggcgcagcgtcgctggaagccggatcggattatcggcgttgtaccgacgctcttttgtacgccgggaatgcgtctgctggcgacactctccggcgcacgtaccgttctgcatattcaggattacgaagtggacgccatgctcggcttaggaatggcgggaaaaggcaagcgcggcagcgtagcgcggttagcgacgacctttgaacgcagcgcgctgcgtaacgttgataatgtttcgaccatttctcgctccatgatgaataaagcgcgggaaaagggcgtcgcggcggaaaaaatcctcttttttccgaactggtcggaagtggcgcgctttcaggacgttaatgatgctgacgtgacggctttacgtcagcagcttggcttgccagagggcaaaaaaattgtgctttattccggcaatatcggcgaaaagcaagggctggaaaaggtaattgacgccgcggaacgattacgcgatcgaccgttgatttttgcgattgtcggccaggggggcggcagggcgcggctggagaacatggcccgtgaacgcggcctgccaaatattaaattcctcccgctgcagccttacgacgccttacccgcgctgctgaaaatgggcgactgccatctggtggtgcaaaagcgcggcgcagcggatgcggtactgccctccaagctgactaacattctggcggtcggcggtaatgcggtgattaccgctgagccgcacaccgaattaggacaactttgcgcgcgctatccgggcatcgccgtttgcgtggaaccggagtcgaccgacgcgctggtcaacgggattagccaggcgctcgccatgccgaaaaacaacacgacggcacgtgaatacgccgaacgcacgctcaataaagagaacgtgctacgccaatttattgcagatattcggggatga

SEQ ID NO: 372797 - DNA, 717 bp, Salmonella enterica
atgttctggattgttcttattattgccgccctattttttagctggcgcaactacaaaaaaaacaaaccgctgattgcggcccgtatcgccgaggagaaagaaaaagatcgcctgaaagacctgcgtcgcgatactcgacggcggcaatgggcgctggcgctagctgatatcctcgcccggcgcaacgggctaccgatcaaaggcgttgagctggtatttaaacttgacgatgacaaacgccgctatctggcgcagcaggtaaaaaaagagctgggcttgagcgaaaacctcgacggcgcggcgttacgccacaaggttgaggatatcttacgccgctggcctgcgggcatcggcagctcgccgcgcacgttttatcatcatctggcggcccagggccaggtccgcgacgcgctggccttcgactgtatgcgcaccgcctttctgacccgctgtatcgccgggctcggctggtgtaacgaaaacgaggcctggctggtgctattgctcaacgcccagcgcgctcaggactgttttgattcctgggaggattacgccaccgcctacgttcgcgctcgccgggtatggctcacgctacgtgacacgccaacagcgcttgccggacgggatttacaggaagccacccattatttgcaagacccggtcagccgctggcgacaactgccgtggaatgaattcaaaattttcgagccgatttaa

SEQ ID NO: 372798 - DNA, 1008 bp, Salmonella enterica
atgttttcccggattagaggtttgatttcatgtcaaagtaatactcaaaccatcgcacctacgctcagtccaccttcatcaggccatgtaagttttgctgggattgattatcctctattgccactagatcaccaaacgccgctcgtttttcagtggtttgaacgcaatccagatagatttggtcaaaacgaaattcccattatcaatacgcagaaaaacccttatcttaataatattatcaatgctgctataatagaaaaagaaagaattatcggtattttcgttgatggcgattttagcaagggacaaagaaaagcattgggaaaattggaacaaaattatagaaacataaaggttatttacaattctgaccttaattatagcatgtatgataaaaagttaacgacgatttatttagaaaacatcaccaaactggaagctcagtcagcaagtgaacgagatgaggtcttgcttaacggggtaaaaaaaagcctggaagatgtcttgaaaaacaatccggaggaaacgcttatttcatctcataataaagacaaaggtcacttatggtttgacttctacagaaatcttttcctgctaaaaggaagcgatgcctttctggaagctggtaaacctggttgtcatcatctgcaaccaggcggtgggtgcatatatcttgatgcagatatgttacttactgataaactcggtactttgtatttacctgatggtatcgctatccatgtaagtcgtaaagataatcatgttagccttgaaaatgggattattgctgttaaccgcagcgagcatccagcattaataaaaggactcgaaattatgcacagtaaaccttatggcgatccctataatgactggctcagtaaagggttgaggcattattttgacggttctcatatacaagattatgacgcattttgcgatttcattgaatttaaacacgaaaatatcattatgaacacaagcagtttaactgccagttcttggaggtaa

SEQ ID NO: 372799 - DNA, 1272 bp, Salmonella enterica
atgaaaacgacctttaaactgtcgttcatgatgttcgtggagtggtttatctggggcgcctggttcgtccccctgtggctatggctaaataaaagcgggttttccgccggtgaaataggctggtcttatgcctgtaccgccattgcggcgatcctgtcgccgattctggtcggctccgttaccgaccgttttttctcagcgcaaaaagtcctggcggtactgatgtttgcaggcgccgtgctgatgtatttcgcggcgcagcaaaccaccttcgccggattctttccgctgcttctggcctattcattgacctatatgccgaccatcgcgctgacaaacagcattgccttcgctaacgtaccggacgttgaacgcgattttccacgcattcgcgttatgggaaccattgggtggatagcctccggcctcgcctgtggattcctgccgcaaatgttaggctataacgatatttcccccaccaacattccactgctcataaccgccgcaagttcagcgttgctgggcgtatttgcgttctgtctgccagacacgccgccaaaaagcaccggcaagatggatattaaagtgatgctggggctggatgcgctggttctgctgcgcgataaaaactttctcgttttcttcttctgttccttcctgtttgcgatgccgctggccttctactacatcttcgctaacggctatctgacagaagtgggaatgaaaaacgccaccggctggatgacgctcggccagttctctgaaatcttctttatgctggcgctaccctttttcactaagcgctttggtattaaaaaggtattattacttggtcttattaccgccgcgatccgctacggcttttttgtctatggcggcgcggaaacgtacttcacttacgccctgctgttcctcggtattttgctgcacggcgtaagttacgatttctactacgtcaccgcctacatttatgtcgataaaaaagcgccggttcatatgcgtaccgctgcgcaagggcttatcaccctctgctgtcagggattcggcagcctgctgggctatcgtctcggcggcgtgatgatggaaaaaatgtttgcttatccgcaaccggttaacggtctgacattcaactgggcgggcatgtggacgtttggcgcagtgatgattgccgtcatcgcgctactgtttatgattttctttcgcgaatcggacaaagagatcactgctattgacgatcgcgatattgcgttgacacaaggggaagtaaaatga

SEQ ID NO: 372800 - DNA, 1008 bp, Salmonella enterica
atgagatatttattgatgttgtttatgatttttatatcttcaaatttgcaagcgtattgttatattataaatccggaatctgctagtaatacaaaaatagaggatgtaattgaaattaaattagatagcaggaatgtttttgaaaaagaagtatcaatggtatttccagattctttctctggattccgttgtttgggagggactgctgtagaaaaccgctttaagacaacgtattcaagtggtaatggggagactgtaagatataaaataaaagatgatagcggacataggttgtatgttgatgtgacattgtttgttgatggtagccaaacaggaaaacaaaaagccaatgagacttctcaagccagtaaactaaacaataacttaaaatacaaggtattggctaaggtggtgaaagtggaggcagatgataatagtattaaagacaaatctgcaggtgaagcttttttgttaggaaattatatcaaagtcaaaccattggattgtcatggtgcagttatttgtaatcatgataacaccaaccatgaatatagttttaaagtgccgataaaaatattttttactaagacaacatgttctttgtctaataatgagattacattgcctcctatttcattaagtgatctgttggctggtaatgctcaggtcgaatactttcctgatgcactgaaatttacatgtgatggagggctgggaatgacgacaagtattgtaaattatcatttttctgccgtttcagcaaccaatggagattatttggcaaatgaattaacaagcgccgatagtgcaaaaaatgttgggtttaaaattttccttaatgataaccttattcatgtaaactctgatgagaaaaggcaactgttagggtataataaagaaatgactgaagcttcagaactgaagctgggtgtacaatactataaatatggtaacgtccaaccgggcaatgtaaaaagtagtgtttatattattacaagttatcagtaa

SEQ ID NO: 372801 - DNA, 2481 bp, Salmonella enterica
atgttaaggatgactccgattgcttcggcggtattactgttgctactcggcattgacgcccatgccgcagaagaaacgtttgatacaaattttatgatgggtggaatgaaaggtgagagggtttctgattttcgcctcgatgataaccaacccctgccaggccaatatgatattgacatctacgtcaataagcagtggcgtggtaagtatgatattactgttaaggataatccggatgacacctgtttatcccgcgatgcattaacgcgtctggggataaatatacaagcgttggacaagcagaatgaatgcccaaccttgaagcaggcggtacaagggggcagttatgcctggaatattggcacgtttcgtctggatcttagcgttccgcaggcgtttgtcgatgaacttgagcaagggtatgttcctccggaaaactgggatcgtggcattaatgccttctatacctcgtactatgccagccagtattacagcgactataaggattctggcaacagtaaaagtacctacgcgcgtttcaccagcgggttaaacctgctgggctggcagctgcattccgatgccagctataacaaaaccgatgacagcagcggggagtggaaaagcaacaccctgtatctggagcgcggtatcccgcaaattctgggcactctgcgtgccggggatatgtatacctcatcagatatttttgatgcggtgcgttttcgtggcgtacggctgtatcgcgatatgcagatgctgccgaactcaaaacagaattttacgccgctggtgcaggggattgcgcaaagtaacgcgctggtcaccatcgaacagaacggttttgtggtttaccagaaagaggttccgccaggcccgttctctattgcggatttacagttggcaggcggcggtgcggatcttgatgttagcatcaaagaggctgacggatcggtaacaacctatctggtgccctatgctgcggtgcccaatatgttgcagccgggtgtttcaaaatatgattttgcggcagggcgtagccatatcgaaggcgccagcaaccagaccgattttgcgcagatgagctaccaatacgggctgaataatctcttaacgctgtacggcggcaccatgctggcggataactacaatgcatttacgttgggtactggctggaatacgcgtatcggcgcgatttccgtcgatatgacacaatcgcatagcaagcaagacaatggtgatgtgtttgacgggcaaagttaccagattgcctataacaagtatttgacgcaaaccgccacccgttttgggcttgctgcctatcgttactcgtcacgagattaccgaacgtttaacgatcacgtttgggccaataacaaagacagctatgatcgtgatgaaaatgatgtgtacgacattgcggattattatcagaacgattttggtcgtaagaacagtttttcggcgaacgtcagccaatctttgccgcagggctggggctctgtatctttgagcacgctgtggcgtgattattgggggcgtagcggtaacagtaaagattatcagctgagctattccaatagctggcaacggattagctataccttttccgccagccagacttacgatgaagatcatcacgaagataagcgttttaacgtctttatctctattccgttcgattggggagatgatattagcgctccgcgcaggcatttgtatgtgtctaactcaacgacctttgatgatgacggttttgcgtcaaataataccgggctttccggcaccgcaggcagtcgcgatcagtttaactatggggtgaatctcagccatcaacggcaggacagtgagacaacggctggcggaaatctgacgtggaatgcgccagttgcgacgcttaacggcagctatagtcagtcgtctaaatatacacaaactggcggcagtatttccggggggctggtggcctggtctgggggcgtgaatttagccaaccgactgtcggaaacgtttgccgtgatgcatgcgccgggtctggaaggagcgtatgttaatgggcagaaataccgcaccaccaaccgtaatggcgtggtggtctacgatggtttaacgccgtatcgtgaaaaccacttgatgctggatgtttccaacactaatagtgaaaccgatctgcaagggaatcggcgtaatacagccccatatcggggggcagtcgttctggcgacgtttgataccgaccaacgtaaaccttggtatatccgggcgcagcgtcccgatggttcaccgctgacctttggttacgaagtagaggatattcatggacataatattggcgtggtaggccagggaagccagctctttattcgcaccaatgaagtaccgccggaaataaatgtggcgattgataaacaacagggactttcatgctcaatcactttcggcaaaacgattgatgaaagtaaagtttatatttgtcggtga

SEQ ID NO: 372802 - DNA, 681 bp, Salmonella enterica
atgaaaaaacttctttttttttcgctgttcttcatttcaacggcaaatgccggtgtagttatttacggtactcgcattatctatccagcagagaaaaatgaagtactggtgcagttaatgaatcagggtgggcgttcttcattggttcagtcatggattgatgatggagatacatcgttaccaccggaaaagattaaggttccatttttgctaacacctcctgttgcgaaggttgctggggattcaggtcagcagattaaaattaaaaaaatgccaaatatgctaccaaataataaagaaagtttgttttatctcaacgtgctggatattccaccaaacaatccaaatagtaccggtaaaaatgtattgaaatttgccatgcagaatcgcatcaaattattctatcggcctaaaggaattgccccagttaatagaggtacttttcagaaactgtccatgaaacgtactgctagtagttattctattcagaatgatacagcaaattgggtcacgataatagaagttaaagttaatggtgttaaaataaataacgaaagtattatgcttgcaccgctctccagtgcagatgtggcattaaaaagtgctaatgccaatcagtataaaatgaccattattgacgatcacggtaattatattagcgataacgtcagcttaaaataa

SEQ ID NO: 372803 - DNA, 546 bp, Salmonella enterica
atgaaacgttcaattatttctgctgctgtactgtctgctgtatttatgagtgctggggcgtttgctgaagataccggaactttaaacattattggcacagtagttggaacatcatgccagtttgtgtcaggaaataattcagaggatgtggtgttaagtcaggttgaaactaaagtatttgatacgatgagccccggttcggtttatacaccaatcacggaacagaccacacatctcaaaatttactgcccagatattgaagaaggaaaaagtctgaatattactgtcaaggcaccaactttagatgctgaaggtgtaattggaaatacgttacctgatggtgctaaaggtgtcggttttgctttgaaatataaaaacaaagctgttgatcatagctcaaacaatatcatcgtgggagccacagattttgactcagataagatctatacgattccactggatgtttattatgctaagcaaggtactgacgcagtaacgtcaggggatgtgaacgctaccgtaacactgcaagctgcatataattga

SEQ ID NO: 372804 - DNA, 1512 bp, Salmonella enterica
atggaaattaaattcttatcattatgtattttagcgggtgttttatttgctaaccaggtgaatgcatcagagaacaacagtaaagatgatgtaaaatacgctgcgcttacccagaaggatcttgatgctttgcctgtggaaaaaagagcttcggttctggatgaactggggtttatccatgaatacggccttagtgtaccgatgaatcgcgaacgggcgttgcagtattacaagcaggcctgtgagcttggcggtaactacggctgttataatgtgaagtatgcttatcagtatggcgacggagtggcgaaagatagcgctcaggccaataagtatgctaagaaaatgaatctggataatttattgattgagcaagaatatattgataagttttcgcaagaaatttacatggcaaaagcattggccgatacggataaatcgcagcgggcggcatttattagtatactaattcatgctctaaataatagacccgagagcgatgcgcttttttttagccgtattggatttaaccaggaaaaaacatttcggctggctacgttatggtcgcaggatggcgacccgcaaatggattatcagatggggcgactcacccttaatgacttttccggtcgctatgcggacgagccttatcaagccagacctgcgtcattgaagtggtttcgcgccgccgcggaaaaaggcgtcgttgaggcccaatctctcttggggggtatttattcggggggagagggcgatgagtgggggattaagccagacattcaggaagcacaaaaatggtatggacaggcggctaagcagggggacagcgatgcacagattgcgttaggtaaaatctattattctggcgcaacagggcgcactgattacgctaaagcgctggcattatttacgcaggttgaaaatgatggtactaattcgcgctcaacgatgccgttgagttggatgtattataacggtttaggtactgcacctgattgtgataaagcctggtcgtattacaagaaagcatctcgatatgtaggtaagaaggttgaggaaaaaatatttttaagtaaatgcgcagcggatattcagagtcgaaaaaacaacgcggatgctttacccaaagtaaccctaaaaaaagaaagtattttctctcgcgggataacggctaagccgaaagaatgcgcactaatttttcagattggcacagataaaatccgtaacatggcgaatttgcatattacgcttgagctgaaaaatgatgatggaatggcaactgaggaaacgttaatgattccgccattcggtttgaatactctggggatagatatgcaaaatcatgatgttgatcctctcgttaccccatacgatctcccgctgtatacgcaagctttttgtcacgggatcggcgatatccattttacgctgaaatccgctacggcaacgattaacggtaagaatgtcgatttactgaaagctgatagtgtgcgctttttagataaagaataa

SEQ ID NO: 372805 - DNA, 141 bp, Salmonella enterica
atgcaggtgttaaactcacttcgcaatgcaaaacaacggcatccggattgccagatagtcaaacgcaaaggacgcttatacgtgatttgtaaaacaaatccgcgttttaaggcggttcaggggcgtaaaaaaagacgttaa

SEQ ID NO: 372806 - DNA, 654 bp, Salmonella enterica
atggcacgaaaaaccaaacaacaagcgctggagacacgacaacacatcctggatgtggccctgcgtttgttctcgcagcaaggcgtatcagcaacctcgctggcggagattgcgaacgctgctggcgtgacgcgcggcgcaatctattggcatttcaaaaataagtcggatttattcagtgagatctgggagctatcagaatccaatattggtgagcttgagattgagtatcaggcaaaattccccgacgatccactatctgtattaagagaaattttagttcatattcttgaagctactgtaacagaagaacgacgccgcttattgatggagattatattccataaatgtgagtttgtcggagaaatggttgtggttcaacaggcgcaacgtagcctttgtctggaaagttacgatcggattgaacaaacgttaaaacattgtattaatgctaaaatgctgcctgaaaatctgctgacccgtcgtgcggcgatactgatgcgcagctttatttcagggctcatggaaaactggttatttgctccgcaatcgtttgatttaaaaaaagaagctcgcgcctacgtcacgatcctgctggagatgtatcaattgtgtccgacgctgcgcgcgtcgacggtcaacggctccccctga

SEQ ID NO: 372807 - DNA, 456 bp, Salmonella enterica
atggaacgtctacccaccacgccgcacgatgcggtattccgacagatgctgatgcaaaaagaggtcgcccgcgactttctggctatccacttgccagaagactttcttgcaatctgcgatctggattcactgaagctggagtcagggagttttgttgaagacaatttacgcagccgctattcagatattctctactctctgcatacccaacacggccccgggtatgtttacgcgctcattgaacatcagagcaaatcagaccggctgatggcttttcgcctgatgcgttacgccattgccgccatgcagcgtcatctggatgccggccatgataccttgccgctggtggtaccaatcctcttttatcacggtccggaaagcccgtggccctatagccttaactggcataatatgtttgtgaaaccggatatggcgaaggccttatacccaaaataa

SEQ ID NO: 372808 - DNA, 552 bp, Salmonella enterica
atgaccgcgactgcacagcagcttgagtttctcaaaaacagcatcaaaagcattcaggattacccgaaaccgggcattcttttccgtgatgtcaccagcttactggaagacccgaaagcctacgcgctcagtattgaactgttggttgagcgttataaaaatgcgggtatcaccaaagtggtcggcaccgaagcgcgtggcttcctgtttggcgcgccggttgcgcttgggctgggcgttggttttgttccggtacgtaaaccgcgcaaattaccgcgtgaaactattgccgagacctatgaattagagtacggcaccgatcagctggaaatccatgtcgacgcgattaaacctggcgacaacgtgctggtcgtggacgatctgctggcgactggcggcaccattgaggcgaccgtgaagctgatccgtcgtctgggcgggaaagtcaccgatgcggcgttcatcatcaatttgttcgatctgggcggcgagcagcgtctggaaaagcaggggattacctgttatagcctggtgccgtttccagggcattga

SEQ ID NO: 372809 - DNA, 207 bp, Salmonella enterica
atgggcaagctggttaattcaatcaggagttccactgtcagtgctttaggaaatgggggatggaaatctattgaaatggttcacagatatgctcaccttgcgccgaaccatttaacggaacacgcgaagcaaattgactcgattttcagtgatggtgtcccaaatatgtcccatatggaaaataaggagggaattaaagaggcataa

SEQ ID NO: 372810 - DNA, 1176 bp, Salmonella enterica
atgaataagatcatcaaacgtttagagatcatcaaaagcgccatcgaacttgaggacgaagagattatccgtcagcagctcatctacctgaaaaatgagccgcaggatgccgtaatcagcgcgattgcccaggcgattgaagctcgtcgattcagtgacgccatgcaagagatcgccgcctggctacaggctcaacgggcgctctcgacgtggcaagatccctctattgccgccagtaagctggagctgaaagcgcttgaagcccaacttcgcgatctgattgacaaacgaaatgcgcgggtacaaatcctcgacgatttcaacgacctctatcatctgcgtctcgggccgttgatgagccgtattctggagttgcgtaaacagctcgcggtgagtatgcagcgtaagcaagaagccgaaataaaacgccgggaaaaggattatcaatcctgcctgcaatttatttcccaggccgtggatcaactggcaacgctaaaacagcagtggacaggattgaatgccgcctcgcgcgaagcggtgggcatccgtcagcgaatccagcagcagacggagttaatcaccgcgttgctggcggaaattcgcgagctggaggcggatttttcccatcaggacgacagcgcattccgccaggcgcaggaaaatgcggaacaggactatcaccagtaccgggagcagcagcaggaagcgcaattccgctacgctcgcgatcaacgtttgtcggctgacgaacgcaatgaattaaaacgtttgtggcgtcaggccagccgcctgtgtcacccggatgtggtcgccgatgaattgaaagaaaaagcgcaccagatgatggtacaacttaatcaggcgcggcagaatgccgatctggcggcaattcgcgcgttactgacacagttgcaaagcggtctggaaccgatgatggcaagcgacaggctcaataacctggaacatctgcgccataaaatacgccagctccgcacgcaaatcgacgcgctgttgaaagagataacgcagctggaaacggaaaatgcctggcggctcgcctcttccgttgcggataaggaagcctatttctccgagcaggaacgggcgctaaccgaaattcgcaatacgctggaggcgcaggttcaacaggtggaacaggaacttctgtcagggtag

SEQ ID NO: 372811 - DNA, 1971 bp, Salmonella enterica
atgacccaaaagcgtaccctgctaaaatacggcatactctcgctggcgctggccgcgccattatctgcctgtgcgtttgactctcttacggtaattggcgatagccttagcgataccggaaataacggtcgctggacctgggatagtggtcaaaataagctctacgacgaacagttggccgaacgatatgggctggaattaagcccttccagcaatggcggctctaattatgccgccggcggcgcgacggcgaccccggaattaaacccgcaggataataccgccgatcaggtacggcagtggcttgccaaaacggggggaaaagccgaccacaacggtttgtatattcactgggtcggcggaaacgatctggcggcggccatcgcgcgacctgccatggcacagcaaatagccggtaatagcgccactagcgcggcggcgcaggtagggctgttactggatgccggcgccgggctggtcgtggtgccaaacgtaccggatattagtgcgacgccaatgcttctggaggcggtaatcaccgccgggctgggcgcagcggcgcccccggcgctaaaagcggcgttagaggcgctggcggagggcgctacgcccgatttcgccagtcggcaacaggcgatccgcaaggcgttgctggcggcggctgcaacggtaagcagcaatccgtttattcagcaactgctcgttgagcaactgctggcgggctatgaaaaggcggcagggcaggcgtcagctctgaccgattattataatcagatggaagagaaggggctggagcaacacggcggcaatatagcccgtgccgatatcaacggcctctttaaggaaattcttgccaacccacaggcgtttggtctgacaaataccgtaggcatggcctgcccgccgggcgtatccgcttcggcgtgctcctcggcaatgcctggatttaatgcgtcgcaggactatctgtttgccgatcatttacatcccggtccgcaggtccataccattattgcgcaatatatccagtcgatcattgccgcgccggtacaggcgacatacctgaaccaaagcgttcagtcgatggcgcaaggcagtcgtaccacgcttgacagccgttatcagcagcttcgccagggggaaaatcctgttggttcactgggcatgttcggtggatacagcgggggatatcaacgttatgataataatgaggccgacgggagcggtaatcataataatctgacggttggcgtcgattatcagcttaacgagcaggtactgctgggagggctgatagccggttctctggataagcaacatcctgacgataattatcgttatgatgcccgcggttttcaggccgccgtattcagccatttacgcgccggtcaggcgtggctggatagcgatttacactacctgtccgctaaattcagtaacattcagcgcagtatcacgctcggtgcgctaagacgggtggaagagggcgaaaccaacggtcggctgtggggcgcgaggttaaccagtggttatgattttgtcatgatgccgtggttaacgaccggaccgatgctgcaatatgcatgggattacagccacgttaatggttatagcgagaagctcaataccagtacatcaatgcgttttggcgaccaaaacgcccattcgcaggtgggtagcgcgggttggcgtctggatctccgccacagcatcattcactcctgggcgcagattaattatcgccgtcagtttggcgatgatacgtatgtggcgaacggcggccttaaatcgaccgcgctgacgtttagccgcgacggaaaaacgcaggataaaaactgggttgatatcgcgattggcgcagattttccgctgtcggcaacggtgtccgctttcgccgggctgtcgcaaacggcagggttaagcgatggcaatcaaacccgttataacgttgggtttagcgcccgattttga

SEQ ID NO: 372812 - DNA, 411 bp, Salmonella enterica
atggatatcgtttctgtcgccttaaagcgctactccactaaggcgttcgatcccagcaaaaaactgaccgccgaagaagcggataaaataaaaacactactacagtacagcccctccagcaccaattcccagccgtggcactttattgtcgccagtacggaagagggcaaagcgcgtgtcgcaaaatccgccgccgccaattatgtgtttaacgaacgtaaaatgttagacgcctcccatgtggtggtcttctgcgcgaaaaccgcgatggatgacgcatggcttgagcgcgtcgtcgatcaggaagaagccgatggccgtttcgctacgccggaagctaaagcggcaaatgataaaggtcgccgctttttcgccgatatgcaccgcgtctcgctgaaagatgaccactag

SEQ ID NO: 372813 - DNA, 1434 bp, Salmonella enterica
atgaaaacctgttggcaagtccttggcattgaggccaccacggataccgacgccattcgtcaggcttatctggcgctgctgccgtcatttcacccggaaaccgatccgcagggttttaagcaattgcgagaagcctatgagaatgcattgcaggggacaacatcgcccgccattacggtggttgatgaggatcccgataccccgtgggtgaattatctcagggagatattcggtgatttgctggcggatggcgaacggcgctttcagccgcaggcatggcaggagtttatccaacagatcaataaattatcgatttcacaggtcgaaaaatcgcgctggtggctgtgcgctatcgcgatgaagacctttcctatttcgtactcgtgtctgaaactgctgtcagatcgcctggcctgggaacaggggagtgataatcgagatgtcgatgccgaggaggtggaggatcttttgtttgaaatccgccgtggcgacctgtttgattattcgctattgctgcatttgccagtggcggtacaaaaccagaccattgctttttatgatgccctggacaacacctttttcgagcatcctctctatttcgcccaacttatggcgcagcacggcgcctggattatcccggacaatctacgctttcaacgacgtctgttacgctggttcagcaccttgcactggggtattgcggagctgctgcctgtcgccctggcatggcaggaagccgaacccgataacgcaacgccgggttattactacttagcccagcgcgtattttgcggtgaaggcgatagcctgctgccagaactttacgcgcagtggtgggcgcatccttctacccagcttgacgatctgttgctgcgctggtgccgtcagcatcgaccggactttttcccgctgctggtgatggcggttgaggggcgtgagcaggtggatattaacgctgaacagctgctgtatattcccggctcaagcgctcgttcctgcttgctgtgggccgaggcgctgcacagcggcgcattatcgccgctaagcgaaagttttattgcgcggcgtttgaattatggcgcgccagcggtgagtgaggcgcatagccagcatccatactggctgttgtatcaggtggcggatagcctggcgtgcgccgaggagccgtcagcggcattgttacagagtctggtaacgaagcttgatgcgccggatatctgcccgttggaagcgctggttattcgcgggttgctggggcgggctgcggctgtcgccacaccgtgtgaagctgtagtcgcagatgaagaaccggtgacgacggtgacttcgccgagtacggaggaatctggcggcggctttggcctctggcaggtgattaaaatcattttatttattggcgttgtcggccatgtattacgccagtttatgcattag

SEQ ID NO: 372814 - DNA, 1473 bp, Salmonella enterica
atgaatatctgttgggaaatcctgggcattgaacctaccaccgatctggaatgtatccgtcaggcttatcttgccctgttgccctcattccaccctgagagcgatccgcagggttttaagcgattgcgccaggcctatgaagaagcgcagcactgggccgcctcgcctgcggaggacgcaaaaacggaagaggtgggcgacgaacatgaaatactggtggcgttcagggaattgctggcatcagagcgcgatcgctttcaaccctcggcatggcagaaatttattcagcaattgaaccagtgttcaatggatgagatagataagctgcgctggcagttgtgcgacatcgccatgaaaacggaaacgatctcgctgtcttgcctggcattgttggcgcagcgtctgaactggcagccgcaggaagcagacgatgatgctgagggagaagagctggaagcatttctggagaccgtaaagcggggcgatgcgtttgatctgctaagtctggccaaattgcctcttgttgttcaagaccaaactgacgcctacttttttaagcttgagcatatctggcgcttttatcccgaacattttgccgacgctctacaggttcagggagcctggataattcccgatgataaacagctgcatcgtaaactattacactggtttagcgccgagcagtggggcatggcggaactggccgatattgctcgtcgctggcaggccgcggagccggataacgaagatgcgcactattacctgtgcaaacagcgtttgctctgcggtgaaggggaaagcctgttggccgatctttgcgatttctggcagcgttatccctccacgcaggcggacgacctgttgctgggctggtgccgccagcatcggcccgatttcttcccgctggcggtgatggcggtcgaagcgcgctgtatggcggatgccgaatatgtgcccggtgaaagtgcgcgcacgcgtttactgtgggccgacattttgcacagcggtaggttatcaccgctggggcgttcatttgttgactccctgttttataagcgaaaagcgatggcgtgggcaaattcacggctgagtacccagggggaacccgaaacgccgctgttggatctgtaccggacggcggagcaggtggtgctggaagcgtttcccaaagaaaagccctttttccgcctgctgatccggctggaggaggggcaagcctgtccgctggaggcgctgataacacaggcattgtcatctaaaatcgccatgaagccaggcgatattcgtgacaaaaaggagctggcggaagagctcaggctggcggctgagaaagaagagaaaaaattgtcttctgaagcgaaaaccgaagcaccccgtcaggcggaatctggcggggtgatgaaaatcatgaagattgtcggtttgatcgcgttgattgtctgcgcgttaaatcgattcttccattttttctga

SEQ ID NO: 372815 - DNA, 1680 bp, Salmonella enterica
atggataatgcaacgttagcgattggtatcgatctcggcaccactaatagtttaatcgccgtctggcaagacggagccgcacaattaatacctaataaatttggtgaatatttaacaccatccataattagtatggatgaaaataaacaaattctggtgggaaaacctgccgcagctcgtaaaacatctcatccagataaaaccgctgccttatttaaacgcgcaatgggcagtaatactcactggcatttgggtgaagagtcgtttaatgcgccggaattatcttcgctggtgttacgctcgctgaaagaagatgcggaagactaccttcagcagccaatcaaggacgtcgtgatctcggttccggcttatttcagcgatgagcagcgtaagcatacacgccttgccgctgagcttgcggggttaaacgccgtgcgcttgatcaatgaacccacggcggcggcaatggcttatggcctgcatacgcagcaaaacagccgttcgctggttttcgatctggggggcggaacctttgatgtgaccgttctggaatacgctacgccgattatcgaagttcacgcctccgctggcgataactacctcggcggcgaagatttcacgcatttgttgcttgatgaagtgctgaaacgctggaacctcgataaatcagcgctgacggatagcgatctggctgcgctgtatgcctgtgttgaagccgcaaaatgcgccagcggctccccgctgcgcatgagctggctttatcaggagcgcgcgctggaaagcacgttttatgacgatgagctggaagccctgtggctaccgttgctcaatcggctgcgcacgcccattgagcaggcgctgcgcgactcccgactcaaaccggagcaaattgacagcctggtgctggtcggcggcgcgtcacagatgccgctggtgcaacgcatcgcggtgcgcttattcggtaaattgccctatcaaagttacgatcccagcaccatcgtggcgcttggcgccgcaactcaggccgcctgtcgcctgcgccatgaagacgttgaagaggtgatcctcacagatatctgcccctactcgctgggcgtggaagtcaaccgacagggcgtgcctggtatcttctcgcccatcattgaacgcaataccaccgttccggtgtcaaaagtggaaacgtactccaccatgcaccctgagcaggactctatttgcgtcagggtataccagggcgaaagtcacaaggtgaaaaataatatcctgattgattcttttgacgtcatgctgaagccgaacgggcacattcaggccattgatattcgttttagctacgatattaatggtctgctggaagttgacgtgctgctggaagacggcaagagtgaatccagaatcatcagtcacaatgccacctcactgacgacgcagcaaatcgacgccagccgcgagcggctgctggcgctgaaaatttatccccgcgatatgctgattaaccggacgtttaaagcccagttagaggagcagtggtcacgcgcgttaggcgatgagcgcgaaatgctgggggagattattaccgatttcgacgcggccctgctgtctaatgatatgcagcgcgtcgatgacgtgcgccgtcgcgcctgtgaatatctgggtattgacgagccgaaagcgccgtaa

SEQ ID NO: 372816 - DNA, 2232 bp, Salmonella enterica
atgatccctaatctgaatgaactgacggatactccgattgcccgaaccaatttgatcaagcttgaagaagatcagctgacgaccatccagcgtctattggcccctgtatctaatatctatacgatagactttatggttcagcgctttactaaagagcgaaaagaaaaatccgctgattactatgcgcgaattcatcaggaggtaaaatcttgcgtgcggcagaaacttgggctggaggccgggcaggaggtaaaatatgagctgcattgcttaccaaattaccatcacgtcttttttttcctggcgcctgcaactaacccgaacagtcaggttcataggacgttggcagaacgtattgaaacgctttgtcagcaactcgccgctgaaaatcatgacctatctcgcctgattcagggattatttagcctgcatttgaaaatggtaatgctggaaaaagccagtgagcgcttttcggtatcgccagcttacttcaactcaacgctttaccttaacgctcgcctgagtcagcccgtcacgcagaaaagcggcactggagttatggaggcattcgaactcgacatttatgcatcagaatataacgaactcgcctttaccctgcacaaacgaaaatttctggtcgaaccggaggatgaattgcatctctctctggacgatacctgcgtatggtttaacatcgataatcgtcgactcaaagcccggcgcaaactcgatgcccgggatagcaaactggacttttttcgtgagcgcagcggctatggtgaatgccaggcctatacctataacgtggtcatgaatgccgcctgcgagcggctcagtgaactagagatcccgcatcagcctatcccatttcaggccacccacgaggtcaatcagttcgctaccgacctcgatcaacagctgactaatacgctgttggtggttaataacggcgtcgaatttagcgccacgcaagaagcttatttctttgacacattagccatccagttccccgggtatcaactctggcctctggcgtcacttaaacattctcagcaaaccggcttttctgatctgcctgccagtacatctattctggtactcaatgcggtagatgaagagcggagcaacagcatccgccagcaagataatgaatctgttgagtacaatgatttctatgcggcctttgccgacgcccgaaaacaacccgaactcaattgggatacttatacccagattaaactagatcgtttgcaagggtggctaaatcagcaacctctgcccgtagtcttacagggtatgaatattgatcacaagttgctggatgcgattgattttattaatgaacaattgacaagcaaccctactcaatacgaaattgatcttacgaagcctcacagtcgtctcaagtcagcagttaccttacttaacagtaaggttcgccgaacgaaaaccgaactatggttcaaagaaagcttactcaatcagcatcacatccctctaccagatttggcggacgggcactataccgcctatgcggtacgcaaaacgaaaaacaatctctctctccttgggcatgttgaactaaaaattgagcacggccaacttagggtggttgataccgggatctctgaaggtaaattaggctatctatccgttgatcatccctctctgggacgattaaagaaattattcgacaaaagcttctatctctacgaccacgccgcagatgtcctgcttaccacctacaacagctcccgcgtgccgcgcctgattggcccggcgcaatttaatattgtcgattcatacgcttatcaggaacaagaaaaagcgctggcagagcgtaaaggagataaatttaacgggtacgccatcacccgctcagcaaaaccggatcaaaacgtactgccctatctgatatcaccaggccgctcgaaatacgactcgctgaccaaaacgcaaaagatgaagcaccaccatatttatctgcaaccgcatgagaatggcgtgtttgttctggtaagcgatgcccagcctacaaatcctactattgcacggcctaacctggtggaaaatctgctgatatgggatgcccggggcaaagccgtcgatgtatttagccacccgttagctggtgtttacctcaatagcttcaccttggatatgctcaggagcggcgaaagtagtaagagttcgatttttgccaagcttgcccggttgatggtggagaactag

SEQ ID NO: 372817 - DNA, 4695 bp, Salmonella enterica
atgagaaaaagctggactatagaggaagattgtaagctgctaaccttggtgcgtcagcacttttccgcgctggtcagccataaccggctgaatgccacaatgccatttagccagctgctccacgatgcatttgactcacctgaccgcgatgccccagcattgctttatcgcctcgaacaggcaaaaatcttgggatttgccagccgtcctggtggcgatcccactaaacaaccgtttcgctgcctgataagcaatgatttggcgctatacgattacagcctcacctttcccaccctcagaaaagcattgcatccagataccgttgcggcagcactaaaccacttcacgattagcaatccacacgaaccactgtccaatactataaatgaaatcgcgacagccttgcatcttgcccccatgcaggtggaaaagattctgatcgaaagtgaccaaataaccatcaatagttaccgtgagtgtgagcgtgttggagagaaaactatcaataataatctgcaagatctcatttccaggcaaattcctgacataacgctgattaaagagattaacgcctgtcgcgcccaagtctctcaactttaccacgtgcatgaacgtgatggcgctgaggttattttcagttccgacggcacggggttcggcaaaagctatggcgtgattcaagggtatgttgaatatctggaacgtttcgccaaagcccagcagccaaattacctgtttcccgaaggcggctttaccaacctgttgttcatgtcgccgcaaaaatcacaaatcgatctggacagcaaccagaaagagaaaattctggccgctggtggcgagttcatttgcgttctctcccgtaatgatattgccgaccttgattttatggactgggcctctggcctgaaaaaccgcgaccgctatacccgttggtataaaaatgccaataacaactcccttatcagtgctgcgatgcgttcacttaatcacctggtttcgcagattgatcgttgtgaagaacaactggcaacattcaatagtcagcatacggattttgatatagaaataatcaaagaccagctaaagaactaccgtcatagccttcgcaacaccattgtatcggcatgcaagtcattatttgaacggggtaatggtgaaacgtcgattcaagaatatattcgctgcgggctgcttgctcgcagaaagcgagagcttaacgcaatgctgggaaagcctgcgtcaaaaatgagcgtacacgaagtctacttcgagcttatcaagcaggtattgcctttcgaagtgtgtcagtaccgcccatcggtgctgttaatgaccaccaaaaaattcgatacatcaacttatcgcctgacacctcgtaaacgaggcgaaggtgtgaattttgagcccgtaggttttgacctgctccttggcggcaagctgagccccaaagatccacagatcagcaccgttgcggcagccggtcataccgggcaggttgcctatcttcgcgacgaacacttcaaacgtaatccagactgcccttttcgccagaaaaatatccgcttcacggtgataatcgatgaactgcatgaagcttacacccgccttgaagaaacgtgccatgtaaagctaatcacacaggaaaataacctggcgcacgttatttccgtcgcaggacgtattcacaacgcggtactcagcttagagcgccgaaacaagcccaaagaagcgcaaacgacctttgagcaagagatggtcaaattcatcactactctgcgcaatttactggcagaaaagtgcgaactatccccaggtacaacgctgggatcgatcctggagatgtttcgcgaccagttaggggcattcgaagtcaatggcgacgccgccgaacgcatcatttccatcacccgcaatgtgttcagctttaaccccaaaatgtacgttaatgaagaggggctaaaacgcattcgtatgcgaaacagcgaaggcgacataacgcgcactgagctgtattacgaagtcgaaaatgatgccaatgacaccaaccccaccctgcacgatctgttccagttggtctccgtcatcctctccgcctgttctgatatcaccaaccgacactttaagcgctgggtaaagaatggcggccaggataactccagcagccagaatacgcctttgggccagtttgttgacgcagccaataacgtagccggcgtggtgcgccacatcttcgatcgcaccaccgataaaaacttgttgattgatcatttctacacttacctgcaacccaaaaccgtattcacgatgacgccgatagctgaactcaattacgtgaacaggggagccgagcgcacaattattctggcgttcgaaatggatctggtacaagagttgcccgaagccatgctgctgcgtttattaaccggtacgcacaataaagtaatagggcttagcgccaccagcggttttagccacaccaaaaacggtaacttcaatcgtcgcttcctggcacgctatagccgcgaccttggctaccgaatcgttgaacgcgaaaaggcagatatcgacacgcttaaagcattacgtgggttgagggccagtatccgcaaagtcgacttcagagtgtttgatgatgaacagatggaattgaccgatatctgccagaacagcgaaacctttcgaaaggtatataacgatttattcaaagcgctaaaagaaccgctggaatacgccctgaaaaataactataaacgacgccagtactgccgggagctggaagcgttattgcttgccgcctacgagggtaaaaacagcctgattttgtcactttcagggacgtttaagcgggcctttatcagcgcctggcgcacgcataagacaacctggcgcaagcagtacggtatgcactcccggtgcgatgaaaaaacagataacgataagaaacatgaccagatcctgacctttaccccattcaaagggcgtcacaccgtccatttggtctttttcgattcaccactggctaatgtcgaagatatcaggcaagaaacctatctccagaacagcaataccgtactggtatttatgagcagctacaaaagtgcaggcaccggcctcaactactttgttaaataccatgacggcgatattaatgatgtcaatgcaccacgtctggatgtcgattttgagcgcttagtgctcatcaactcctcgttttacagcgaagtaaaggacaacagcggcaacctcaatacattacctaactacgttaccgtgcttaaacactacgccgatgacgatattaccgtccacaagttggccgatatcaacgttaatttcgcccacggcgaaaactatcgcctgttaatggccgaacatgatatgagcttattcaaagtcgtcgtgcaggccgtagggcgagtcgagcgtcgcgacactctattgaaaacagaaatctttttaccccgcgatgtgttccgtaatgttgcattccagttcgccgccctcagtgaagatggcgctaacgaggtcatatcagaaagcatgtccttgcttaaccaccgcctcatgaaggagtgcgaaaagctgagtcagagccagtcatttagtgatgctgaacagcggcatgcgtttgaacaggctatcttagaaaatggtcgccgcattgatgctgttcataagcgagtcctgaaaaccgactggataaatcaggtacgcgccggcaaccttgaatatctcgaattgtgtaatttattccgtgattctgactcctttaccgatcccctgcgttggctggaaaaacttcaggctaattccttgtatgtcgccaatcggcaaatgcaatctatccaccacgccctgtttatcgatcgccaacagggcaaccaaactattttactttgccacaaacgcgacccggatggacttgtccacagagattattccgccctgtcggatttcgctggcggcgcaagagagtaccggccagagctcaccctctttccgcagtatagaaacgatgtcgattttacccccggcaacctggtcggcgagttgattcgtgaatgtgacaacatccaggaaacggcattcaaaaaatgggtgcccaaccccaggctagttccattgctcaaaggcaatgttggtgaatatctcttcgataaagtgctaaaaagttatggcgttaccccactctccgaccaacaggtgtttgaacgccttgaaccgctggtatatgagttttttgaccgctttattgaagtgggtgacgacctgctctgcatcgacgttaaacgctgggcgacacagttggacgatttaacgcgggcagaagaaacgcttgagaaaagtaacaacaagattcgccagatccgtaatatcaccagccaaaaggcagacacagaggggcagaaacagcttcaggctgtgctggcaggccgttacgaacgcattcgatttgtctatctgaacgtcgcctacagccagaaccccaataatctgatgtggcaagataacgtggatcacacgatccactaccttaacctgttgcaaaccgactaccagtactatcagcccaaaaatagagagagcggacgagctcaggaaaactcgaaactaagcatgacattggacattaacccaatgttactaaccctgctgggtgtagaaaagttgccgactaaaggaaaagtctcatga

SEQ ID NO: 372818 - DNA, 2199 bp, Salmonella enterica
atgatgaacgaataccagcggctggatccacggatacagaagtggatataccggcagggatgggccgatctccgggaactgcaaaaaaaagccgttccaccgatattagcgggcgatcgggatgtcctgatcagcgccgcgactgccgcgggtaaaacggaagcttttttcctgcccgcctgttctgccattgcggatattcagggcggttttggcattctatatattagcccacttaaggccctgattaacgatcagtatcgacggctggaaagcctcggcgatgcgctggagataccggtcacgccctggcatggtgacgttgcgcagagcaaaaaactgaaagcgaagaaaaaccctgccggtattttgcttatcaccccggagtcgctggaagcgatgctgatccgcaatgcgggatggttaaagcaggctttcgcgccactgacatatatcgccattgatgaattccatgctttcatcggttctgagcggggtatgcagcttctctctctgttaaatcgaatcgatcacctgctcggaagaatcgacaatccagttcctcgggtcgcactcagcgcaacgctgggggaactggagcgtgtaccgttatctctgcggccaaatcaacgtctaccctgcaacattattaccgacagtcagactcacgctacgctaaaagtacaggtgaaaggttatctggaaccgctaaccacctcgggccaacaaccgccgccgtcggcagagacgcaaatctgtcatgatatctttcgcctctgtcgcggtgactcccatctggtgttcgctaacagtcgcaaacggaccgaaagcattgccgctacgcttagcgatctgagtgaagcgagcatcgttcccaatgagttcttcccccatcacggctcgctgtccagagatctgcgtgaaacgctggaacagaggcttcaacaaggcaacttacccaccaccgccatctgtacgatgacgttagagcttggcatcgacatcggtaaagtcagctccgttgtgcaagttaccgccccccattccgtagccagcctgcgccagcgaatgggacgctccggtcggcgcgactcgcctgccgtattgagaatgctgattgccgaacatgaactgacaccaacatcaggcattgtcgaccagctcaggcttcagcttgttcagtcgctggccatgatccgcttacttatcggcagcaaatggtttgagccagctgatacccggcagatgcactattccaccctgttccatcagattctggcgatcgtggcacagtggggaggcgtgcgtgcggatcagatctggtcacagctatgtcaacaagggccatttcagaaagtccgaatcgatggcttcaaaacgttattgaagcatatgggagagcaccagtttctgacccagctatcaagcggcgaactggttctgggcgtcgagggcgaacgtcaggtaaatcaatacaccttctacgccgtgttcagcacaccggaagaatttcgcattgtggcggggagcaaaacactgggctccattcccgttgattccccactgatgcctgaccaacacattattttcggcggtcgacgctggaaggtaaccgatatcgatagtgataaaaaagttatttatgtcgaggcgacaaagggtgggcagccgccgttatttggcggacaagggatgtccattcatgatgtcgtccgccaggaaatgctcactatttatcgggaaggcgactaccgcatcaccgttggcgatcgcaaggccgattttgccgataccacggccaaaaacctgtttgatgaagggctgcactgttttcgcaacaataatctggcttcggaatgttttattcagcagggacagcatgtctacattcttccctggctaggcgatcaaaccgtaaacacgttgtcggcattacttatccaacgcggtttcaaggcgggttcatttgctggtgtggttgaagtagaaaaaactacggtctcggaggttaaacaggcgttattcagcgcacttcaggaagggctaccttccgaatcccgtcttgccgaaagcatcgctgaaaagtgcctcgaaaaatatgatgagtatttaccggaggtgttgctgacgcaggagtatgggttacgtgcttttaatgttgagcgcgtggaggagtggttgcagaggcatttatattaa

SEQ ID NO: 372819 - DNA, 1317 bp, Salmonella enterica
atgtctggcattcgtattcgtctcaaagaaagagacgccattattcagtcactgaagtcaggcgttacgcctaaaattggcattcagcatattcaggttggtcgggtcaacgagataaaagcgctgtatcaggatattgagcgtatcgctgatggcggtgctggattccggttggttatcggggaatacggttctggtaagacattctttttaagcgttgtgcgctcaatcgcactagagaaaaagctggtgacaatcagtgccgatttatccccggacaggcgtatccacgcgacgggtggacaggcgcgtaacctctattctgagctaatgaaaaatctgtccacacgcaataagccggacggaaatgcattattaagcgtggttgagcgctttattacggaagccagaaaagaagcagaaagtacaaacatgacggttccgacgattattcaccaaaagctcgctgacctgtctgatatggttggcggttacgatttcgccaaagtcattgaatgttactggcagggccacgagcaggataatgagacactgaaatcaaatgccatccgctggctaagaggtgaatacaccacgaaaaccgacgcccgtaacgatctgggtgtgcgcaccattatctctgatgcctctttctacgattcgctaaagctgatgagcctgtttgtccgtcaggctggatacgcgggtctattggtgaatctggatgagatggtcaatctgtacaaactgagcaatacgcaggccagggttgcaaactatgaacagatactgcgtattctgaatgattgtctgcaaggaacggctgagtatattggctttttacttggcggtacgccagagttcctattcgatccgcgcaaggggctatacagctacgaagcgctccagtcacgactggcggaaaacagcttcgcccagcgtgccggggtgattgattattcgtccccttccctgcatttagccagcctgacgccagaagagctctatattctgttgaaaaaccttcgtcacgtttattccggcggcgatgcggataagtatctggttcctgatgatgcgctgacggcatttttacgccactgtagcaacactattggcgatgcctggttccgtacaccacgaaacacgattaaagccttcctggatatgctggccgtgctggaacaaaacccgtccattcagtggtcacagttaatcgctggtgtcgcgatcgcggaagaaaagcccagcgatatggatgaaataacgtcggcagaagatgccgatgaggatggtctggccgacttcagattatga

SEQ ID NO: 372820 - DNA, 2328 bp, Salmonella enterica
atgggcttctggatattcgttattgcactggctgttatctggcttctgttttccaaaaagaaaaagtcgccgcctcccaaagtaaatagcaaaatcatcaccaaaataaatcattcatctcaacacaaatctctcaatcaaccagccagcagcgtgacaaatatgcattctcagtcatccgaggatgacgaactggcaacctttaccttcgttaatgggctgacggttgaatacagcacaagccgccagccatcgcgagaaagcgccgcccgtagcaataccacgccagcgcgatgggtcaaaccgggagaaagtatcaccattcaaaacgtcgtcattaatcacggttatttttatttcggcgggcggttaaaaacacattcatcaggagaatatggctatctttataacgatggctctgacgcttcgctggttaatgacgcttttcccatcgagcctggttcacggcattattatgatgaatcgctgggatactggcccagctttgccacactcacccctcgctgccgtggtgcctatcttgactggctggcaagcgatcgcagcgatgcgaactgccccgttggctatgtttttatctatttttacggtctggaacgccgcgtactggcagatggcacacaagaggctatttctgacgatgaattcaaagcattattcgaagagatatcacgcctgagaaccgtatttcaggccagcggttccttccggcattatgcaacgcagttgctggaaatgatgatcattctcagaccgatgttactttctatacataccgaaaacgaatatttctcgtcaaggagttcattactgttcagactgaatctggcgacggtggttgagaaaggacaacctgtttgtgccgatctggcactggcatggatacactattttcctgattacaccctgcgtacgcctgcccgtcgatgtcatgctgaattttccgcgttattcaaacagcgttatacccaaaaatacggtgacggtattgtcgtcaaacccaataaaacacggttgcatctaagctatacccccgccagtggtacgcttcgggaacttcaggtaaaaaaacagatggatcttcccgatcccagcgttttaaaagccccagttcagaaattaatttctgttgcagaatcctgtatcaacgcgctggatgcctacagtcgctatctcggtaaaaaagatgcctcagcaagcgatgtcgccgccatcatgctgcttcccgatgaaatactgaccgaagacgcagaacacctgtttgctgaatttaaacattgggcagatgataaaatccgtgactattcaggactggcgacagtagctgatttctgggccagactgggtatgcctgtaccggataagattaataagaaagaagccgagctgatgcaaaatttcgccaggcgagcaggctacggcattgcgccggatatgcgctatcaccttgtccggccagaaccagaaggacatattgttttatttcccgaaggacatgcggaattctacgtaccgtcggcggaatttacatcagtctctgtggcgcttcggctgggcgccatgattgcacaaatggacaagcgtgtggatgttgctgaacaggctacgctggaaaaaatcattgatcacaatgatacgttgtcgccaacagaaaaacgttcgctgcacgcctacctcacctggaggctcaatacgcctgcaaatcaggcaggcctgaaagctaaaattgaacaactcagcgataaagaaaaatccgctattagcaacgttattatcagcgtcgcctgcgcagatggaaaaatcgatccggcggaaattaagcaactggaaaaaatctataccagcctcggcctggacagcagtaccgtcaccagcgatatccaccgcctgtcaaccgcagaaacaacgccgacggctacgttacaaaccccatcagcgacgagcggcgcgttttctcttgatgaacggatccttgcccgtcatgagtctgataccacggacgtacgccagttactgaacaccatcttcaccgaagatgaacccgcagatgaatccccggcggagatcccgccacacgctggcgcaggtcttgatgaagcacatcaccagctttaccaacgtttgctggaaaaagagcgctgggcgcgaaacgaagtcgctgagctatgccagcaatttaatttgatgctaagcggcgcgattgaagcaattaatgactggtctttcgaacaggttgacgccccggtgcttgatgatgacgatgatatttacgttgacctggaaattgcacaagaactcaaaggataa

SEQ ID NO: 372821 - DNA, 1068 bp, Salmonella enterica
atggacatttttgattactaccggagcgcatcacaacgtcttgagcttcaggaaatcctctcttacgcggcacagcagcatccctccgggctgggagccagctttctggaaaaggatctttgggtaacggagatccttcggctgctttttaatgaggatctgctgggagatttatctgtcgcgtttaaaggtggaacggcgttaagcaaatgctggaacgtgattgagcgtttttctgaagatatcgatctttctgttcactgggccgatctggcaggtcactctgaagaggaagaacagcaggcatgggagcaaagcacgctaaataacagccagaatcgccggttcagagagcagcagcaagagcgcctaacagaatggacaaacgtgctggcagaacggttaaaccaacgctttcaggcttatgaaattccgggccttgaagcaaaaatggaacccgacagcggtggcgaaaaaatcgatatctatttcccacgggtgaaagaagacagtatggcctatcagcgcgatcatattctgctggaatttggcggacgaaatcgtggcaagccaaccgagctaatgcctgttgtgagctatctgtccgggattgctggaatggatgtacttctgttacccgccgcgaccgtaaacgcttatgacaccggttatattctttgggaaaagctgacggcgctgcaccagttctgcacgcaaaccaaagcgccaaatccggcccgactggcacgccactggtatgatgtggattgtctgctgcgtaatcattttgccagcccctatgaaacgctggaagccatgcgcaatgtggtcgagatgaagcaacgtcgctggtccgtgccgggcgttgattttactcaggtcattgtcggaaacctgcaactgttgcctgacgatgctgaacgattcgccgcgatcgccggggatcatcaaacggcagtggaagggggaatgttctttagtgagcctgatggatttgctgacattgccgatcgccttcgtcattcgcaagatgaaatcaatcgttttatgcgtgattcacaggtatag

SEQ ID NO: 372822 - DNA, 618 bp, Salmonella enterica
atgtctgttgccgctctggcccgccagcgggttcaccgcatgaagcggggcgttcccttttccatcagcggattttactcgctgggaagtcgcgcgtcggtacaacaggcaatgagtcgtctggtcaaagaaggcctgctggtccgggttgaacgcggtttctactcccggccaaaaccgttaaaaaaccttccatccgtaaacgttgtcgccagcgccaatgccgttgccgccgcatgggcaaaggaacgcggttacaaaatcacccttcaggggctggaagccgcttaccggctagggctgcaaacgcaggcgccggttaaacgcatctactggtcaaacggccctacgcgagagttccgtgtcggcaatgagttggtccggatccagcataaatcagcaagccggttacgttggctgaaccgacctgaaggagagctgatgcgcggtttgctgagtctggatcagcaacataccccaccggaaacgctgaagaatgcttttcatcggctgagcatcccgtccgctgaagcgcggcagattgccggaaagttaatgaatgagcctgcgcttcacgcgtggcgctcgcacctgatgacgttgcaaaaggcgctctga

SEQ ID NO: 372823 - DNA, 453 bp, Salmonella enterica
atggccattctctccatccacggcgttcgcagttatcagggtgaaaagccagtagagttcgacttgagtaagtatgtcactcttatctatggacaaaacggttctgagaaatcaaccgtttctggctacttttataagcatggtcgaccagattacagccggtgcagcctgcaacctccattggatatgaactacctggtgtttaaccagcagtatgtagacgatattttcagtcaaccttctcagccgggcattttcactttacatagtgaaaatgcagaaataaaaacggaaatagatgatctggaagcggagagtaaagttttttcgcccggcgtgatgctttggacgtgcaaaaacgcggcgttgatggtatggaagaaaacattaaaaatggttctgcgagacatatttatgggatttgatggctggaatcatgatcttacccagtaa

SEQ ID NO: 372824 - DNA, 1320 bp, Salmonella enterica
atgaaaataacgtattttgtgagtagcttaacattactcacagcaagtcttatttttgtcttatcaggtgaaatattccacgccgaaacatctaaaatcttttggctgtttcggcaaaactttctcttttttagtgggtgcgtcgcatggtgttttatgacattagctatgtgtctgattttgcgttcaccctggttgaatcggattctgaaaggtctggataaatcgtggggtttacacaaacaagctggtattatcgcgacagtctttacgctggcgcactggctggacgaaaaaatacctcactggctggtgcaaaatggctggcttgctcatccaggatcactgggaagtgttcagataagctcatggcaatctcaactgatctatgcaggattgttagctgctgaatggtctacatacctgatgatagggttggtgctggtttctcttgtaaaaaaaatcccttataacattttccattttatacatcgtctgtttcctgttttttacctggctactgctttccatatttttaccgttctatttaaaacattttggtggaattcacctgcgggcattctgctggtaattgtgagtattccaggtatttacgctgccgtcctttcactatttaatatgattggttataaaaacaaacgcgttgcgatcatcacaaacatcgactattacccaaatgatattatagaaataactctacatactgacactcctctattgcatacacctgggcagttttcatttttaacatttcaacatgatgcagaggcacacccattcactatagcctcttattaccaggataaaaaacacttgcgttttgccattaaagcattaggggatcatacacattcactaaagaaagaattaaaaactggacaggacgtgattgttgagggcccctggggttatttagactttaatattcaatctgagcgtcaggtctgggttgcgggagggatcggtatcactccttttatatctcagctggaatatttaaaaaactcagaccaccaactatgccctattgatttatggtattgcgttggtcagcatgatgatttgcagtaccctgtaaatctcgatttattatgtacagcagcaggtgtgactttacaccgtatcgatgccgggaagaaactggaagccaaacatattatgatggaaagcgataatagccaaaacgttcacgtctggttttgcgggccagcaggttttgcgaaaagtctactatccggactacaaaagtacgggatatcagagaaagccttccattatgatcgttttaatatgcgttaa

SEQ ID NO: 372825 - DNA, 264 bp, Salmonella enterica
atgaatatcagtaaaaaaattgtcacctcttttttcttactctctttatttgggcagacatccgttgctgcaacagaaattagtcatccagaaacagacatgaaagaagttgctcatgttagtgtatcatccataaatacaaatcctgaaagcatcatacaactccttcagaataaaactgaagcgtcaggtgctcattattatcgaatcacttcatttcatatcgataatcaatcacacgccaccgctattctttataaataa

SEQ ID NO: 372826 - DNA, 624 bp, Salmonella enterica
atgaagatcctccacattgacagcagccctatgctctgcaactccagctcacgaaagctgagcctggcgctgacaaaagctatctgccagcgctttccgaatgccagcgtgacataccgcgatctcggacggacaccgccaccccacttacgcgaagagacatttctggtgcttgggggaaagttaatgtctacagacgcacaaacgcaaagtgaagtggagggtatcagaaacgcgatcgcggagttgagcctctgcgatatattagtaataggtgcaccgatgattaaccactctgtctcttcgggtctgaaaacctggatagatcaggtttgccaggctggtctgacatttcgttttacctctacgggtgcaacggggttactggccgacaggccagcatttattgtctccacgcgtggtggaatttattcagataccaggcatcgggaattggatcatcaggaaagctatctgcggtcaacgttaaatttgatggggatcactaacgtccatatattgcccaccgaaggagtggataaaaccataccaggcagatctctggcagaaaaaaactcgctggcgcaaattccctgtatgctggctcatgcttttaatcgataa

SEQ ID NO: 372827 - DNA, 906 bp, Salmonella enterica
atgattgactggaatgattactggtattttgccctgattgcagaagaaggaagctacagccgggcggcaatacgtgcgaaagtgtccaaatcggtgctaagtcggcggatgtcggcattagaggaacagcttggtgtacatctgattcagcggacaacccgacgccttgcgctgaccaaagtcggcgagcaatttgcgcaggagtgtcagacgctggtaaatcaaagtgagcgagcccgcgctgttgttcaggcggtacaggagtatccacaggggacattacggatcagtgcgccggtattcatggcagaaacgtggctgggagcactcatcaacgaatttattgcccgttggccgctggcaaatgtgcagctccttgctgtcaatcgcccggtggatatgattgcagaaggtattgatattgcgctatcagtaagttcaggggcattgcctgattcttcgttgcactataaaaaaatcaatacgctatacgatattctggttgccagcccccagtgggtcgagcaatatcctgatttaaagaccattggagatcttcacagggctccggcaatggtgagactggccgacggccgtatgcaaccgtggcatttaatcaatgggagtcaggaaatcaccctgtcactttccccccgtttgtattccaataatctgcgggttctgttacaggcagttgctggcggcaatggtgtggctttgttaccgtttccggcctgcaaggaagaattgcaaaatgggggactggtacaacttttccccgagtggtctggccagccaagacagatttatgcactattcccagcgaacaaaggaatgcccgcagttgcacgctattttatggacgagttaaccatgcggcaggagaaactaaattcaggacattaa

SEQ ID NO: 372828 - DNA, 378 bp, Salmonella enterica
atgttaactgatagcaagatctgcgccgcgcccctcgaaaaaccctacaaaaatcaccgattcacaaattctgtacctgacggctctaagctatggtatttccgctatcgcttcggcggtaaagaaaatcgtctgactttcggcccctatccgcaggttacgctggcaaaagcccgcgaaaagcgcaatgccgcgcgtaagctgctggtatcgggtatctgcccttctctgatgccagtgagcgtcaaggagcgcaacggcgtgcgggcggcgtatgtacatggaggcgcgtatggagatgatgcagtggtggtcagattatctggacgtgagccgcgagggggacgttgcgccctatatttatgcccggcaacatag

SEQ ID NO: 372829 - DNA, 2136 bp, Salmonella enterica
atgaaatcaatgaatattgccgccagcggtgaactcatcccccgtctctccacccaccgaaacgtagtggcgctggacagtaccgactttaccgatgtggccgcagtcgtcattaccactgccgacagccgtagcggtattctggcgttgcttaaacgcaccggttttcacctgccggtgtttatgcttgcggatgaacccgtcagcgcgcctgtcggcgttacagcggtaatagtcgggaacgcgcaggaatggctggagctggaaaacgctgcctgtcgctacgaagcggaacttctgccgcccttttatggcaccctgacccagtatgtcgacatggggaatagtacttttgcttgcccggggcaccagcatggcgaattttttagaaaacatcccgcaggccgccatttttatgacttttttggtgaaaacctgtttcgtgcggatatgtgtaacgccgatgtgaaacttggcgatctgctaatacatgaaggttctgccaaacacgcgcagaaatttgcggcaaaagtgtttaatgcggataaaacctactttgtgctgaatggaacttcggcggcgaataaagtggtcaccaacgccctgctgacgcgcggcgatctggtgctgtttgatcgtaataatcacaaatccaaccaccacggcgccctgattcaggccggggcgacgccggtctatcttgaagcggcgcgcaacccgtttggttttatcggtggtattgatgcgcactgttttgatgaaacgtacctgcgcgaccagattcgtgacgtgatgccggaaagcgccgatgcgtcgcgtccgttccgcctggcgatcattcagctgggtacctatgacggcactatttacaacgcccgtcaggtggtggataaaatcgggcatctctgcgattacattctgtttgactccgcgtgggtaggctatgagcagtttatcaatatgatggcggatacctcgccgttgcggctggagcttaatgaaaacgacccagggatctttgtgacccaatcggtacataagcaacaggcggggttctcacaaacctcgcagatccacaaaaaagataaccatattcgcggccaggcgcgtttttgcccgcacaaacgcctgaacaacgccttcatgttgcacgcctcgaccagcccgttctacccgctgtttgcggcgctggatatcaatgccaaaatccacgaaggggagagcggtcgccgcctgtgggcggagtgcgttgcgctgggcattgacgcgcgtaaagccattctcgcccgttgcaaactgcttcagccctttatcccactggtggttgacggcaagccgtggcaggcatatccgacggagaccattgccagcaatcgtcgtttcttcagttttgagcccggggcgaaatggcatggctttgagggttatgcggatgaccagtattttgtcgacccctgtaaactgttactgaccacgccaggtattgatgccgatagtgggcggtacaccgaattcggcatcccggcgaccattctcgcccactatctgcgtgagaacggtattgtgcctgagaagtgcgatctcaactcgattctgttcttgctgacacctgccgagagcgaagagaaactggcgcgactggtcgcgatgctagcgcaatttgaacgacacattgaagacgatacgccgcttgcggatgtattgccgacggtttttcagaaatacccggtgcgctaccgcgattacaccctgcgtgagctatgtcaggagatgcacaatctgtacgttagctttgacgttaaggatctgcaaaaagcgatgttccgcaaagaaagcctgccgcatgtggcgatgaacccacaggacgccaacagcgcctttattcgcggcgatgtagaactggtgcgtatcagcgaggcgggcgggcgtattgctgccgagggggcattgccatacccgccgggcgtactgtgcgtggtgcccggggagatttggggcggcgcggcgcagcgttattttttggcgctggaagagggcatcaatctgttgcctggtttttcgccggaattgcagggggtatatagcgagaccgatgccgatggaattcaacgtttgtacggatatgttttaaagtaa

SEQ ID NO: 372830 - DNA, 207 bp, Salmonella enterica
atgaagtatgtcttcatcgaaaaacatcaggctgaattcagtaccaaagccatgtgccgtgtacttcaggttgcccgtagtggctggtacgtctggcatcagcgtcgtcatcagataaaccagcgtcagcagttccgccttatctgtgataacgtcgtccgggaggcattcagtgacgcaaacagcgctatggtgcgccacgcctga

SEQ ID NO: 372831 - DNA, 1002 bp, Salmonella enterica
atgaatggaaaatttttgtgtggtttattggtttcgctattaattagcggatgcggtgacgataacacccctacagagaaagtcttgaaagaacaatttagtaatcaatttcatgggcgtcttatccttgattcaattgatatcaaggaaacatcggttgatggaaataagagaacatatgctgctgatggcttactttctactggctacgatctgtatacaccagttgcctcgttaactgattatattgttgttcaaaaatcgtgggataaaggcaaagatattaaattctcagcaactttgaacagtcttggtaataaagatactggatggaaaacaatattttcttcattacaaatgtcagaaacaccaaaaggaaatccaattcctaatgttgaaactgacggtaaatatatcatcatggatggagcaggttttgatgataaaataaatgcaattaaagatgaatatgccaggaagaaatcaaaactaaacgaattaaataatgatatcgcaaaagttaaaactaatatattagttattaataaagaaatcgatgagtgttgggggaaaggggaagatggaaaaacacaaagccgttattttgttcagcgtgatttgaataaagagctggaactctttaataaagaaaatgctccttattattttgagaagaagtacaatgctgaagttttcgacccagcaatgaaggctcgccgggaaaaattaaagaattacaggttgagtgattttgatgacataagggcggagaaacgtgctgtattagaaaaacataaagaagaatactccgtaaaatataatgaaattaatgagaagataaaagcgaaaatgaaggtgctcgatgatggtttacaagagttgatagcaaagaaacgtggtctcatacagcagcaatcaaccatctcagacgagattcgcaatcttgattatcaatataaaaattgggtaaattttatggaagagctaaataaaagaaaataa

SEQ ID NO: 372832 - DNA, 291 bp, Salmonella enterica
atgtggctgtccggaaatgaaggcacaaagttctggctaagcgtgctgacggagctgaaaaagcggggccttcaggacatcctgattgcctgtgtggacggtctgaagggcttcccggatgcgataaacagcgtcttcccgaaatatccgcaaatcagcaaaagctggcgtgcgcactgggaaaacctcaatacgctcttcagttatccgccggatatccgcaagaccatctaccatctacactacaaacgcagtcgaatccctgaacagcgtgatccgtgccgcgattaa

SEQ ID NO: 372833 - DNA, 462 bp, Salmonella enterica
atgaatacagcgaaacatgttctgtgctgcgcggcgatcgccagcgtactgatttccaccagcggtattgccgccagtcagttaagcgctcagggcgcgaacgcacaacagggcgggatgtcgctttctgcgctaaccggtctgctcagcagaggtgcccagtcgctcagcgccgataatatgaataatgccgccggtattttgcagtactgcgccaaacagaaactggcgtccgctaccaacgtggaaaacgttaaaaatcagattctgaacaagttggggttggataccacacagcaggagcaggacactaactacctgaacggcctgcaagggttgctcaagacgaaggacggccagcagttgaacctcaataatatcggcagtacgccgctggcggaaaaggtgaaaaccaaagcttgcgatctggtgttgcagcaagggctgaatttcctctcctga

SEQ ID NO: 372834 - DNA, 2292 bp, Salmonella enterica
ttgtccgagttgctctctgtcgctctgtttctcgcctctgtgctgatatatgcctggaaggcgggccgtaacacctggtggtttgccgccactctcacggtgctgggactttttgtcattctgaatattaccctgtatgccagcgactattttaccggcgacgggatcaacgacgcagtgctttatacgctcacgaatagtctgacgggagcgggagtcggcaaatatattctgccgggaatcggcattgccctggcattagtggcggtattcggcgcgctgggatgggtactacgccgccgccgtcaccatcctcatcatgtcggttacagcctgctggcgttactgctggcgttaggttcggtcgacgccagcccggcgtttcgccagatcaccgaactggtaaaatcacaaatgcgcgatggcgatccggattttgccgtttattataaagaaccagcaaaaaccattcctaatccgaagctcaatctggtctatatctacggcgagagcctggaacggacctattttgataatgacgcgttccccaatctcacgccagagttaggcgcgctgaaaaatgaggggctggatttcagccataccatgcaactgccgggaacggattacaccatcgccgggatggtggcttcccagtgcggtattccgctgtttgcgccgtttgagggcaatgcctcagcgtcggtttccagcttcttcccgcagaatatctgcctcggcgatattctgaaaaactccggctaccagaactatttcgtgcagggcgctaacctgcgttttgccgggaaagacgtgttcctgaaatcacacggatttgatcatctgtacggcgctgaagagctaaaaacggtggtggcggacccgtcttatcgtaacgactggggcttctacgacgatacagtgcttgatgaggcatggaagaaatttgaagcgctttcccgctcaggccagcgcttttcgctgtttactctgaccgtagatactcaccacccggacgggtttatctcgcggacctgcaaccgcaaacgctacgattacgacggtaagcccaaccagtcctttagcgccgtaagttgcagccaggaaaacatcgccgagtttatcaacaaaatcaaagcgtcaccgtggtttaaagataccgttatcgtcgtctcttccgaccatctggcgatgaataatacggcctggaaatacctgaataagcaagatcgcaacaatctgttttttattctgcgcggcgataaaccacagcaggagacgctggcggtcaaacgcaacacgatggacaacggcgcaacggtgctggatattctcggcggcgataattttatcggtctgggacgtagcagcctttccgggcagtcgctgtcggaagtgttcctgaatgtaaaagagaaagtgctggcgatgaagccggatatcattcgcctgtggaatttcccgaaagagataaaagattttaccgtcgatcgggacaaaaacatgatcgctttttccggcagccacttccgcctgccgttactactgcgcgtatcggataagcgtgttgaaccgttaccggaaagtgaatactccgctccgctacggttccagttggccgacttcgccccgcgcgataatttcgtttggatcgatcgctgctacaaaatggcgcagctatgggcgccggcgctggcgctctccaccgactggtgcgtctcgcaggggcagcttggcgggcagcaaaccgtacagcatgtcgataaagcgcagtggcagggtaagacggcgtttaaagacacgatgatcgatatggaacgctacaaaggcaacgtcgataccttaaagattgtcgataacgatattcgttataaagccgatagctttatctttaatgtggcgggcgcgccggaggaggtgaagcagtttagcggcatttcccggccagagtcctggggccgctggtcaaatgcgcagttgggcgatgaggttaaaatcgaatataaagcgccgctgccgaaaaagtttgatctggtgatcaccgccaaagccttcggcgacaacgcgaatcgcccgattccggtacgcgtaggcaacgaagaacagacgctggtgctgggtcacgatgtgtccactatcacgctgcatttcaacaacccgacggacgcgaataccttagtcattgcgccgcccgctcccgtcgccaccaacgaaggtaatattttgggccattcgccgcgcaaattggggattggcatggtggagatcaaagtggtgaatgttgagagttaa

SEQ ID NO: 372835 - DNA, 1662 bp, Salmonella enterica
atgttaaagcgaattaaaattgttaccagcttactgctggtattggcgctatttggccttttacaactgacatccggcgggctgttcttcaactcgctgaagaatgacaaagaaaacttcaccgtattgcaaaccattcgtcagcagcagtctgccctgaatgcaacctgggtggagctgttgcaaacgcgtaataccctgaatcgcgcgggtatccgctggatgatggaccagagcaatattggcagcggcgcaactgtcgctgaactgatgcagggggcgaccaatacgctgaagctgaccgaaaaaaactgggagcagtatgaggcgttaccgcgcgatccacgtcagagtgaagcggctttccttgagatcaaacgaacctatgatatctaccacggtgcgttggcggagcttattcagcttcttggcgcgggtaagattaacgagttttttgatcaaccgactcaaagctatcaggacgcttttgagaagcagtacatggcctatatgcagcaaaacgatcgtctgtacgatattgctgttgaggataacaacagttcctacaaccaggcgatgtgggtactggtcagtgtgctgattgccgttctggtggtgattatcgccgtctggttcggcatcaaactgtcgcttatcgccccgatgaatcgtctgattgaaagcattcgccatatcgccagcggcgatctggtgaaacgtattgatgtggaaggctctaacgaaatggggcaactggcggacaacttacgccatatgcagagcgaactggtgcgtaccgtgggcgatgtgcgcaatggcgccaacgccatttacagcggcgccagcgagattgcgatgggcaacaatgatctctcttcccgtactgagcagcaggcagcgtctctggaagagaccgccgccagtatggaacaactgaccgccaccgtgaaacagaacgccgaaaacgcccgtcaggccagtcacctggcattgagcgcctctgaaacagcgcaaaaaggcggcaaagtggtggataacgtcgtacaaacaatgcgcgatatcgcctccagttcgcagaaaatcgccgatattatcagcgtaatcgacggtattgctttccagaccaatatcctggcgctgaatgcggcggtagaagcggcgcgcgcaggcgagcagggacgcgggttcgcggtggtagccggtgaagtccgtaatctggcccagcgtagcgcgcaggcggcacgagagatcaagagtctgattgaggattccgtgagccgtgttgatgtggggtcgacgctggtcgaaagcgccggtgaaaccatggatgagatcgtcaatgcagtgacccgcgtgaccgatatcatgggcgagattgcctcggcgtccgacgagcaaagccgtggtatcgaccaggtgggcctggcggtagcggagatggatcgcgtaacgcagcagaacgcctcgctggtggaagagtccgccgccgcggctgcggcgctggaagagcaagccagccgtctgacccaggccgtcgcggtgttccgtattcaccagcaacagcagcgtgcgcgtgaagtggctgcggtaaaaaccccggcagccgtgtcgtcaccaaaggccgctgtggccgacggcagcgataattgggaaacgttttaa

SEQ ID NO: 372836 - DNA, 816 bp, Salmonella enterica
atgccccttatccgagatattcaccaacgcttctggcgtctgccacaactgccgtggctggagctacgtaccaccagtgaaagccgtcaggcctataagcgccacagccacccgcaactgtcgctgggcgcgatcatcgccggagaaacccgctgcatcagtaacgggcaagagtatctgttacgccccggcgagctgatcctgatccccccgcaatctccacacagttgtaacccgctccacgagcgaccacgcagctatcatatgctgtatctcgatgcggactggtgcctgacgcagctcccccatttgccggcggatagccgcctgcataccacgcagccacagttgcagaacccgcagcttttccagctttatcagcaaattgtgacgtctattactcaacagcaaaccgccggacttccggcgcttattatccacctgttgcgcgccctgccgctacaaagtgccgacgccgaaccgccatgcgccatcagccgccagttggttgcccgcttagtcagcaaccttcagaaaccgccgacgctggacacactggcacaggagtttgcgctccgtaaggagactctgattcgcacttttaagcaggatacaggcctgactcctgtcagctttaccaatatggcccgcattgaatatgcccggcaccgattgcgcgccggggacgatattgccgatgttgcctatcagaccggtttcgccgatcaaagtcatttccacaaaaccttcgtcagctacacggcggcaacgccgcgtcagtacgcgcagaacagatcaatatccgacaataaatag

SEQ ID NO: 372837 - DNA, 642 bp, Salmonella enterica
atggaacaggttacaacgttatttcccccggcgtttcccgcactggcgctggcgcattttatggcactgctcagcccgggtccggacttctttttgctggtcggttacgccgtacgctatcggctgcgcggcagcgtcgggctgtgcctcggcattgcggcgggaaatgggctctatattctgctggtggtgattgggtcagggctactacgtcagacgccgctgctctttaccatcatcgaactattgggtgccgcctacctgctatgggtgggccgtcaactgttgaaaagccgcgccgggccgctggagtggcggtacgccgcatcggcatgtccgtcactggcaaaacaactattactggggctaggttcatcgctgttgaatccgaaaaatgctctgttttatctggcgctaatgaccgccctgctgggcccaaacgtgaccgttacacagcaggccatatgtggaatctggatgacaagcgtagtgttactctgggatctgctgctgataacgcttatcgccctgccgcaaagtcaacgtcgcttgggtaatcttgtctggaaaattgaacgcgccgccggcggcattctgatcgcctttggctgctggattgtgtggcagttcattaccagttaa

SEQ ID NO: 372838 - DNA, 333 bp, Salmonella enterica
atgactaccccgcattctattgcagaatccaccgatccagaagtcttcccggcaaataaccgtcatctgaccgtgagttatgcgagccgctacccggaatacactcgtattcccgccattaccctgaaaggtcagtggctggaagacgccgggtttaccaccggtacgcaggtcgatgtgagggtgatgaacggctgtattgtgctgacggcacagcagccgcaaccagaagaaagcgagttgatgcagtcgctgcgccaggtgagcaagctatcggcgcgtaagcaaaagcaggtgcaggcgtttatcgacgtgatggcaggttctaagtaa

SEQ ID NO: 372839 - DNA, 702 bp, Salmonella enterica
atgcggctaaaagtaaaagaaaacattacgctttggagaagtgaaggtttaattgcttatgtcgcccttggatttctatgtactttttttatggaggtcaacgctctattaccatactatcttcagcaaagtatatttttcgaaacgctgatgagctacatggccttcaatacgttattttcgcttgctttatctgagattttttttgcgatgttggtagtgatttgtcataacactaaactggaaaagctcacaaatagtattttgcaagagttgcataaaagaattatgcaaggttctttcattatatccttcttatgcttcggaatatttctattttgtgtgatggcattctgtattggttcgctaacaataaataataattactatgggaaacatgtcataaatttcgcttacccatttgttttatttctatcttttccttatcttatacataagggtataacaatcctgtgtactctattaaaagcatttcccaaaggcaaaattcatgcagcaataataatattactgataattgcagccgcgattattatccctggcatgtttaacaaaaaagaaaaaatgactataaccattgataaggaaaaatatcatgcgattgagcaaaaaactaaggtgaaaccagaaaaatatattgagaaaaagattaatgatattaatattaatgatataaaatag

SEQ ID NO: 372840 - DNA, 954 bp, Salmonella enterica
atgaaaaaatcgacgacctcaacaccgcatgatgcggtgtttaaaacctttttgcgccacccggaaaccgcccgcgattttatggagattcatctgccggtgtcgttacgccagctttgcgacctgcggacgctaaagctggagcccggcagttttattgaaaaaaatctgcgagcctattattccgatgtgctttggtcgctgaaaacgcgcgagggcgacggttatatttatgtcgtgattgaacatcagagcacgccggatgcgcatatggcgtttcggctgatgcggtatgcgatggcggcaatgcaacagcatctggatgcggggcataagcatcttccgctggtggtgccgatgctgttttatcacggtgttgatagcccgtatcctttttcgctgtgctggctggatgagtttgcgaacccggaagtggcaagaagactctatgccgctgcctttccgctggtcgacattacggtggtatcggatgatgacattatgcagcaccgccgcattgcgctgctggagctcatccaaaaacatatccgccagcgcgacctgctgggactggttgaacgaattgcttcgctgttagttactggttgcgctaatgacaggcagcttaaagcgctgtttaattatcttatgattcagcacggacatacgcctcgtttcaccacgtttattcgtgatgtggtagggcatgtcccgcacactaaggagagactgatgacgctgatagagaggatccgcgcagcggatcgcagaaaaggggaacggcaaggaagacagctcggtctggaggaaggattagaaaaagggctggaaaaaggtcagcatgttgccgcattgcgtatcgccagacagatgctggcggacggacttgaccgcgagactgtccagcggttcaccggccttacggctgaagagcttcaggatgttagtcactaa

SEQ ID NO: 372841 - DNA, 1242 bp, Salmonella enterica
atgcaacggattattcagtttttctcccaacgcgccacaacgttatttttcccgatggcgctgattttgtacgattttgccgcctatctgacgacggatctgattcagcctggcatcattaacgtcgtgcgcgattttaatgctgacgtcagtcttgcgccggcctcggtcagtctctatctggcgggcggaatggcgttgcaatggcttctggggccgctatccgacaggattggccgccggccagtgctgattgcaggggcattaatttttactctcgcctgcgcggcaacgctgttgacgacctcaatgacgcagtttctggttgcccgttttgtgcagggcaccagcatttgctttatcgcaacggtcggctacgtcacggtacaggaggccttcggtcaaaccaaagccattaagctgatggcgattattacctccattgtgctggtcgctccggttatcggcccgctctccggcgccgcgctgatgcacttcgttcactggaaggtgctgttcggtattattgcggtgatgggactgttggcgttgtgcggcctgctgctggcgatgccggaaacggtgcaacgcggcgcggtgccgttcagcgcggtgagcgtactgcgcgattttcgtaatgtgtttcgcaacccgatttttctcaccggggcggcgacgctgtcgttgagctacatcccgatgatgagctgggtggcggtgtcgccggtgatcctgatcgatgccggcgggatgagtacttcgcaattcgcctgggcgcaggtgcccgtattcggcgcggtgatcgtggccaatatgatcgttgtgcgcctggtgaaagatccgacccgaccgcgttttatctggcgcgccgtaccaattcagttaagcgggctggcgacattgctcctcggtaatcttcttctgccgcacgtctggctttggtctgtgctgggcaccagcctgtacgcgttcggcattggaatgattttcccgacgctgtttcgcttcacgcttttctccaacaacttgccaaaagggacggtttcagcctcgctgaacatggtgattctgacggtgatggcggtgtcggtcgaagttggccgctggctgtggtttcacggcgggagactgccgtttcacctgctggcagcggtggccggggtgattgtggtcttcaccctggcgacattattacagcgcgtgcgccagcatgaggcggcagaactggccgctgagaagtaa

SEQ ID NO: 372842 - DNA, 717 bp, Salmonella enterica
gtgggacgtaaatgggcaaatattgttgctaaaaaaacggctaaagacggtgcaacgtctaaagtatatgcaaaatttggtgtagaaatctatgctgcggctaaacaaggtgaaccagacccggaatcaaactcagctttaaaattcgttattgaacgtgcgaaacaagcacaggttccaaaacatgttattgataaagccattgataaagccaaaggtggcggagatgaaacgttcgtgcaagggcgttatgaaggctttggacccaatggttcaatggttatcgctgaaacgttgacgtctaatgttaaccgtacgattgctaatatccgcacaatttttaataaaaaaggcgggaatatcggagcggcaggtgctgtcagctatatgtttgacaatactggagtgattgtatttaaaggaacagaccctgaccatattttcgaaattttgcttgatgctgaagttgatgttcgtgatgtaaccgaagaagaaggaaacatcgttatttatactgaagctacagacctgcacaaaggaattgcagctctaaaagcagctggaattactgaattttcaacaacagaattagaaatgattgctcaatcagaagttgaactttcaccagaagatttagaaatctttgaaggacttgttgatgcccttgaagatgatgatgatgtgcaaaaagtatatcataacgttgcaaacctctaa

SEQ ID NO: 372843 - DNA, 477 bp, Salmonella enterica
atggattttgtgtcagataatctgtttaacgggcggcgttttcgggcgctgactgtagtggataattttagtcgggaatgcctggcgatccatgccggaaaatcgttaaaaggcgaggatgtggtcagaataatggagggactgcgggtgccggataagcggctgccggtacgaatccagacgaataacagcagcgagtttatctcaaaaagtctggataaatgggcgtatgaacacggcgtcataatgaacttctcgcgccccggaaagccgacagataacccgtttattgaatcatttaacggcactctatgggatgaatgcctgaacattcactggttcctgtcactggaagatgcgcaggaaaaacccgacaactggcgcagggaatacaatcatgagagaacgcattcatcattaaatgacatgactccggctgaatttatccgaagtctccggaaagacgaaggtctctga

SEQ ID NO: 372844 - DNA, 267 bp, Salmonella enterica
atgaaaaagacccgttataccgaagaacagattgcatttgccctgaaacaggctgaaaccggcacccgcgtcggggaagtctgcagaaagatgggaatttctgaggccacattttacaactggaagaaaaaatttgccgggccgggcgtgaccgaactgcggcgtctgcggcaactggaggatgaggatcagcggctgaagaagctggtcgctgagctgagtctggtcaaggagatgctgcaggaggtactgaagcaaaagttctga

SEQ ID NO: 372845 - DNA, 1386 bp, Salmonella enterica
atgataatgaatgacatcattaccgtaacagaagcagcacagttgcttgagctaactcctcaacgtgtaagaactatgtgcaagcaggggagcattgatgcatatcaatccggtagaacttggttaataaaaagttcgagtgttgaaaagttgatgcttgttaatagcctaagcgatgctcaaaatagctacagcatgttggcctctgagccaaaaaacaaaccaaaagcgttaagttttttcagtggggctatggggctagaccttggtatagaacaagcagggtttgaaaccctactagcgagtgaaatagataaagccgcaagagatactattttatctaataggcccaacatggcccttatcggagatattcgtgattacacaacagaggatattttaaaattagctggagtttcttctggtaatgaaattgatttgattatgggcggcccaccgtgtcaagcgttctcaacagcgggaaaacgtttaggtctagaagatgagagagggaacgttttcattaaatatttagatgtcgccttggatatcagacctaagtatattgtaatcgagaatgttagagggttattatctgcgccaatgaagcataggccgcacaatgaacgtggtgaaggtttgccacctttaaaatctgaagaacagcctggtggagtacttcattatattatcagaataataaaaagtgcaggatactctgtttcttttaacttatataactctgctaatttcggcgttcctcaaattagagaaagggtaataataatatgttcgcgggacggcagtagagttccctttctacaaccaacacatagtgaaaaaggtgaatatggccttccaaaatggataacgttgcgtgaaaccataactaatttaaaaaatatcacgcatgagcatgtgctattcccagagaaaagattaaaatattacagacttttaaaagaaggtcaatattggaaacatttacctgaggatttgcaaaaggaagcattaggtaaatcgttctttcttggcggaggtaaaacaggtttcttacgacgagttgcatgggatcgtccatcacccacattggtgacgcacccagcgatgccagctactgaccttgctcatccagatgaattgagaccattatcagttcaagaatataaagtgatccaacaatttcctgaagaatgggttatcaaaggtaaacttctggataaatacagacaattgggtaatgctgtgcccattggtttagggttagctgttggaaaaaacattttagatcatatgaatggaaggaaaatcgagtcattcccaaattttcgttactctcgatataaaaacacttctgacttggatatatttggagagttggtctaa

SEQ ID NO: 372846 - DNA, 693 bp, Salmonella enterica
atgtcagaggcagtgtttttcgtcgagaatgctgaagagttggcaaaacagaaaatggataatattaatcctgaactttctgaaaaattccagcttttaattaaatttctttcaagatttcctgaaagttgttcaaatccgcgctcgaaacaagttagaaaaaactttggtaaagcagaacatatagaatatttagctcaaaatttcaatgaaagtcggcttccgaaaaagccaacgccacctactactatccctgatgaggttgtcagtttagtccttaatgtaagctttgatataccgcaagaaaatctcaatagaattaaagaagaacatcgactctctatggcttctgaaaacattgttggagatcttctggaaagatatcttgctgaaaaattagagccatgtggatggatatggtgttcaggaacaagtgtaaaagcagtagattttattcattatgacaatgaaaaagatgagtggggtcttctacaagtaaaaaatagagataatactgagaactcttcaagtagcaaaattcgcgacaatacgccaattaaaaaatggtttagaacattctcacaaagagatgctacaaattgggaaaatttccctgacgaagtttcatccaaagacctcaatgaagatgattttagagcttttgttgaaagctacttacgaaaaattaaataa

SEQ ID NO: 372847 - DNA, 684 bp, Salmonella enterica
atggctggcgcaatcgctgtagctaaacgtgtgcatcgcccagctctggatttcgaacgcttctccgaattgctcgatcgtatcgaatgctttaaaggtcgaaagttgactaaattggcagtgaaactaacaatgctggtattcatacgttcaagtgaactgcgttttgcaagatgggaagaaatcgattttaaaaatgcgctttggacgatacctgcagaacgagaacctctaaagggtgtaaagtactcacatcgtggttctaaaatgcgtagccctcattttgtacctctaagccgtcaggcactgaaaatattagaagagataaaacaaatcagtggggattacgagttggtcttcattggtgatcaccagccggataggccgatgagtgagaacactgttaacaaggctctgcgctcaatgggctacgacactaaaacggatgtttgtggacacgggtttagggcgatggcctgtagtgcgttagtcgaatcaggtttatggtcaagggatgctgttgagcgacaaatgagccatcaggagcataacaacgtccgcgctgcttacatctatcttgcggagcatcttgatgaacggaggctcatgcttctgtggtgggctgattatcttgatatcaatcttaacgatatggtcaggccgtttgagtttgcaagcaggtga

SEQ ID NO: 372848 - DNA, 1188 bp, Salmonella enterica
atgaataacgttatcagtagtaaagataaccataatcacacgttggtgtttacaggcaagggcggaaagtattttgttatttgccttgtgaatttcttgttgacgtgtatcacgtttggaatctatgcgccgtgggcgatggtgaaatgtcgacgttatatttatactaatatgacgctaaacaatcagccttttgcttacaaagccacgggcggcgcattatttattagtgtgttgttagtttttattatttatattgttagcctctctcttattgaacacggtcatcccggtctcggttttacgctattcggcttattaattgcgattattccttttatggcggtgaaaggattacagtatcaggcgatgatgacttcgcttaatggcgtacattttggattccagtgttccatgcggcgcgcctggtggtacatgttcgctctcccggtactcctgatggtggcgctttatattgttctttatattatctcactggtaaccatcgccgtcggcggtttagtgttcaatatcgtttttctcggtttgctggctattattgggataggggtcattaacggtattacctacagcaaatggatgaccttgtttggcaatggcgcaaactttggcattcatcgtttctcgattcaggttaatgttaaaacgtgcatcagagggtgcgtgttggcaatgttgacccttttcccttttgctgtcgtgattggttatctaatcgcgccggtgttcaccgacatgattcttttgagtatgatggggaatgcgcaggcaggaggggcgcttattctgcaatattatggccagataatggcatgttatttcctctattttctcgcgattattgtggtaaccagttacttatatgtggcgttacgcaacctgtttttaaacaatttgtcactggcgaacgattcgattcgttttcattcctctgtcactgcacacggtatgctgtggcggttactggtggtgtttgtgatttccggcgtgaccttagggctggcttatccgtggttgaaaatttggctggtgagctggctggcgcagaatacacaggtccagggcgatctggattcgcttgagttaaccaatgatgagaagccgctggaaaacagcctgctaatgtggatttctcgtggcatcatgccttacttcccgtttatctga

SEQ ID NO: 372849 - DNA, 885 bp, Salmonella enterica
atgaaaattgcttttgatgtcgatgttattaaacatttacccattacccaaatggtacggcaggtttccgagtgggggtataaatatattgagcagtcgccgcacccgcgtattaatccgttttataaacaccctaaagctggtcgcgataccatgcaggaatataaacgcgccttgcagaactacggtgtggaaatctcgtcatttattgtggtttatcgttggtccggccccgatgaagagcgtcggcgcgccgcggtaaccaactggaagcggatgattgagattgccgttgatatgggcgtacaggtgattaataccgagctttccgggacgccggatgagccggagatttgtgaagagatgtggtatcgctccatggaggaactgctgccgatcgtggaacgagagggaattcgaatcgaaattcagtctcacccctgggatttctgcgaactgaacgatgagacggtcgacatggtgcagtctttgcgtagtgataacgtgacctatctgtacagcgcaccgcatggcttcttttacgataaagggcagggcgacgtcgcaaggatgctgaactatgccggggccgatctttcgcatgttctgctggccgatacgcacaaccacacgcttccctgccgctatatcatgaacccgcctggcgtgaatgcgacgattcatcagcacatcgggctgggagaaggtgaggtcgattttgacgcgctattccaggcgctgcgtgaaatggattttgcaaaccgcacgtttaaggtgggcggtgaggcaattatcaccacgtcgctgtttggttatcctgaaaaaatgagtgttcaggcggtggaaacgcgcgagcggatcgagcgggagctactcggacgttaa

SEQ ID NO: 372850 - DNA, 816 bp, Salmonella enterica
atgaatatcgagaaaacacggttttgtattaaccggaaaattgcaccgggtctaagcatagaagcattctttcgactggttaaacgtcttgagtttaataaagtggaattgcgtaatgatatgccaagcggcagcgttactgatgacttgaattataatcaggtgcgtaacctggcagaaaagtatggacttgaaattgtcacaattaatgcggtctatcccttcaaccaactgaccgaggaggtagtaaaaaaaacggaaggattattacgagacgcacagggagtcggcgcgcgggcattagttctttgtccgctgaatgatggaacgattgtgccgccggaggttacggttgaggcaataaaacgactgagcgatctctttgcccggtatgatattcaggggctggttgaacctttgggattccgcgtaagttcgctgcgttctgccgtctgggctcagcaactgatccgggaagcaggttccccctttaaggttttgctggataccttccatcatcatctgtacgaagaggccgaaaaggagtttgcgtcgcgcattgatatttctgctatcgggttggtgcatttgtccggtgtggaagacacccgaccaacggaagcattggctgatgagcagcgtattatgctgagtgaaaaggatgtaatgcagaattaccagcaggtgcagcgtctggaaaatatgggatatcgcggtatttacgcttttgaacctttttcttcccagttggcttcctggagtgaggcggaaatagaggaacaaattaatcgcagcgtgtcattgctgttgcaatga

SEQ ID NO: 372851 - DNA, 1227 bp, Salmonella enterica
atgaaagaaatgcaggcaacgctgccccagacattttatataaaaccaggtaagtttatctggagctacctgggaacatttttatttatgttgggcggctgtattgagaacagctggttatctgcctggctaaatacgcagggatttgatcaagcgcatatcgggcagatttttgccggatatgggattgtggtcgcgatcacctcctggctatccggcgtctgtgtggacgtttttggtcctaaaaaggtgatggttaccggttttatcgtctatcttctggcttccgtcgcgtttctgaactttgcgctacccagccatgattttggcgccattctcgtgacctatatgctgcgtggcgtggggtatccgctggtctgttactccttcctggtacgcctgaccatccagttggataatcaccagcaagggatcggcacctcgctgttttgggtggtctataaccttggttttaccatcattgggccggtggtggcggcgtcgttaattcctgcgttggggcatatcaacgtgatgtgggccgggatgggcgttgcgctgctgggggttctcttcatgctggtgctggaacgcaatgaattcattctgaaaccgcgaacgacgccggtcttcaaagagttatctgcgggtatctccattatgtatgaacggccacggatcggtctggcggtgattgtcaaaactattaacggtcttggcacctatggttttgttgtcgtattacctctgtttctgctggataagcactttacgcttgaggaatgggcgagtatttgggggattacctttatctctaaccaggtcttcaacattatctttggctggatgggcgataaaattggttttcgccgaaccatccagatttttggcagcatcctgaccggtgtcgctacgctgattgtttactgggtgccgatgatatgggggcataactatgtcgcctttatgctggcgatgtgtttgtggggagccgggctggctggctttgtgccaatgacgccgctggtgccgatgatggcgccggataagaagggggcggcgaactcggccgtgaactttggctccggcctgggaaatttcgttgggccagcgctggtctctgttctggcagggttcggcaccggcgtggtgatgtatactatggcggggctctatttattcagcggcatcctggtgcagtttcttaaagtgcctggcgagaaatag

SEQ ID NO: 372852 - DNA, 1023 bp, Salmonella enterica
atgaaaaagcttcgatgtggtgttattggcctcggtcgggtaggtaaaatgcatgttgagaatatgtatttactgcctcaattagatattatctgcgccgccgattattttattgaggagatgagcgattggctttattcggtaaatataacttcagggtataaaaattatcaggaacttttacagcgtgatgatatagaggcagtttttattttcacctcaacggatatgcacgaagagatcgtcacggcggcagcgcaggcggggaagcacattttttgtgaaaaaccgctcagcatgaatgaagatgagcaggcctcaatggcggtgctgagaaaagtgaaagagaagggggtgacgctgcaggttgcctttaaccgccgttttgatcctcagtttcacgaggtctttgagctggtgcgcagcggcaagattggtcggccccagatgataaaaatcacctcccgcgatccggacctgctaccccatgatctgatcaaacgtattggcggtctgatttttgacttcaccatgcatgactttgatatggctcgttttatgatgcaggatgaagtcagcgaagtctatgttaagggcaatacgctgattgatcccagcctgaaaaatattgatgatgttgatacgcttgcggtgatgctgactttcagaaacggcggctacgcgctcattgataacagccgtcgggcggtatatggctatgaccaacgggtggaggtttttggctcagaagggatggcgtatgcggataacgttagtgaatcgacggtgaaagttttcaacagccagcactgcataatgaaaaatccccttcctgatttcacggttcgttatcgcgaagcttaccgaacggaaatattacactttattgattcagtcctgcatcatacgccggttgtctgtaccggcgaagacgcattattggcccagcgtatcgctattgccgcgcagcaatcattaaaaagcgggctgccggtgaaaataacaagcgatatttatctttaa

SEQ ID NO: 372853 - DNA, 1941 bp, Salmonella enterica
atgaaaacaatcaggttgaccatggcgcaggctttggtgcgctttcttgataatcagtacatcgacgtagacggcagcgaaatcaaatttgtaaaagggattttcgctatttttggccacgggaacgtcgtcggattggggcaagcgctggaagaggactgtggccaacttagcgttcatcaagggcgtaacgaacagggaatggcgcatatcgcgacgggatttgcccgccagatgcgtcgccatcagatttatgcctgcacctcctcagtggggccaggggccgccaatatgatcaccgcagcggcgaccgcgacggctaaccgtattccactgcttttgctgccgggcgatgtgtacgcatcgcgtcaacccgacccggttttgcaacaggttgaacaagaacacgatctgacgttgagcaccaatgacgctttccgtgcagttagccgctactgggatcgcattacgcgtccggaacagctaatgagcgcctgtatcagcgcgatgcgggtgttaaccgatccggcggatacgggggccgtgacgctttgcctgccacaggatgtgcagggtgaagcctgggattatccggattattttttcgctcgccgggtctatcgtcttgagcgtcacgcgccgacggagccgatgctgaacgaggcggttgcgctgattcgccgccaccagcggccgctgatcgtttgcggtgggggcgtgaagtactcgcaggctgaagaggcgctgctgagatttgccgaacgctgtcatctgccgattgctgaaacccaggctggcaagggagcgctcagttctgcacacccgttgaacgtcggcgggattggcgaaaccggttcactggcggcgaatctgctggcgcaggaggccgatctgattatcggtgtggggacgcgctataccgatttcaccacctcctcaaagtggatcttccagaatcccgacgtgcgctacttaaatatcaacgttagccgctttgatgtcttcaagctggatggcgtacagatgcagggtgatgctcgcgtcgccctgacgcagcttagcgaacggctggcccaggagcattatgcttcgcaatggggtgagactattcaccgcgtccgctcgcaatatatggcggaagttgagcgcgtctatgctgtggaatatagcggagaggacttcaaacctgaaattgaggatcatatggatactcaaaaggtgtttgaagagtttaatgagattacgcggtcgtggctgacccagacgcgcgtgttgggcgtgcttaaccggatgttgccggaaaacgcgctggtggtggcggcggcgggcagcctgccgggcgacctccagcgtgtctggcaaagccgcggcgagaatgattaccacgtcgagtacggctactcctgtatgggctacgaagtcaatgccgcattgggggccaaactggcgcagccggagcgcgaggtgtacagcttcgtgggcgacggttcgttcatgatgctgcactctgagttggtcacttccgtccagatggggaaaaagattaccgtcattttgctcgataacatgaccaacggctgtatcaataatctgcaaatggaacacggtatggacagttacttcaccgagtttcgtttccatcagcaggagagcggtcgtcaggaaggcgggtttatcccggtcgatttcgctcgcatcgctgaaggatatggctgtaaaagctatcgcgtcaccaccattgaacaactgcatgaggcgttggaagatgctcgtaaacagaccgtgagcacgctgatagacataaaagtgcttcccaaaacgatggtgcataagtacctgagctggtggcgcgttggtggggcgcaggtatcccgtagcgaacgtatccaggcggtagcgcgtatgcttgagaaacatatcggacaggcccggcagtactga

SEQ ID NO: 372854 - DNA, 1932 bp, Salmonella enterica
atgaataaagcagtcagtagtgagcaaaagccgctggacgttatctgtctgggacgagtcgccgttgatttgtatggtcaacaaatcgggtcgcggctggaggatatgacgactttcgctaaatatttagggggatcgtcaggcaatgttgcctacggcacggccattcagggattacgttccgctatgctggcccgcgtcggcgatgagcatatgggacgtttcgttcgtgaagaattaaaccgcgttggtgtggatacgcagtgcctgctgtcggatcgcgatcgtctgaccgcgctggtgatcctcggcattaaagatcaggacacctttcctctgatcttctaccgcgataactgcgcggacatggcgctaacacccgaggatatccgcgaagattacatcgcttcttcacgcgcattagccgtcaccggtacccatctttctcaccccaatacgcgcgccgccgttcttaaagcgctggagtatgcgcaaaaacacgggctgcggcgggcgctggatatcgactaccgccccgtactgtggggcctgacgtcgctaggagacggtgaaacgcgtttcatcgcctcatcacaggttaccgaacagctccagcaggtattgcgccatttcgatctgatcgttgggaccgaagaagaattccatatcgccggcggcagtaccgacacgctgaccgccctgcggcgcgtccgtcagttgacccaggccgtactggtgtgcaaacgcggcgcgctgggctgctcagtctttgaaggcaacatcgccgatgactggtcgcaggtgaagatacatagcggcgttcgcgtagacgttctgaacgttctgggcgcgggcgatgcctttatgtcaggactgctgcggggatacctgaacgatgaaagctgggagcaagcctgccgttatgcaaacgcctgcggcgcgttagtggtatcgcgccacggttgtgcccccgccatgccaaccaaaaaagagctggacgactacctcgcgcgtgaacaatccatcacccggccagacaaagacccgcggctgaatcaccttcatcgggtcacaacccgtaaacagcactggccggagctgtgcgtattcgcctttgaccatcgcaagcaactggtggatatcgcaaatgaagtcggcgccagtgaatccgcgatccctcccctgaagatgctactgctggaaggggcgcgtcaggcggcgcttgaggccggtttacagaataatagcggcatccttgccgataccacctttggtcagcaggcgcttaacgacgtgaccggccagggatggtggattggccgaccggttgagatgcccggttcgtatccgctgaagctggaacatggcgatattggctctcagcttgtcagctggccgcaagagcacgtcgtgaaatgtctggtcttctatcatccactcgatgcagagtcggtacgtcttgaacaagaggcgctcattgacgaggtttaccgcgcctgctgccagtctggtcacgatctgctgctggaagtcatcttgccgcgcgatgcggcagaccaaaatgagcaatactatcctcagattgtggaacgtttttatcaactggggatcctgccggactggtggaaactgccgccgttaagcccagatcgttggcgagaaatcagccagcatattgagcattatgaccctgaatgtcgcggtatattgatacttggcctggacgcaccggaaagcgagttgaagtcaggattcgccgcagcagcggatatgccctgggtgaaaggtttcgccgtcggccggaccatctttggcgaaccgtcacgccagtggttaggcggccagcttaacgatgaacagctcatcgcaacggtgaaacaaaaataccgcatgcttatcgactactggcgcgaataccgcccggcacgttaa

SEQ ID NO: 372855 - DNA, 1167 bp, Salmonella enterica
atgccagctctcacacaacattccacatcgatcacgctgtttcgcatcagcgccgcgatgtttctcaactatctgactattggcatcccgttagtcatgctgccgctgtacgttcagcagcagttgcatctgagcgatctgttgatcggtatcgcggtaggtagccagtttatcgccaccttgcttacccggggcgccgcgggtcgaaaagccgacacgtcaggcggacgtcggacggttatcaccggtcagttctactgcgccgcatcaggtctgctgatgctggtcagtctaatcgctcacccggttccgctgctcgcatgggccatactgattgttggtcgtgtgctgctgggcatcggtgaaagtttcattttgaccggtaatttaacctgggggatgtggctggcgggctcgacccacgcgggtcaggttatttcctggaacggcatggcgacctacggtgcgctgactatcggcgcgccgctggggctgtcgctttacgccagggccggcctggcgcttccggcgctcctcgtcgtgctgttgccgatcatcgccagcggagtcatctatggcattccggggaatatcccaacagcccgtccccgcgtgccagtgctacgggtcgtcggcctggtgtggcggcccggaacagggcttgtgctccagggcattggttttgccaccctaagcgcgtttaccgccctctggttcaacgagcgtcactgggataacaccggttttgcgatgacgctgtttggcattgcgtttatcgctgtccgctttttctgcgccaaatttcccgaccgttacggcggcgccacggtcgcaaccttttcactactggtagaggggaccggactggcggtaatgtgggccgctccgtcagcaggcgctgcgctgattggcgcggcgattaccggctgcggctgttcgctgatgttcccatcgctgggcgtagaggttgtgcgcagagtgccaccggagattcgtggtacggccctcggcgtctggtcagcgtttcaggatctggcctacggatttaccggaccaatagcgggcctgctgacgccgtttatcggctatcagcaggtctttcttctggccgcggcctgcgcgctgctgggcgcggcggttgtccatctcctgctgcggcaacattaa

SEQ ID NO: 372856 - DNA, 834 bp, Salmonella enterica
atgatgaagctgggatttaatgaagcgacctgtatgcgaaactccacgctggcacaggatgttgtgttggcggaacgttttggctatgactacatcgaaatccgtctggatatgttgcaggagtggttacagaaacatacgttaagcgagctggcagacatttttgccgtcggccaccttaagccctggggctacaattcgctggaagacattacgttttgtgatagcgaaagctgggcggagaaacggcggcagttggctttcgcctgccatgctggctcagtggtggggggtgattgtctggtcgtggtgcccaccattcgtcaggggggaaattttccgccgggggaaacggtgaaagattcagtgaagcgtctgcgcgagatggcggcagtggcggaagaaagccagatgcggctggcctttgagccgatcggttccgcaggatgctgtgtgcgcagtcttgccatggcgatggagatcgtagatgcggtcgatcgcagtaacgtcgggctggtcgtcgatgcctttaatctttacctgcacgatcaatggcgggatctgaccacgcttcgccagatccctgtggaaaagatcttcgtttaccatattgatgacgccgataatctgccgctggcaacgctggagcattgccatcgtctgtttcctggcaacggcgtgatcccactgcatgagatcacgcatgagctagtgcagaagggctatgaggggatctgttcgctggaactgtttaaccctggctactggcagatggcggccagcgaagtctttgcgataggggcggaaaagactcgccccttcttaacagcttaa

SEQ ID NO: 372857 - DNA, 1344 bp, Salmonella enterica
atgaaaggcagactcatctcttccgatccgtatcgtcagcaattccttgttgagcgtgcggtctctttttcgcatcgtcagcgtgattgcagtgaattaatcagcgtcttaccgcgccacacgttacagcagattgacggattcggcggcagctttaccgaaggtgcgggcgtggtattcaacagcatgagcgaaaagacgaaggcgcaatttctttccctttatttttctgctcaggaacataattacactctggcgcggatgccaattcagagctgtgatttttccctgggcaattacgcgtatgtcgattccagcgctgacctgcagcagggacggctctccttttcccgcgatgaagcgcatttaataccgctgatttccggggcgttgcggttaaatccacacatgaagctgatggcttcgccgtggagtccgccggcgtttatgaaaactaataacgatatgaacggtggcggcaagctgcggcgcgaatgctacgccgactgggccgatatcattatcaactacctgctggaataccgccgccacggcattaatgtgcaggcgctctccgtgcagaatgagccggtggcggtaaaaacctgggactcctgtctgtatagcgtggaagaggagacagcctttgctgtgcagtatctgcgtccgcgcctcgcccggcagggtatggatgagatggagatctatatctgggatcacgataaagatggcctggtagactgggctgaactcgcctttgctgacaaagctaattataagggaattaacgggctggcattccactggtataccggcgaccatttttcgcaaatacagtatctggcccagtgcctgccggataaaaaactcctgttttccgaaggctgtgtgccaatggagagcgatgccggtagccagattcgccactggcatacctatctccatgacatgattggtaatttcaaatcgggttgtagcgggtttatcgactggaatctgctgttgaacagtgagggtgggccgaatcatcagggtaatctgtgtgaagcgcccattcaatacgatgcgcaaaacgacgtgctgcggcgtaaccactcctggtatggtattggccacttctgccgctatgtgcgtccgggggcgagggtcatgctttcttcaagttacgataatcttctggaagaggtgggatttgtgaatcccgacggcgagcgtgtgctggtggtgtataaccgcgatgtccaggaaaggcgttgccgggtgctggatggcgataaagagatcgcgttaacgctgccgccgtcaggcgccagtacgttgctatggcggcaggagtcgatctga

SEQ ID NO: 372858 - DNA, 1011 bp, Salmonella enterica
atgactttaaaagcaggtattgtaggtatcggcatgatcggctccgatcacttaagacgtctggccaacaccgtgtcgggtgtagaggttgttgccgtatgtgatatcgtcgcgggtagggcgcaggcggcgctggataagtatgcgatcgaagccaaagattataatgactatcacgatctgattaatgataaagacgttgaagtggtcatcattaccgcatcaaatgaggcgcacgccgatgtagccgttgccgcgctaaatgctaacaaatatgttttctgtgaaaaaccgctagcggtgacggctgcggattgtcagcgtgtgattgaagcagagcagaaaaatggtaagcgcatggtgcagattggttttatgcgccgctacgacaaaggttacgttcagctgaaaaatattatcgacagcggcgaaatcggtcagccattaatggttcatggacgtcattacaatgccagcacggtgccagaatacaaaacgccacaggctatctatgaaacattgattcatgaaattgacgttatgcactggctgcttaacgaagattataaaaccgttaaggtttacttcccgcgtcagtccagcctggtgaccactctgcgtgatccgcagctggttgtaatggaaaccacctccggcatcaatattgtggttgaagtgtttgtgaactgccagtatggctacgacattcactgcgatgttaccggcgagaaaggaatggcggagctgccaaccgtcgccagcgccgcggtacggaaagcggcgaagtatagcaccgacatcctggttgactggaaacagcgctttattgatgcctacgacattgagttccaggatttcttcgatcgcctgaacgcaggattgccgccggcaggcccaacgtcatgggatggttatctggctgcggttaccgctgatgcctgcgtgaagtctcaggaaacagggaataccgagattgttgaattaccctcaaaacctgatttctacaaataa

SEQ ID NO: 372859 - DNA, 906 bp, Salmonella enterica
atgtacaatgtaaaaaagagcattaagttggggattgcgcctatcggttggcgcaatgatgatattcctgagattggtaaagaaaatacatataaacaaatacttagtgatgccgcgctcaccggtttttccgggacggaagttggcggttgttatccgcaggatcctgctgagttaaataaagagttaatgcttcgcggactggaaataccaggccagtggttttcttcctttattattcgcgacggtattgcatctgcgatgaatgcttttgaacagcattgtgcttatttgcaggcaatacatgcatatgtcgccgttgtttctgaacaaacttatagtattcaaggtattatcgataagtgcgtttatacagagaagcctaacttcagcgacagcgaatggcagcttttatgcgaaggacttaatgcgcttgggaagattgccaatgcgcacgggctgaagctcgctttccatcatcatatgggcaccggtgtgcagactctgccagaagtggatcgactcatggagaataccgatccgcaatttgtacatctgctgtttgataccgggcatatatatgtttctgacggcgatgtcatgccgctactgagtaaacattttgatcgtattaaacacgttcattttaaagatgtgcgtaatgaaaaactcaaagcatgtcgcctcgcgaagaaatcattcctcaattctttccttgatggtgtgtttaccgtccccggcgatggaaatattgattttaaatccgtattagcttatctggtcgggcatcaatattctggctggattgttgttgaggccgagcaggatcctaagaaatataacccattggaatatgcgcaaaaaggtaaaaagcatattgatgagttactgaaaaattatctttaa

SEQ ID NO: 372860 - DNA, 876 bp, Salmonella enterica
atgcgcttgtgcttctgtccttcagaacgagagaataaggctcagccccagttggcgtatgtgagtcaggtcagtgagagcaatggtccgtttgtccggttcatgcatatgcacccacagaccgttgaactgattcttatcaccgaaggagacggggagtatttcattggcgatcgcatctacccggttcgtaaaggcgacctggtcatttataacagccaggtggtgcatgatgagtatctggaaagcgggcggccaattggcactatttgttgtgggattaacaatatttcgtgtccgggtctacgtgagaatgcgctaataccggatgatattgtgccggttattccactgtatcaccattatgcgacggtggaaaaactgatgagctccgtgtttaccgttattaatcagcatgcggtagaagggccagcaatggcgcagctattgacccaggtagtactcaaatacattgagggaaatgtcttattacgcacaggtaacgatgccatacagcgccatgaaaatttacttgattcaataaaatcctatattgatcgcaatttctatgagccaattcggctggatacactggcgacgaaatttaatgtcagtccttattatgtttcccatgaatttaaacgccgctatggttattcaccgatggattacctgataaaacgtaggctgggggaggcgcaatcgttactaaccacggatgaaggcgggcgcgaaaagatcacctctattgcttatcgtgttggctttagcaaccttagtcattttcagaattacttcaaaaataaagtggggaaaacacccggtcaatatcgaaaggactatcgtaaagctaattatttattatttgaatattaa

SEQ ID NO: 372861 - DNA, 1506 bp, Salmonella enterica
atggaaacagtcggcaattttattcatggtaaaacgacactgagcagcagcggcgagacgctaccggtgactaatccggccaccggtaaagtaattcgtcaggtcacccagagcacccgagaggagatgctggcggcaattcaaagcgcacatgaggcttttccggcatggagtaaaatgactccgctacgccgggcacgtatcctttttgaattcaaagtattactggaaaagcatcgggacgaactggcggcgctgatcgtcagcgagcatggcaaggtctggtcagatgcgcttggcgaactgacgcgcggcatagaggttgtcgaatttgcctgcgggatcccgcacctcagcaaaggagagtactcctttaacgtcggctcaggcgttgacagcttttcattaatgcagccgcttggggttgtggcaggcatcacaccgtttaacttcccggcaatggtgcctatgtggatgttcccggttgctctggcttgcggcaataccttcgtcctgaagccgcccgcactggtgccgtccgcatcgttacgtatggcgcagcttctgcaggaggctggcctgccggacggcgtgtttaacgttgttcactgtggcaatgaggcggctagcctgttgaccagcgaccctcgcgtacaggccgtcagctttgtcggttcctccgccgtcgcggaacatatctataccaccgccagcgcccatggcaaacgcgtacaggccttcggggccgccaaaaatcacgcaatcgtcatgccggatgcagacctggacgccaccgtcaacgccattatgggcggagcatttggttccgcgggcgaacgctgtatggcgctgccggtagtggtcgcggtgggcgatgaaacggcggaccgtctgatcgaacgcctgaaaccgctgattgcggcgctacgtatcggcccgggagagctgcgcggcaaagatgaaaatgaaatgggcccggttgtttcacgtgctcaccaacagaaagtgttgggttacatcgacaaaggggtgagcgagggagcaactctggtcatggatggccgcaactatagcgtggcgggatatcctgaaggcttttatgtcggcggcactctgtttgataacgtcacgcctgagatgaccatctggcgtgaagaaatttttggcccggttctcggaattgtgcgcgtcccggattatgccaccgccattagcacggtaaactcccatgaattcggcaacggcagcgtgattttcaccaccaacggtcactatgcgcgcgaattcgcccagtcggttgaagccgggatggtcggtattaatattccagttccggttccgatggcatttcactcttttggcggctggaagcgctcggtgtttggcgccctgaacgtccatgggccggatggcgtgcgcttctatacccggatgaaaaccgttacctcgcgttggccgaacggacagcagatcgtatcggagttcagtatgccgactctcggttaa

SEQ ID NO: 372862 - DNA, 810 bp, Salmonella enterica
atggccaacttgctgagtacctgtacctctgagtcgggaaatatccaacacatttcccctcaaaatgcaggctgggagtatgtcggttttgatgtctggcagttgaaggctggagagtcgataaccctgccgtccgatgagcgtgaacgctgtctggtgctggttgccgggctggccagcgttaaggccgccgacagttttttctatcggattggtcagcgcatgagtccgtttgaacgcattccggcttattcggtttacctcccccatcatacggaggcgaaagtgacagccgaaaccgaccttgagctggccgtatgcagcgcgccgggattcggagagcttccggtacgtctgatctcgccacaagaggtcggggtagagcatcggggaaaagggcgcaatcagcgcctggtgcataacatccttcctgatagccagctcgccgacagcctgctagtcgttgaagtgtacactaatgaaggcgataccagctcctggcccgcgcacaagcacgatacggcagttgaaggccaggagacctatctggaagagacgtactatcaccgtttcaatccacctcagggattctgcttacagcgcgtctacaccgacgatcgcagcctggatgaatgtatggcggtctataaccgggatgtagtgaaagtacctaaaggctaccacccggttgccaccatcgcgggttacgataactactatctgaacgtgatggccggcccgctacgaaaatggcgtttcacctgggaagagaaccacgcgtggattaactcaccagactacccgcgataa

SEQ ID NO: 372863 - DNA, 1164 bp, Salmonella enterica
atgaaaagtattgaaagggataaatatcaggatattcgtgatgcggttcgttcattatgtagtgaatttgatgataaatatcaccgtaagatagatgaagcaaaagcctatcctgaagagtttgttaataaactaaccaaagctggttggctggctgcgctcatcccggaggaatttggagggtcagggcttggtttaactgaagcatctattatcatggaagagatcaatagatcgggtggaaactctggagcctgccatggtcagatgtataacatgaatacgttgttacgtcatggatccgataaacagaaagaattctggctgccacggatagctactggtgaatggcgcctgcagtcgatgggcgtcacagaacccacagcaggtacagataccaccagaattaaaactacagctgtaaaaagagaagaccggtatgtgataaacggacaaaaagtctggatttcacgtgttcaacattcagactggatgattcttctggttcgaactactccccttgcaaatgtaaaacgtaaatccgaagggatgtctattttcatggttgatattaaagaagctatgaaaaatggaatgacagtacgacctattcccaatatggtcaatcatgaaaccaacgagctcttttttgacaacctggaaattcccgaagaaaatcttattggtgaagagggtatgggttttcattacatacttgatggtttaaatgcagagcgtaccttgattgcggcagaatgtataggcgatggatattggtttatggatcgtgttacccgctatacctgcgagcgtgaggtttttggtcgtcccattggtcagaaccagggggtgcagtttcctattgcagaagcatttattgcagtggaagcggctaatctgatgcgttttaaagcgtgcgagctttttgatcagcatcttgattgtggagcacaggctaatatggcgaaataccttgctgcgaaagccagctgggaagcagccaatgcctgcctgcaatttcatggtggatatggttttgcctgtgagtatgatatcgaacgaaagtttagagaaacacgtttatatcaggttgctcccatatctaccaacctgatcctgagctatatcgctgagcatgtgctggagatgccacgttcattctga

SEQ ID NO: 372864 - DNA, 1686 bp, Salmonella enterica; identical to SEQ ID NO: 370639

SEQ ID NO: 372865 - DNA, 1293 bp, Salmonella enterica
atgctcgatcccaatctgctgcgtaatgagccagacgcagtcgctgaaaaactggcacgccggggctttaagctggatgtagataagctgcgcgctcttgaagagcgtcgtaaagttttgcaggtcaacacggaaaacctgcaggcggagcgtaattctcgatcgaaatccatcggccaggcgaaagcgcgcggggaagatatcgagcctttacgcctggaagtgaataaactgggcgaagagctggatgcggcgaaagccgagctggataccttgctggcggagatccgtgatatcgcgctgaccatcccaaacctgcctgcggatgaagtgccggtaggtaaagatgaaaacgacaacgttgaagtcagccgctggggtaccccgcgtgagtttgattttgaaatccgcgatcacgtcaccttaggggaaatgcactccggcctcgactttgccgccgcggttaagctgaccggctcccgttttgtggtgatgaaaggacagattgcgcgtatgcatcgcgcattgtcgcagttcatgttggatctgcatacggaacagcacggctatagcgaaaactacgtgccgtatctggttaaccacgacacgctgtatggcaccggtcaactgccgaaattcgcaggcgacttgttccatacccgtccgctggaagaagaagcagacagcagcaactatgctttgatcccgacggcggaggttccgctgaccaatctggtacgcgatgaaatcatcgacgaagatcagctgccgattaaaatgacggcgcatacgccttgtttccgttctgaagcaggttcttatggtcgtgatacccgtggcctgattcgtatgcatcagtttgacaaagtggaaatggtgcagatcgttcgcccggaagattctatggctgcgttggaagagatgaccggccacgcggaaaaagtgctccagctactgggactgccgtaccgtaaaatcattctgtgcactggcgatatgggcttcggcgcctgcaaaacctatgacctcgaagtctgggttccggcgcagaatacctaccgcgagatctcttcctgctctaacgtctgggacttccaggcgcgtcgtatgcaggcacgctgtcgcagcaagtccgacaaaaagacccgtctggtccataccctgaatggttctggtctggcggtaggtcgtaccctggtggccgtgatggaaaactatcagcaggctgatggccgcattgaagtgccggaagtattacgtccgtacatgaacggactggaatatatcggctaa

SEQ ID NO: 372866 - DNA, 2445 bp, Salmonella enterica
atgaaaactaagatccctgatgccgtgctggcagccgaggtgagccgtcgtggtttagtcaaaaccaccgcgataggcggcctggcgatggccagtagcgcatttaccctgccatttacccgcatcgctaacgccgcagaggcaataagcccggcgaaaaccggcgagaaagtcgtctggagcgcctgtacggtaaactgtggcagccgttgtccgctacgtatgcatgttgtggatggcgaaatcaaatatgttgaaacggataataccggaaacgatgattacgatggcctgcatcaggttcgcgcctgcctgcgcggtcgttctatgcgtcgtcgcgtctataacccggatcggctcaagtatccgatgaagcgcgtcggcgcgcgcggcgaaggtaaatttgagcgtattagctgggacgaagcctacgatatcattgccaccaatatgcagcgtcttatcaaagagtatggcaacgagtccatttatctgaactatggcacgggaacgctgggcggcactttgacacgttcatggccgccgggaaaaacgctggtcgctcgtctgatgaactgctgcggcggttatcttaaccactacggtgattactcttccgcgcaaatcgcagcgggtctgaactacacctatggcggctgggcggatggcaatagtccatccgacattgaaaacagtaagctggtggtgttgtttggtaataaccctggcgaaacccgcatgagcgggggcggtgtaacctattaccttgaacaggcgcggcagaaatcaaacgcgcggatgatcattatcgatcctcgttacaccgacaccggcgccggtcgcgaagatgagtggattccgattcgtccaggtaccgatgcggcgctggtcaatggtctggcatatgtcttaatcaccgagaacatggtcgatcagccgttcctggataaatattgcgtcggttatgacgaaaaaaccttgcctgccagcgcgccgaaaaacggtcactacaaagcctatattctgggccagggtaaagacggtatcgcgaagacgccggagtgggcggcgcaaattaccggtatcccggcggatcgcattattaagctggcgcgagaaatcggcagcgctaaacccgcctatatttgccaggggtggggaccacaacgtcatgctaatggagaaatcgccacgcgcgccatctcgatgctggcgatcctgacgggtaatgttgggattaacggcggtaacagcggcgcgcgcgaagggtcttatgccctaccatttgaacgtatgcccacgttggaaaatccggttgaaaccagcatctccatgtttatgtggaccgatgccattgaacgcggcccggaaatgacggcgctgcgtgatggcgtgcggggtaaagataagctggacgtgccgatcaaaatgatctggaactatgctggcaactgtttgattaaccagcactctgagattaaccgcacccacgaaatcctgcaggatgacaagaaatgcgaaatgatcgtcgttatcgactgtcatatgacctcgtcggcaaaatacgccgatattctgttgcctgattgcactgcttctgagcagatggactttgcgctggatgcctcctgtgggaacatgtcttacgttatcttcactgaccaggcgattaaaccgcgcttcgagtgtaagacgatttatgagatgaccagcgaactggcgaaacgtcttggcgtggaacaacagtttaccgaaggacggacgcaagaagagtggatgcgtcatctgtacgaacagtcgcgtaaatccattccgaatctgcccacctttgaggagttccgtaagcaaggcatcttcaaacagcgtgaccctgaaggccaccatgtcgcctataaagacttccgcgaagatccgcaagcgaatccacttacaacgccatcgggcaagattgaaatctattcacaggcgttggcggatatcgccgccacctgggagctgccggaaggcgacgtgatcgatccattaccgatctacacgccaggttttgaaaactataacgatccgctaacggataaattcccgctgcagttgacgggtttccactataaagcgcgtgtgcattccacttatggcaacgtagacgtactgaaagccgcctgtcgccaggaaatgtggattaacccaatggatgcgcagaaacgcggtatcaacaatggcgataaagtccgcatcttcaacgatcgcggcgaagtacatatcgaggctaaagtgacgccgcgcatgatgccgggtgtggtcgccctgggagaaggcgcatggtatgacccggatacaaaacgcgtggatcagggcggatgtattaacgtactgacgacccaacgtccttctccgctggcgaaggggaacccgtcacatacgaacctcgttcaggttgaaaaggcgtaa

SEQ ID NO: 372867 - DNA, 363 bp, Salmonella enterica
atgtttctaaattatttcgcgttgggcgtgctgatcttcgtttttctggttctgttttacggaatcatcgccattcacgatattccctataacatggctaaaaaacgtaaccatccccatgccgatgccatccatactgcgggatgggtgagcctgttcactcttcatgttatttggccgttcctgtggatctgggccacgctctaccagcctgaaaagggatggggaatgcagtcacacatcacaccgaccggaaaggagtcagaccctgagattgccgcgctggcagcgcgaatcacccagttggaaaaaagactggatggggagaaaaaaaacgataactccacctttccggagatttaa

SEQ ID NO: 372868 - DNA, 1137 bp, Salmonella enterica
atggatttgttgatagtcctgacctatgtggcctttgcctgggccatctttaaaatattccgtattccggtaaaccaatggacgcttgctaccgctgcattaggtggggtgttcattgttgcgggattgattttattaatgaactataaccacccgtatacttttacggcgcaaaaagcggttatttcaattccggtcactccgcaagtcacgggaattgttagtgaggtaacagataaaaataatcagctaattaaaaaaggtgatgtgctgtttaagctcgatccggtacggtatcaggcgcgtgtcgacaggctgcaggctgatctggttaccgctacgcacaacatcgacaacctgaaagcacagttgtcggaagcggtcgccaataccacccgtgtatctgctgaacgtgaccgtctgtataaagattatcaacgctatttgaaaggcagtcaggcgaaggttaacccgttctctgaaagcgatatcgataacgctcggcaaaactatctggcacaggatgcgctggtcaaaggctcggttgcagaacagacgcagattcagagccaattagacagtatggtcaacggtgagcaatctcaggttgcgtccctacgtgcccagcttgccgaggctaaatacaatcttgaacagacggtagttcgtgcccctagcaacggttatgccacgcagattttaattcgtccggggacttacgcagcagcattacctttgcgtccggtaatggtgtttattcctgaacaaaaacggcaaatcgtggcgcaattccgccagaactcgctgctgcgccttaaaccaggcgatgaagcggaagtggtgtttaacgcgctgcctggtcagattttcaccggcaagctgaccagtattcttcctgtcgttccgggtggttcttatcaggcgcagggcgcattacagtccttaacggtggtgccgggtaccgatggcgtgctggccacgattgagctggatccgaatgccgatgtggatgcgctgccggacggtatctatgcccaggtcgcagtctattccgaccatttcgcccacgtgtcggtaatgcgtaaagtactgctgcgcatgaccagttggatgcattacctttatttggatcattga

SEQ ID NO: 372869 - DNA, 1392 bp, Salmonella enterica
atgacaagcgaaacgcgtacactctacagccagcttcctgctatcgatcgcttattgcacgatagcgcttttctttctctgcgcgatcggtatggccatacccaggtggttgatctgcttaggcggatgcttgacgacgcgcgcgacgtcatccggaatacgcagacgcttcccgactggtacgcagactgggcgcaagaggcgaaactccggctggaaaatgcggcgcaaagcgcgctgcgcccggtgattaacctgacggggacagtgctgcacaccaatcttggccgcgcattgcaggcgcaagaagcgattgaggcggtaactcaggcgatgcgcgcgccggtgacgctggaatacgatttggatggcgccgggcgggggcatcgcgaccgggcgctggcgacgctgttatgccgaatcaccggggcggaggacgcctgtatcgtcaataacaatgcggcggcggtattgctgatgttggcggcgaccgccagcggcaaagaggtggtagtttcgcgtggcgagctggtcgaaatcggcggcgcgtttcgtattccggatgttatgcgccaggcgggctgtacgctgcatgaagtgggcaccaccaaccggacgcacgcgaaagattaccgtcaggcggtaaatgaaaataccgggctgttgatgaaggtgcataccagtaattacagcattgagggctttaccaaaacggtagaggaagcggaactggcggaaatcgggcgagagctggatattccggtggtggcggatctgggcagcggttcgctggtggatttaagtcaatatggcttacccaaagagccgatgccgcagcagctcattgccgcaggcgtcagcctggtaagcttctccggcgataagttgctgggcgggccgcaggccgggattatcgtcggcaaaaaagcgatgattgcccaactgcaaagccatccgctgaaacgcgctctgcgcgctgataaaatgacgctggcggcgctggaggcaacgttacgtctgtatctgcacccggaagcgttggcggagaaattacccaccctgcgtctattaactcgcagtgaagcgtcgattcgcgaacaagcgcagcggttacaggcgcggctggcggcacgttacggcgatgaatttgcgctggaggttaaaccctgcctgtcgcaaatcggcagcggttcattaccagtagaccgccttcccagcgccgccatgacctttaccccgcacgacgggcgcggtagtcggctggaggcactggcggcccgctggcgcacgctgcctgtaccggtcattggccgaatttatgatggccgtttatggctggatatgcgctgtcttgaagacgaaagccggtttatggagatgatgctgaaatga

SEQ ID NO: 372870 - DNA, 996 bp, Salmonella enterica
atgcagcctaaaattaactggattgataacctgcgagggatcgcctgtttaatggtagtgatgatccatactacaacgtggtacatcaccaacgcccacagcgtcagcccgctaaactgggatattgcgaatgtcctgaattcggcttcgcgcgttagcgttcccctgttttttatgatttcaggctatcttttttttggcgagcgctgcgcgcaaccgcggcattttttacgtatcgccctgtgccttatcttttacagcgttgtcgccctggcttacatttcactttttacttcgatcaacgtcgagctttcgctaaaaaatgtgctgcaaaaacccgtgttttaccacctgtggtttttctttgcgattgcggtgatctacctggtatcgccattaatccaggtaaaaaacgtgagcggcaaaatgctcctgatgctgatggtgatcattggtattattgctaacccaaatactgtgccgcaaaaaatcggcggcgttgaatggttgcccatcaatctgtatatcaacggcgacacgttctactacattctctacggtatcctgggccgcgccattggcatgatggagacgcaaaagccatcgctgacgcttatctgcgctgccctgttcatcatcgcggtatttgttatttctcgcggcacattgcatgaattacgctggcgcggaaattttgccgatacctggtatctgtattgcggtcccatggtgtttatttgcgccgtctcactgttcacggtagttaaaaataagctgaatgcgcggacgttacctggactggggcttatctcccgccactcgctgggtatttatggtttccacgcgctgattatccatgcgctacgtactaatggtctggagttaaaacgttggccgccgttagacatcgtgtgggtttttgccgcgacggtgacaggaagcctgctactttccatgctgttacagcgtattgataaacggaaatgggttagctaa

SEQ ID NO: 372871 - DNA, 501 bp, Salmonella enterica
atgggccgagtaatccgtagccaacacataagcaacttgaagtatgaagggtatataaatcaaaagtgcactgcgcccattattgatctcttcaataacgaagcgatctcctgcagtatttcagaatgtccaaccatgccgatgatcgatgacatactcatgaaggcatttgccagacttgatgcgggtaccaatccggttcttcattcagatcagggctggcaatgccgtcatcgatggtaccagtatcagttacgagagtttggcatcatccaaagtatgtcctgcaaaggcaactgccttgataatgcctgtgcagaatgttttttcgggactttaaaatcagaaagtttttacaccagtaaatttaaggatattgatgaacttaagatagctgttgaggattacatacgatactacaatacccgacgaattagccttagatttaacggactcagcccggttgaataccacctaacgagctatccaggcagaaattaa

SEQ ID NO: 372872 - DNA, 651 bp, Salmonella enterica
atgagccaggcatcagaggttgaaaaccaattaagaaaactgatactcaacatggagctggggccgggtgagcggttaacggagcgctgggctgaagcgacgtttaacgcgtcccggacacctgtgcgtgcagcattacaaaagctagagtcagaaggactggtctgtcgtgacgggttacgctggatggtggcaccgatcgatgtcgctgaaattgaacagctgtgtatttaccgcgaaatactggaagtgtcggcattaaaactttcagccagccacatgactgaggaacaactaaacggtctggaaaatctgctcaaagagaagaatgctgatacatctgaagggattctggacgatgccggaacacgattccatcttgagttaacccgtctttgccagaatttatttatcatcgaaggagtaagcgatgccctgcggcgactttcacgggcacgatggctcgacaaagcaccgtcaaatcccgcgtgggatgatcatcgagaaataattgctgcgcttcggtcacgggatactgataaggcagcagaattactcgccgttcatctctgcgaaagccgcctccgtcttctcgacgctatcaattcaagcagacgtagcctgagggcgagaggtattgttatatcctga

SEQ ID NO: 372873 - DNA, 1203 bp, Salmonella enterica
atgacccaattctataacagcttctggcgtcgaaacctgctcgtttgcttcattggctcgttctcaaccgtcttcgcaatgactcttatgctgccgttcctgcctttgtatgtcgaagaactgggtgttagcgggcatgccgcggtcgttcaatggtctggtgtggcattcagcgcaacgtttatctctgccgggttgattgcccctgtctgggggaaactcggtgacagatatggacgcaagtcgatgctcgtgagagccagccttggcatggcggttactgtttcgcttatggggctggtgacaaatatagggcaacttgtcggactaaggttgttagttggcctggcaggaggctactcatccggcgcgacaattcttatcgcagtccaggctcccagagaacgtgctgcctgggcgctggggattgtttcatccggtgtaatggctggcaatcttatcggtccacttgccggaggatggctcccaggtctgatcggtattcgaaccacttttttctttgcaggtgcgctgatatttctgtcctttatcatgaccctcactctcattcgcgaagaagtgcataaacctgcggatacagtggcaaaaacgggagtgagctggtcgctgttgcctgcccgtactgtcattatctgcatgctttgcaccggtctgctgctgatgctggccaatatgtcgatagaacccattatcacggtctatgtgcgtactctggtcagcgacgcttctcagataacgaaagtggcgggatatgtgatggcagctgctgctctgggcagcattatttccgcctcatggcttggaaaactggcggacaggataggacatttacgcattatcacgctggcgctgactgcggccggtttactgctgatccctcaggcatttgtcacctccgggtggcaactggttgccctgcgtttccttatgggactggcgctcggcggcttattgccttgtattgcagcagtgatacgtcatcgtgtaccagaaggtatggtgggcagcattcttggctattccgtcgcagcgcagttcgctggccagttcatcgggccactgatgggcggctttgtcggcgggcacatcggtatgcgagccgtctttctggcaaccagctgcatcctgctagccggagctgcctggaactttaaaatacatcgccagtcagcaacgcgctga

SEQ ID NO: 372874 - DNA, 591 bp, Salmonella enterica
atgtcaaatcaacccagtaacatcagtaaaaacagcgctctgctggttatggattttcagacgatcatccttaacaatttcctcccgcaagaaagcgctggaaacgttatccgcaataccgcatcactgatagccgctgcgcgcacggcaggcgtaccggtcatttatgtcagtgtcggatttcgcgaggggtatccagaggtcagcaaaaacaacactatcttctcttcgattaaagagaatggaatttttatggctgacaacgagagcacggctattcatcctgatgtcgctccggcagaaaatgaggtcgtcatcgttaaacgcagagtcggagctttctcgtttaccgaacttgagatgatccttcgtgctcaaggcatcgaaaacctgatccttaccggtgtgactaccagtggtgttgtgctttctacagtcgggcaagcgtttgacctggattaccgcctcatcgttgtgagtgattgctgcgcagatccagatcatgacaccaatgtgtttttacttgaaaaaattctaccccaacatgcttttgttaccagttcatctgaaatatcagaagcctgggcataa

SEQ ID NO: 372875 - DNA, 1080 bp, Salmonella enterica; identical to SEQ ID NO: 370383

SEQ ID NO: 372876 - DNA, 603 bp, Salmonella enterica
atgagaacctccgggggcaagaggttcgacccgagcgaagcgagagaacgttgcgtcagcaacggcccgcagggcgagccacgcagtggcgagtcatcctctatcaccgaccaaattcagaaaccctgctcaatgagcagggtttttttgtatctgaagtctgacgaggatgagaacctccgggggcaagaggttcgacccgagcgaagcgagagaacgttgcgtcagcaacggcccgcagggcgagccacgcagtggcgagtcatcctctatcaccgaccaaattcagaaaccctgctcaacgagcagggttttttgtatctgaaacctgacgaggatgagaacctccgggggcaagaggttcgactcgagcgaagcgagagaacgttgcgccagcaacggcccgcagggcgagccaccctctatcaccggcaggttgacgctctcaccaccagttcaggcatgatcccgtcgctgtggttgaccttcttgcccgccagcaaatcaaataatagcgtgattgcctgtcgcgccacctcatcaagatgcatattcactgccgtcagcggcggcagcgattcgcgcgcgcggataccgtcatag

SEQ ID NO: 372877 - DNA, 1608 bp, Salmonella enterica
atgagtatttccttgaagaagtcagggatgctgaagcttggtttgagcctggtggccatgaccgttgcagcaagcgtgcaggccaaaaccctggtttattgttcagaaggctcgccggaaggctttaacccacagctctttacgtctggcaccacctatgatgccagctccgtacctatctataaccgtctggttgaattcaaaaccggcaccacggaagtgatcccgggtcttgctgagaagtgggatatcagcgaagacggtaaaacctatacgttccacctacgtaaaggggtgaaatggcaatccagcaaggatttcaaacccacgcgcgagctgaacgccgatgatgtcgtgttctcttttgaccggcagaaaaacgagcagaacccgtaccataaagtgtctggcggcagctatgaatactttgaaggcatggggctgccggatctgattagcgaagtgaagaaggtagacgatcacacggtgcagtttgtgctgacgcgtccggaagcgccgttccttgccgatttagccatggacttcgcctctattctttccaaagaatatgctgacaacatgctgaaagccggtacgccggaaaaagtggatctgaacccggtcggcactggcccgttccaactggtgcaatatcagaaagactcccgcattctctacaaagcctttgacggctactggggcacgaagccgcagattgaccgtctggtcttctccatcacgcctgacgcctctgtgcgttacgccaaactgcagaagaacgaatgtcaggtgatgccgtatccgaacccggcggatattgcgcgcatgaaagaagataaaaacatcaacctgatggagcaggctggtctgaacgtgggttatctctcctataacgtacagaaaaaaccgctggatgatgtcaaagttcgccaggcgttgacctatgccgtgaataaagaggccatcatcaaagccgtttatcagggcgcgggcgttgcggcgaaaaacctgatcccgccgacaatgtggggctacaacgacgatattaaagactacggctacgatccggaaaaagcgaaggcgctgctgaaagaagccggtctggaaaaaggcttcaccatcgatctatgggcgatgccggtacagcgtccctataacccgaatgcgcgtcgtatggcggaaatgatccaggcggactgggcgaagattggcgttcaggccaaaattgtcacctatgaatggggcgaatacctcaagcgcgctaaagatggcgagcaccagacggtgatgatgggctggaccggcgataatggcgatccggataacttcttcgccacgctgttcagctgcgatgccgcccagcaaggctccaactattcaaaatggtgctacaagccgtttgaagacctgattcagcctgcgcgtgcgaccgatgaccacaacaagcgtattgagctctataaacaggcccaggttgtgatgcatgaccaggcgccagctctgatcatcgctcactccacggtttatgagccagtgcgtaaagaagttaaaggctatgtggttgatccattaggcaaacatcacttcgaaaacgtctctgtcgaataa

SEQ ID NO: 372878 - DNA, 1680 bp, Salmonella enterica
atggatgatgtttttggcatattgccatcatggatgtttaccgccatcgtggcggttatcgtcttactaattatcgggatcatttttgctcgcctctatcgccgcgcatctgcggaacaggcgtttgtccgtaccgggcttggcgggcaaaaagtggtgatgagcggcggcgctattgtgatgccaatctttcacgaaattattccgatcaatatgaataccctaaaacttgaagtcagccgtgctaccgtcgatagcctgatcaccaaagatcgtatgcgcgttgacgtggtcgtcgctttcttcgtacgtgtaaaaccctctgttgaaggtattgccaccgccgcacaaacgcttggccagcgaacgctgtcgccggaagatctgcgtatgctggttgaggataaattcgttgacgccttacgcgctaccgcggcccagatgacgatgcatgagctacaggatacgcgtgaaaacttcgttcagggcgtacaaaacaccgttgcggaagatttgtcgaaaaacggtctggagctggaaagcgtctccttaaccaactttaaccaaacgtccaaagaacatttcaacccaaacaacgcctttgatgccgaaggtctgacgaaactgacgcaggaaaccgaacgccgccgtcgtgaacgtaatgaagtggaacaggatgtggaagtggcggtgcgcgaaaagaaccgcgacgcgcttgaacgcaagctggaaatcgagcagcaagaagcctttatgactctggagcaggagcaacaggttaaaacccgcaccgccgaacaaaacgccaaaattgccgcttttgaggccgagcgccatcgtgaagcagaacagacgcgcattcttgctgagcggcagatccaggagacggagatcgaacgtgagcaagcagtacggtccaggaaagttgaggccgagcgtgaagtacgtattaaagagatcgaacagcaacaggtgacagaaatcgccaaccagacgaaatctatcgccattgccgccaaatccgagcagcaatcacaagcggaagcgcgcgccaacgacgcgctggccgatgcggttcgcgcccagcaaaacgtagaaaccacccgccagaccgccgaagcggatcgcgccaagcaggtcgctctgatcgccgcggcgcaggatgcggaaaccaaagcggtcgaactgaccgtccgggcaaaagcagagaaagaagcggcagaattgcaagccgccgccatcatcgaactggcggaagcaacgcgtaaaaaaggtctggcggaagccgaagcgcaacgggcgctgaatgacgctatcaacgtgctttctgacgaacaaaccagcctcaaatttaaactagcgctcttacaatcgttacctgctgttattgagaagtctgttgaaccgatgaaatccatcgacggcattaagattattcaggtcgatggcctcaatcgcggcgcgacggcgggcgacgtcgccgctggcggcgctaacgggggaaacctggcggaacaagcgttatctgccgcgctcacctatcgtacccaggcgccgctgatcgattcgctgttaaacgagattggcatcgctggcggctcgctaaaggcgctgaccacgccgttggtttcatcggcaacggatgagattaatcgcgaagcaacggtaaaagagcaataa

SEQ ID NO: 372879 - DNA, 1008 bp, Salmonella enterica
atgactgacaaaactattccgttctcggtgctggatctggcgccgatccctgaaggatcttcggcaaaagaagccttcacgcactcgctggatctcgcacggctggctgaaaagcgcggttatcaccgctactggctggcagaacatcacaacatgaccggtatcgccagcgcggcgacctcggtattgattggttatctggcggccaataccacaacattacatcttggctccggcggcgtgatgctgcctaaccattcaccgctggtgattgccgagcagttcggcacgctgaatacgctctatccgggacgtatcgacttagggttgggacgcgcgccgggtagcgatcagccgacgatgcgcgcgctacgtcgccatatgagcggcgatatcgataactttccacgcgatgtcgcagagctggtggactggttcgacgctcgcgaccctaatccgcatgtgcgcccggtgcccggctacggcgagcaggtcccggtctggctgctgggctccagcctgtatagcgcgcaactggcggcccagcttggtctgccgttcgcctttgcttcgcatttcgcgccggatatgttgttccaggcgctgcatctgtaccgtacccagttcaaaccttcagcgcggctggaaaaaccgtacgcgatggtgtgtatcaatattatcgccgccgacagcaaccgcgacgccgaattcctgtttacctccatgcagcaggctttcgtgaagctacgccgtggggaaaccggccaactgccgccgccgattgagaatatggagaccttctggtcgccatccgagcagtatggcgtgcaacaggcgctgagtatgtcgctggtcggtgataaggcgaaagtgcgacacgggctggaggctatcttgcgtgaaacccaggctgatgaaattatggttaacggccagatttttgatcaccaggcgcggctacactcatttgatttggcgatggatgtgaagcaggaattgttggggtag

SEQ ID NO: 372880 - DNA, 1065 bp, Salmonella enterica
atgagtttatttttcgatcgtgctggattgattgctgaattgcgcacatccaatttgagctctgctattcaggagaaagtcgtgcaacaggcacgtgctgctattgcatttaaacgttgtctgcgggatatggaaacagtaaaggtgggggcatcgcggttgggcggtctacccgactggccattaggacaaagctggcctatacgaaaaaaatcggttaatgccacatctcgcgtactaaagctgaaagctgaaaaaacgcgaaatgccaggtttgttcatgaaatgaaaatgagttatgagctgctcaatgaagggcgtaagctgcttgggcagccagcggaagattttgacgaggaaaagtatcggttagtgcagcagcggttattaaccgaaattgacatccgcatagagaatcagttggttgattttccgcttgctttcgttgcccaactaaacttgagtgacctggcgttactcccggggtttgatccactgcttcccaggcgggggttattgagcttctttgtcgatgttacctgggaagatcggcagccctttgttttctggcacgatgttgaggtagatacattaagcacgctagctgtgccagatgacttgctggctttttacaataagattgaatttcgtgaaccatggcaattgtgtacacaggttgagtgcctggaacctctttccgttatcagtgtttcgtcagtctgcgaggggttaagcgttacgcagcagaaagcgtatgaatcatggtatgacgcgttaagtgattacgaacaggacaacccgtatcgagttgatgcctgctattccggcgatcttctgggagggtggacaattcctctccaacgtagtgtggaagatgaactgaatcaaaatgatacaaggtggcgacagctttttagctgggatgaagaaattcattctacaacagcattactggctgtcgctgggccggattttggcgggggcattgactatataatgatgactgaaaaagacatggctgcacaatgctttgacagggtgcgaaatgttgtccagttagattaa

SEQ ID NO: 372881 - DNA, 1659 bp, Salmonella enterica
atgcaagaaaataccgtaattaaatatttaaataccaatatgtttatacgggaaattacacgctggtttgccagacactcgtttcaaaaccggatatttctactgatcctgtttacatccaccatcgtgatgctggcaatcacctggtatctgaccgatatcacgaaagaacgcctgcattatcaggtgggccaacgtgcgcttattcaggcaatgcaaatatccgctatgccagaattagttgaagccgtagaagcgcatgatttgtcacgcatcaaagcgttgattgacccaatgcgctcgttttcggatgcgacttacattaccgttggcaacgaaaaaggtcagcgactgtatcacgtcaacccggatgagatcggcaaatatatggagggcggcgatagcgacgacgcgctgtataacgctaaaagctacgtatcggtgcgcaaaggttcattaggctcttccctacgtggtaaatccccgattcaggacagtaccggtaaagtcatcggtattgtttccgtcggctatactctggaacagttggagagctggcttaacttacaaatcagctcgttgctgttcccgatggcgttactgctgctggtactgttgtactgtgcccgccgcttctcgctgcatattaaaaagcagatgcttaacatggagccgcagcagctttcacaactattaattcagcaaagcgtgttgtttgagtcggtatttgaagggttgatcgccattgactcccatcaccgtattaccgccattaaccaaacggctcgccgcttactgaatctgagccaaccggagtctgaactcattggctatgcaatccaccatgtcgtgttgccggaggccttcttttacgatgcgccgcaaaaaaacaaaaaagatgagatcgtcacctttaaccaaatgaaagtcatcgccagtcgcatggcggtcattattgacaaccagcctcagggctgggttattagctttcgcaacaaagacgatatcaatacactcagcctgcagttaagtcaggtgcggcaatacgccgataacctgcgcgccgtgcagcatgagcatcgcaaccttatttccaccattgccggactgctgttcctgaagcgctacgataatgcgctggcgctgattcagcagcagtcggaaagccaccagaaagtactcgattttatttcccataatttccgcgaccaccaccttgcggggctattaatcggtaaatattatcgggcaaaagagctggggctggagctgattttcgatccttcaagctttgttgaacacctgccgtcatcgctctcgcataatgaatggatttcgattgttggcaatttattggacaacgcctataacgccaccctgctcaatcgcgaaggctcgcgacagattgagtgcctgatcaacagcgaaggtaatgaagtcattattgaagttgccgatcagggatgtggtattgacgaaaatatccgccagcatattttcgagcgtggagtgaccacccacaacaacggcgatcacggaattggattatggttggtgcacagctacgtcaagcaggccaatggtgacattatcgtcgataacaataatccttttggcaccatttttaccctctatatcccttttaccagagaagaataa

SEQ ID NO: 372882 - DNA, 1374 bp, Salmonella enterica
atgagttctgtcattgaggatacccagccttccgggtcagcatcattgtctttactacagcgtattagctacggctctttggatgtggcgggtaatctgctgtactgcttcggttcaacgtacattttatatttctacacagacgttgcgggcattagccttgccgtagcaggcgttatcctgctgctggcgcgtattatcgatggcatagacgcccccatatgggggatcatcatcgataaaacgcgttcacgctacggtaaatgtcgcccctggtttttatggttaccgctgccttttgcggtattcagcgcgctgtcattttggtctcctgatatcagtatgacaggaaaagccatctatgcagcaatatcttatatgattgccagcattctatttaccggacttaatacaccactcagtgcaatattacccctgatgaccttatctcccaaggaaagactggttttaaattcctggcgaatgaccggtgggcaaattggggttttattaatgaacgcgaccgccttgccgttagtcgcttttttaggtaacggtgatgatcacgctggttttatttatacggcaattacgtttgccattatatcctgcgcgctaacgctctttgcgtttaaaaacattcgtgaaatggatacggataaaatacagcatgaacctaagttgccgatgaaaaaaagtttcgcggcgatgaaaggtaactggccgtggatcctgatggtgctggctaatctgatcttctggattgccctacagcagcgcaacacgaccattgtctattatctgacctacaacctcgaccgtaaagatctggtaccgctgattaacagcctggcgacgattcagatcctgtttatcatcgctatccccttctttagcaaatacctggctaaaacctggatatgggtaggcggtctgctggtcgccacgtttggcggcgtcatgatgtggctggcagcggacaacattactttcctcatcgccgcctggatactcggcaatatcggcagcggtatcgcctgctcaatgccgtttgccatgctgggcttcgccgtcgatttcggcgcctggaagaccggtattaaggctaccggcattcttatcgccttcggcagcaccttctgcatcaagatgggtagtggcctcggcaccgctttcgccgcctggatcatgaacagttttggctatgtccccaaccatgcccagagtgctgcgggtctggagggcattatctgggcctttatctgggcacccgccctactcttcgcgctcgcagcgatcccactacttttctttcgcaaatacgaagcgatggaagagaagattcgccacgatctggaaaccgtcaactcataa

SEQ ID NO: 372883 - DNA, 258 bp, Salmonella enterica
atggggccgttcaaacatcaaaagaatacgcttcctaccccgtgtcttgccgtcaatcagaggcttgataagcaaaatgcgatggtgctcaaccatacggcgatttatgagcacagcctcagccagattacagaaagtaatacagtacaaaatgcgctgattattcttaatccgtttatggccgcgccatctcttgccagcctggcgagagcgatattatcgatccgcaggcgggcagcgaggcgatggggctgctaa

SEQ ID NO: 372884 - DNA, 1254 bp, Salmonella enterica
atgtttgccaatattaatgtggactgctgtaaaacgccgggatgtaaaaatctgggcgtgttgaacagtccggattatgtccgccagggaaaagatgttctttgtcgggaatgtggtttcctgtttcctgttatttccgctggggcgttaaatctttttcgccacacggtaaaccggggatggaaaggcctggtcaaacagtgtcctgcctgcggcagcacctcattaaagaaatacggcttctcgactcagggcgaacaccgcatggcgtgtagtcagtgtcggaaaacgttcatcgtccccgaaaaggcaaaaagcgattgccgacaggacgagctggcaaccctaattgaggaagggacgtcgcttgccgggatccgctcacagctgaaattagacagcacaggtcttaaccgggcgctgtttaaactatcccgtaatgcaaaccttgcagagcgatgccagcagtttccggccttcgatatcgcactcagcacccgcgctttcagggtgaactataacggtggagacagcagcctgtatgttctggtgacggcagaagaacaaagcggaagggtggtggcgatttcgtcaaattattcagcacagccgctggataaagcctggcagtatcagtcgtattatgaagaacggctacctccgggaacgctggcgcatatggtgcaacgtaaggaagcgattacagcgcgccgcgaaactttatttgatatcgattacggtccggcctcgttatataagaatgactccggaatgatcgtaaagccggtgttgcctgcctaccgccattttgaactggtgcggatgctgacggacgaacgctccttaaacgttcagcattacctcgatcatgaatgctttattctggggggatgcatgatggcgaatatgccgcatgtccatcagggccgttgccatatttcatttgtcaaagaacgcggtacgacgccgctgcaaaaagatattccgccacgcctgtttttaagcggcggtatccgtaacaatgtctggcgtactttttctacccgcgattatgctatggcggtgtgtaatctcaccggtaataaaaaaattacccagcaacgctatgctacgttacaaggcgcgacggcgttcattaattatctgtatgcgcatccttttttggcgcagcttaatcgtctgtcaccggcaaatgtgacggcaacgctggattatctgaagtatgaatataatcaatcccgtaaggtcggataa

SEQ ID NO: 372885 - DNA, 1197 bp, Salmonella enterica
atgcaacggaaaagctgtcaggtaatgatcaaaccgaccgggtcggtgtgtaatcttgattgtaaatattgcttctatctggaaaaggaaatgctctatcccgatagaaaaaaccattacaagatgacggaagaaacgctggcgttgtttgtgcaacagcatattgcggcgcaggacgtggatgaagtgatttttgcgtggcagggtggggaaccgacgctgatggggctgccattttaccgccaggctgtagcgctccagcaacgttatgctaatggaaaagccatcgttaatacttttcagaccaatggcattctgattgatgatgaatgggcgagattcttcagggcgcatgactttctggttggtatttcgattgatggcgatgcggcgctgcacgacgaatggcgagtaactcgcgcagggcaacctacccatcataaagttgaacaggcgataaaatgcctggcgagtcatggcgttgaatttaatactctcacggtggtgagtcagagcaatatgctgcacccgcagcgggtttatgcgtatctgaaatctatcggcagccgctatatgcagtttattccgctagtggaaagagcggcaaataaagacggaatgctggcgcatccgcaggacgagcaaaccgcagtaaccccctggtcagtggacggattacagtttggaaagttcctgaatgccatttttgatatctggatccgcgaagatattggtgatatcggcattcaactctttgaacaaacgctggcggcatggtgtggactcccccctcaggtttgcgtttttgcgcccgtttgcggtagcgcttttgcaatggaaatgaatggcgatgtgtataactgcgatcatttcgtttacccgcaatataagctcggcaatattaacgacacgccgctgcgtcagatgaataatagcgcgcaaaaccagcagtttggtctcgataaaagccgcacgatggcgcaggaatgccatacctgcccgtggcaattcgcctgttatggcggttgccctaaacaccgctttttgccttcggcttgcggaccgatgaagcaaaactatctttgtgccggctatcagtgctttttctctcataccgcgccaatgatgaaagcgatgaaaaccctttacgtaaataacctgtcaccggcggagatccggtctgttttttttaagtaa

SEQ ID NO: 372886 - DNA, 765 bp, Salmonella enterica
atgtctctgataaagcgaacagtattatttagtctcttacttacaatatctactgtttttagccattctgtacatgcactggaatataagaattcatttggatcaattaatgccggttatgctgactggaatagtggattcgtcaatgtacatcgtggggaggtgtggaaagtaactgctgactttggtgtcaacttcaaagaggcagaattctattcatttattgaaagcaacgtgttaaatcacgctgttgctggaagaaatcatactgtttctgccatgactcatgtacgactctttgattcagattatactttcttcggcaagatatatggtcaatgggataactcatggggcgatgacctcgatatgttttatggtgcggggtatttaggttggagcgggagttgggggttcttcaaaccctatattggtctgcataatcaatctggtgattatgtctcgcagaaatatgggcagacaagcggctggaatggctatgttattggctggactgcagcctataattttaatttatttggtgaagattttgttttatctgactggaatgaaatcgaactagatagaaatgacgcttatacggagcagcaattcggtcgaaatggattaaatggtggattaacactggcatggaaattttatccccgctggaaagctactgtgacatatcgttatttcgcgaacaaactaggttatgacggatatggagaccagatgatttatatggtcggatattcattttaa

SEQ ID NO: 372887 - DNA, 297 bp, Salmonella enterica
atgtatccttttactaacgacgtaatgaacgtggaaattagcggtaaagatctgaaggcgatgatgtctcatgcagccgatccgaagaacggcatgctgcatgtgtcgaaaacggccaaattcaaacactacagcacaaaaccgctgggacagcgtattgtcgaatttgatatcaaaggtaaacaggtcgcagacaatacattcagtaccgtcgcgctggactcctttatcgataaaggccgtggcggatcaggcttcacgaaaggtaaaaatgtcaaagacattaaagggctgtaa

SEQ ID NO: 372888 - DNA, 228 bp, Salmonella enterica
gtggagtttctggtttttgacaacggtaattaccgttcccgcgaagataatatcaatctgccgccaccggataacgaccgcatgagagttgttttatttactgatgtcgtcaacacgcatggtgtgatccagaacgatgttattgatatgttccatataatcagcaattgcctgcgaggtttacagccctttaatgtctttgacatttttacctttcgtgaagcctga

SEQ ID NO: 372889 - DNA, 162 bp, Salmonella enterica
atgaatcagaaaattgataccgataacgcgatggtgcaaaaccataacgccatataccaacagctcctcgaccaaattcgtgaggacaatacatatacacatgccgttattacccttaatccttatggcaccgcgccgttaagcctttatcctggtgtctga

SEQ ID NO: 372890 - DNA, 648 bp, Salmonella enterica
atgttacaggtataccttgttcgccacggtgaaacgcagtggaacgccgagcgacgtattcagggacaatcggacagtcccctgacagcaaaaggcgagcagcaggccatgcaggtaggagaacgcgcccgcagcctcggcatcacccatatcatcagcagcgatttaggccgcacaaaacgcacggcggagattatcgcccaggcgtgcgggtgtgatattacctttgactcccgcctgcgcgagctggatatgggcgtgctggaaaagcgccagatcgattcgctgacggaagaagaagagggctggcgtcgtcagttagtcaacggcacgcaggatggtcgtattcccggtggggaatcgatgcaggagttgagcgatcgcgttcatgccgcgctggcgtcctgtctggagctaccgcagggcagccgacctttattggtcagtcacggtatcgcgttgggctgtctggtcagtactatactgggactacccgcctgggcggaacgccggttacgtttgcgcaactgctctatttcccgcatcgattaccaggaaagtcagtggctggcgtctgggtgggtggtagaaaccgcaggggacgtttcgcatctggacgcccctgcattggatgagctacagcgttaa

SEQ ID NO: 372891 - DNA, 810 bp, Salmonella enterica
atgggcagcgttaacttcataactcacgccgatgttctgcaacttattgcgaaaagaacggctgaagattgtattatttttctttctggtcctacgtccagaaagacgccgctgtccttgttacgaatgaaagatgtcattgcagtcaatggttctgttcaatatttgttaaacaataacgtcaagccatttttgtaccttctgacggatgttcgcttcctccatcgtcggcgcgaagatttttataactttagccgtaacagtcagtttactatcgtcaatcttgatgtgtacgaacaggcttcagtggatgatcaaaaatatattgaagaaaactgtttaattattcgctccttttatcgccgagaaaaagggggctttttaaagaaaattaaatttaatatcctcaagcgggttcataaagcattacttatttcagttcctctttcgaaaagaggacgactggctggattttgcaaggatatcagcatcgggtattgctcttgtcatactattgcttataccgctattcaggttgcctattccctcaagtatggccgtattatatgttctgggcttgacttaacaggaagttgcccacgtttctatgacgaatctaccagccctatgccatctgagcttagtaaagatctgtttaaaatactgccattttttacttttatgagaaaaaatgtgagtgatttaaatatctttaatttatcagatgatactgcaattcattacgatattattccatatattacagcctcggaacttgaggatgaaatatattacgataaaattgtctag

SEQ ID NO: 372892 - DNA, 1383 bp, Salmonella enterica
atgaaaagtgagattctctccgttaaggagaagattggctatggtatgggcgatgccgcgagccacatcatctttgataacgtcatgttatatatgatgttcttctataccgatattttcggcattcccgctggttttgttggcaccatgtttttactggcgcgtgcgcttgatgccatctccgacccttgcatgggcctgctggccgaccgtacccgctctcgctggggcaaattccgaccctgggtgctgtttggcgcgttgccgtttggtatcgtttgtgtgctggcttatagcacgccggatctcagtctgaacggcaaaatgatttatgccgccatcacctacacgttgctcacccttctgtacactgtggtcaacatcccttactgcgcgttggggggtgtaataaccaatgacccaacgcagcgtatctccctgcaatcctggcgctttgtgctggcaacggcgggcggaatgctttctaccgtactgatgatgcctctggtgaaactgattggcggcgagaataaggcgctgggcttccaggggggtatcgcagcgctctcggtggtggcgttcctgatgctggcgttctgcttctttaccaccaaagagcgcgttgaagcgcctgccacccatacctccatgcgtgaagacctgcgtgatatctggcacaacgaccagtggcgcatagtcggcctgctcaccatcctgaatattctggcggtatgcgtgcgcggcggggcgatgatgtattacgtcacctggatattgggcaaaccgggcgtgtttgtcgccttcctcaccacctattgtgtcggcaacctgattggctcggcgctggcaaaaccgttgaccgactggaaatgcaaagtgagcgttttttgttggaccaacgctttactcgcagtaatcagcgtggcgatgttcttcgtaccgatgcacgccacgattgctatgttcgtctttatctttgtgattggcgtattgcaccagttagtcacgcctatccagtgggtgatgatgtctgacaccgtcgactacggcgaatggtgtaacggcaaacgcctgacggggatcagttttgccggcacgttgttcgtgctgaaactgggtcttgccctcggcggggcgctgattggctggatgctggcaggcggcggttacgacgcggcggcgaaaacgcaaaacagcgccacgatcagcatcatcatcgctctgttcactatcgttccggccatctgttatctgctgagcgccgcgatcgctaaacgctactacaccctgaaaagcccgttcctgaaaaccattctggaacaactggcgcagggcgcacaccgcaacgaacaagaatttacccataaagaattgcagaactaa

SEQ ID NO: 372893 - DNA, 132 bp, Salmonella enterica
atgcgtaaagcccgtctcactgagcatcagaacatcgccgtaattaagttggtcgaagccggacgaacggttaaagatatctgccaggaggcggatatttgtgaagtgactgacgacatctatggacattag

SEQ ID NO: 372894 - DNA, 1194 bp, Salmonella enterica
atgaatgaaaatatcgcagaaaaattccgcgctgatggggttgccaggcctaactggtcagccgtttttgccgtggcgttttgtgtcgcctgcctgattaccgttgagtttttgcccgttagtctgttgacgccgatggcgcaggatctggggatctccgagggcgtcgccggtcagtcggtcaccgttacggcgtttgtcgcgatgttttccagcctgttcattacccagattattcaggcgaccgacaggcgttatatcgttattctgttcgctgttttgctgacggcttcttgtctgatggtctcctttgccaacagctttacgctgctgttgctgggccgcgcctgtcttgggttggcgctgggcggattctgggcgatgtcggcgtcgctgaccatgcgactggttcccgcgcgtaccgtgccgaaagcgctgtcggtgatttttggcgcggtttccatcgcgttagtgatcgccgcgccgctgggcagttttttgggcggtattattggctggcgtaatgtctttaacgccgctgcggtgatgggcgtactgtgcgtcatctgggtggtgaaatcactgccgtcgctgccgggcgaaccttctcaccagaaacagaatatgtttagcctgttgcaacgccctggcgtgatggccgggatgatcgccatctttatgtcttttgccgggcagttcgctttctttacctatattcgcccggtctatatgaatctggcgggctttgacgttgatggtctgacgctggtgttgctcagttttggtattgccagcttcgttggcacttctttctcatcttatgtcctgaaacgttcggtaaaactggcgctggccggtgcgccgctgctactggcgctgagcgcgctgacgctcattgtgtggggaagcgacaaaaccgtggcggcggcaatagcgattatctggggactggcgtttgcgctggtgccggtgggatggtcaacgtggatcactcgttcccttgccgatcaggcggaaaaagccggttccatccaggtcgcggtgattcaactggcaaatacctgtggcgcggcagtgggcggttatgcgctcgacaatttcgggctgctttcgccgctggcgctttccggcggtctgatgctgttgacggcgttagtcgtggcggcgaaagtccgtattacgccaatgagttga

SEQ ID NO: 372895 - DNA, 270 bp, Salmonella enterica
atgattagacaaaaagtacgcgttatgaacagtacggggcttcatgcgcggccagccgctacacttgcgaaaattgtcaaaaaataccagtcttcattaacgctagttaataatgacaaagaaattcccattaaaggaatgatgagtattttgggggctggcgtaaagggaaacacaatgattgatttaatttgtgatggactggatgaactggcttttatggatgaattaaaatctgcatttgctgatggctttggtgagtcagtatag

SEQ ID NO: 372896 - DNA, 861 bp, Salmonella enterica
atgcctttagtcaatggtaggatcctgctcaattgtattcaggaaaaacatgtccttgcgggggcatttaatacaacgaacctggagacaacaatttccattcttaatgcaatagaacgttccggattgcccaattttattcaaattgctcctactaatgcacagctttcaggttacgattacatttatgaaatagttaagcgacatgccgacaaaatggatattcctgtcagcctgcatctggatcatgggaaaactctggaagatgttaagcaggctgtccgggccggatttacctcagtaatgattgatggcgcggcgctaccgttcgaagaaaatattgcatttacccgagaagccgtcgatttctgtaaatcatttggtgttcccgtcgaagcggaattaggcgctattctgggtaaggaagatgatcatgtcagcgaggctgactgcaaaactgaacctgagaaggttcagcgctttgttgaggagacagggtgcgacatgctggcagtgtcaattggtaatgtacatggtcttgaagatatcccacgcattgatatcccgctattacaacgcatcgcgtctgtcagtccggtacctttggttattcatggaggttctggtattgacgcggatattcttcgtagctttgttaattacaaagtagccaaagtgaatattgcgagtgatttgcgcaaagcctttattactactgttggtaaggcttgggtaaataataacaacgaggctaatctggcgcgtgtcatggcgaacgcaaaacaggcagttgaggatgatgtttattctaaaattaagatgatgaataaaaatcactcagcattccgcaaagtctcttaa

SEQ ID NO: 372897 - DNA, 1485 bp, Salmonella enterica
atgcctgattaccacgcagcgcttgtcattgacattggcacaactaactgcaaagtcagctgttattcctgtcatgacgtgtcagttctggaagtccgcaagtttccgacgccaacaatatcgtcggacaaaggcgaggtagatttcgatatcgaagcgctgtggcaggcactgcgactggtaatggctgaactggtggcttcagtaccgtttccggtaaaaaatatcagtattgcgagtttcggtgagtctggcgtctttgtggataaggagggcgtcattcttaccccgatgctggcctggtatgatcgacgtggtgaatcttatctctcgtcattaagcaaggcagaggctgaagaactgtattctataacgggattgccacctcacagtaattactcagcatttaaaatgagatggttacttgataactactccttgcatgaaagaaaagatatctgctggttacatgcaccagaagtgttgttgtggcgaatgacaggtgcgaaaaagacggaaatatccctggccagtagaacgttgtgtctggacattgctcgccgtacctggtctcgtaatgctgccgggattctcggcataccgttcggtgtactggctccgttgataaagccaggtgaagtggccggatggatgacggcaacgcttagagaggaattgggcttctctcatgaggtaaaagtcacactcgctggacacgatcatatggtcggtgcccgcgcattacagatgcaaccgggcgatgtgctgaattctaccggcacgacagagggtattttactgctgaatacacagccaacgcttgatgtgcaggctcgcaggaataagctggcaaatggttgttactccgatggtgaatttttcacgcttttcgcttctctgcctgtcggcggttatgcgcttgaatgggtgaaaaaaacctttcgtttaactgataaggaaataagcacaggcctggaaaaagccatggagcaatacctcaaaccttcctggtctgtcgagcatgtgccggtatttattcctcatttgcggggctcgggttcgccaaataaaaatcggcacacccgtggcctgctttttggtctgacggattcacttcctccggagtctctgcttgagagtgtctttatcggcctggcgatggagtttgcacactgtcacgggtgctttaatatcccggcgggcaggacagtaaaagtcattggccctgcggtgaaaaacccatactggctccagttgaaggctgacatcctccagtgtccaattgaggccattgcttttgatgaaaccgtctcccttggagcattgttgatagcctgtccgaatgttgtccccccgactgttcctgtggctgagcgatattttcctgacgcggttcgttctgcaaagttgaaaatatatcagcagcaatggctgtcattttatcaatttaaactgcggcaagaaggggcgcttattggtgaataa

SEQ ID NO: 372898 - DNA, 1359 bp, Salmonella enterica
atgaatgatatagcacatactctctataccgttgtgcaatatgtcctgggatttggcccaacggttttattgccgctggtcctttttttcctggcattgttcttcaaagtaaaacccgctaaagcacttcgctcatcgttaattgtcggaatagggtttgtcggaatttatgccatctttgacatacttaccagcaacgtaggcccggctgcacaggcaatggttgagcgaactggtattagtcttcctgttgtcgatttaggctggccaccattggccgcaattacctggggctcaccaatcgcaccctttgtcattccgctgacgatgctgattaatgtcgccatgctggctctgaataagacacgtactgttgatgtcgacatgtggaactactggcactttgccctggctggaacgctggtttactacagcacagggagttttgttttgggtctgtccgcagccgctattgccgcgatcgtggttctcaaactggcggactggtctgcgccattagtggcaaagtacttcggtctggaaggtatttcacttccgaccctgtcatctgtcgtcttctttccgattggattgctgttcgacaaaattatcgacaaaatccctggcgttaaccgtattcatattgatccggaaaacgttcagaaaaaaatgggaatcttcggtgagcctatgatggtgggtactattctgggggtcttgttgggcatcattgccgggtatgactttaaacatatcctattgctggggatcagcattggcggtgtcatgttcattcttccgcgtatggtacgaattttgatggaaggtttattacctctgtctgaagccattaagaaatatttgaatgccaaatatcctggccgtgatgatctctttatcggactggatatcgcggtagcagtaggtaacccagccattatatctacagcactgattctgacacccatctctgtctttattgcattccttcttcctggcaataaagtcctgccactcggagaccttgcgaacctggcagtcatggcttccatgattgtactggcatgtcgtggcaatattttccgggctgtgataaccgcaattcctgttattgtcgccgacttgtggattgcgaccaaaattgcgccatttattaccagtatggctaaggatgtcaatttcaaaatggctgaggggtcaagtggtcaggtatcaagcttccttgatggcggtaaccccttccgtttctggctgcttgaaatattcaacggaaatattattgctatcgggctgattcctgtgcttgcgctgattatttatggtgtttttcgcctgacaaaaggaacggtctatgcctga

SEQ ID NO: 372899 - DNA, 288 bp, Salmonella enterica
atgagtaaaatgatactatttgtttgcgcaacgggtgttgctacttccacggctgtggcagaaaaagtaatggaatattgtaaagacaatgggcttgatgttaattattcccaaactaatgtagcctcattgccaaacaataccgatggtgcagctttggttgtatcaacaacgaaagttccttatgaactggatattccggttgttagtggcctgccaatcattaccggagtaggtgaagataaagttcttgaaaaaatagtttcaatccttaaaggccaagcctga

SEQ ID NO: 372900 - DNA, 474 bp, Salmonella enterica
atgcaggatattcattttcgccgtcattatgttcgccacctccctaaagaggtgagtcagaatgacataatcaaggctcttgccagtccgttaattaacgatggtatggttgtatctgattttgccgatcacgtcattacgcgagaacagaattttccaacgggtctaccggttgagcctgtaggtgtcgctattccacatactgatcacaggtatgttcgccaaaacgccattagcgttggaatactggcagaacccgtcaatttcgaagatatgggcggggaaccagatcccgtacctgtcagggtggtgtttatgcttgctttaggtgaaagcaataagcagctcaacgtactgggttggattatggatgtgatccaggatgaggattttatgcagcagttactggtcatgaatgatgatgaaatttatcagtcaatttacacacgcatatctgaaagaggtgaagtatga

SEQ ID NO: 372901 - DNA, 744 bp, Salmonella enterica
atgaaaacattgagtaaaagttcacacatcccactgtatcaacaggttgtggagtggataagggaaagtatttatagcggagaattggttgaggatgaccggataccttcagagtttcaaatcatggatatgctggaggtgagtcgcggtaccgttaaaaaagcggttgaccaacttgtccgggaaggtgttcttgtgcaagtgcagggtaaaggaactttcgtaaagaaggaaaatgttgcttacccactgggtgaaggtttgctctcctttgctgaagccttagccagccagaagataaacttcacaaccagtgttataacctcccgactggagcccgctaaccgctttgtagcagagaaactgagtatcaaaccgggacaagatgttttatttcttaaacgccttcgttgtattggcgatgaaaaagtcatgttgattgaaaatcgtatcaacattgatctctgccccggtattattgatgtagattttaccagggagaatttattttcagcaatagaaagattatctgataagaaaataagtttttctgaaagccgttacgcagctaaattaattggtaatgagcgaggccattatcttgatattggtgaagacgcacctgttttgcatttggaacagttggtatttttctctagaggattggccattgattttggtaacgtctggttaaaaggtaataaatattatcttggcactattttacagcgcctggatgcctga

SEQ ID NO: 372902 - DNA, 1329 bp, Salmonella enterica
atgctttcgtttttaaaagccccggccaacgcgccgctcatcaccgataagcacgaggttgacgcccgctatcgctactggcggcggcacatcctgatcaccatttggttgggttacgcgctgttctatttcacccgtaaaagctttaacgccgccgcgccggaaatccttgctagcggcattctgtcccgcagcgatatcggcctgctggcgacgctgttttacatcacctacggggtgtcgaaatttgtctccggcatcgttagcgatcgctctaacgctcgctattttatgggcatcgggctgattgcgaccggcgtagtgaatattctgttcggcttctcgacctcgctgtgggcctttgctctgctatgggcgctgaacgcctttttccaggggtttggatcgccggtttgcgcccgtttgctgaccgcctggtactcgcgtaccgagcgcggcggctggtgggcgttatggaacaccgcgcacaatgtcggcggggcgctgatccctctcgttatggccgctgtcgccctgcattatggctggcgcgtcggaatgatggtggccgggttgcttgccatcggggtgggcatggtcctctgctggcggctgcgcgaccgtccgcaggcgattggtttaccgccggtaggcgactggcggcacgatgcgctggaggtcgcccaacagcaagagggcgcggggctaagtcgcaaagaaatcctcgctaaatatgtgctgttgaatccctatatctggctgctttcgctatgttatgtcttagtgtacgtggtgcgcgcggcgatcaacgactggggcaacctgtatatgtccgagacgctgggcgtggatttggtcacggccaacacggcagtatcgatgtttgagctgggtggatttatcggcgcgctggtggcgggctggggctcggacaaactcttcaacggcaaccgcggaccgatgaatttaatcttcgctgccgggattctgctctctgtgggttcgctgtggctgatgccgttcgccagctacgtgatgcaggcggcctgtttcttcaccaccggtttctttgtcttcggcccgcagatgctcattggcatggcggcggcggagtgctcgcataaagaggcggcgggcgcggccaccggctttgtcggcctgttcgcctatctcggcgcgtcgctttccggctggccgttagcgaaagtgctggagatctggcactggaccggtttttttgcggtcatcgccatcgcggcggggatctccgcgctattgctgttgccatttctgaacgctcaggccccgcgcgagaccagcgaagcgtga

SEQ ID NO: 372903 - DNA, 1317 bp, Salmonella enterica
atgaacgataaaaacatcgttcagatgcccgacgggtatctgaataagacacctctgttccagtttattttgttatcctgtttattcccattatggggatgcgcagccgcgttaaatgatattctgattacgcaatttaaaagtgtattttcgctgagcaactttgcttcggcattagtacaaagcgccttttatggcggttattttttaattgctattccggcctcgctggtcattaaaaaaaccagttataaagtggcgatacttatcggcctgacgctatacattgtcggctgtacgctctttttcccggcgtcgcacatggcgacctacaccatgttcctcgcggcgattttcgccattgcgattggcctgagtttcctggaaacggcggcgaacacctacagttcgatgatcgggccgaaagcctacgccacgctgcggctgaatatcagccagaccttttatccgatcggcgcggcggcaggcattttattgggtaagtatctggtcttttccgaaggggaaagcctggaaaaacagatggcgggcatgaatgccgagcaagtccacaacttcaaggtgctgatgctggaaaacactctggaaccctataagtacatgattatggttctggtagtggtgatggtactgttcctgctgacgcgtttcccgacctgtaaagtcgcgcaaaccgcgagtcataaacgcccctcggcgctggatacgttacgctatctcgccagcaacgcccgtttccgtcgcggtattgtggcgcagttcctgtatgtgggaatgcaggtggcggtctggtcgttcactatccgtctggcgctggagttaggcgatatcaatgagcgcgatgcctcaacctttatggtctacagcttcgcctgcttttttatcggcaagtttatcgccaacattctgatgacacgctttaacccggaaaaagtcctgatcctttactccgttatcggcgcgctgttcctggcctatgtagcgctggcgcccagctttagcgcggtatacgtggcggtgctggtcagtgttctgtttggcccctgctgggcgaccatttatgccggaacgctcgataccgtcgataacgagcataccgaaatggcgggggcggtgatcgtgatggcgattgtcggcgcggcggtggttcccgcgattcagggctacgtggcggacatgttccactcgctacagctctcattcctggtttccatgctgtgctttgtttacgttggcgtttacttctggcgcgaaagcaaagtgcgcggcaacctggctgaagtcgccgcgtcctga

SEQ ID NO: 372904 - DNA, 2025 bp, Salmonella enterica
atgcgtttaaatcccggccaacaacacgctgtcgaattcgtcaccggaccctgcctggtgctggcaggagcgggttctggtaaaactcgcgtaattaccaataaaatcgcccacctgatccgcggatgcggctatcaggcccggcatattgcggcggtgacgtttaccaacaaggcagcgcgcgaaatgaaagaacgcgtcgggcagacgctcggccgtaaggaagcgcgcggtttgatgatctccacctttcatacgctagggctggatattattaagcgcgagtacgctgcgctggggatgaaatcgaacttttcattgtttgacgataccgaccaggtcgccttgctcaaagagctgaccgaaggcctgatcgaagacgacaaggttctgttgcaacagctgatctccacgatctccaactggaaaaacgatctcaaaacgcctgcacaggcagcggcgggggcgaaaggtgaacgcgatcgtatttttgcccactgctacgggctttacgacgcccatatgaaggcatgtaacgttctcgattttgatgatttgattttgctgccgacgctgctgctgcaacgcaatgacgaggtgcgcgagcgctggcagaataaaattcgttatctgctggtggatgaatatcaggatactaacaccagccagtatgagttggttaagctgctggtcgggcaacgcgcgcgctttacggtcgtaggcgatgacgatcagtctatctactcctggcgcggggcgcgtccgcaaaacctggtgttactgagccaggattttccggcgctgcaggtgattaagctggagcaaaactatcgttcttcgggccgcatcctgaaagcggcgaatattctcatcgccaacaatccgcacgtctttgaaaagcgcctcttttccgagctcggttacggcgcggaactcaaagtgttaagcgcaaacaatgaagagcatgaagctgagcgcgttaccggcgaactgattgcccatcactttgtgaacaagacccagtacaaggattacgccattctgtatcgcgggaatcatcagtcgcgggtatttgaaaaattcctcatgcagaaccgcattccgtacaaaatttccggcggcacctcattcttctcccgtccggagattaaagacctgctggcctacctgcgggtgttgaccaacccggatgatgacagcgctttcctgcgcatcgtgaatacgccaaaacgcgaaatcggtccggccactctacaaaagctgggtgaatgggcaatgacgcgtaataaaagcctgtttaccgccagctttgatatggggcttagccaaaagctgaccgggcgtggttacgattcattgacgcgttttacccactggttgggggaaatccagcgtctggccgaacgcgagcctgtcgccgccgtgcgcgatctcatccacggtattgactatgaatcctggttgtacgaaacctcgccgagccccaaagcggcggaaatgcgtatgaaaaacgttaaccagctctttagctggatgactgagatgctggaaggtaacgaactcgatgagccgatgacgctgacccaggtggttacacgctttacgctgcgcgatatgatggagcgtggcgagagcgaagaagagctggatcaggtacagttgatgacgcttcatgcgtcgaaaggactggaattcccgtatgtctatatggtgggaatggaagaaggatttttgccgcatcaaagcagcattgacgaagataatattgaggaagagcgtcggctggcctatgtcgggatcactcgcgcgcagaaagagctcacctttacattatgtaaagagcgccgtcagtatggggagctggtgcgcccggaacccagtcgcttcttgttagaactgccgcaggatgatttaatctgggagcaggagcgcaaagtggtaagcgctgaggagcgaatgcaaaaagggcaaagtcacctggctaatctgaaagccatgatggcggcaaagcgagcgaaatcgtag

SEQ ID NO: 372905 - DNA, 888 bp, Salmonella enterica
gtggatttacgcgatctaaaaaccttcctgcatctggcggaaagccgccactttggccgcagcgcgcgggcgatgcacgtcagcccctccacgctctcccggcagatccagcggctggaagaagatctcggccagccgctgtttgtgcgtgataaccgcaccgtcacgctgaccgaagcgggtgaagagctgcgagtgtttgcccaacagacgcttttgcaatatcagcagttgcgccataccctcgatcagcaggggccatccctttccggcgaactgcatattttctgctcggtgaccgcggcatacagtcatctgccgccgatcctcgaccgttttcgcgccgaacacccttctgttgaaatcaaattgacgaccggagacgccgccgatgcgatggaaaaggtggtaacgggagaagcggacctggcaatcgccggcaaaccagaaacgctgcctggcgcggtggcgttttcgatgctggagaatctggcagtggtgctgatcgccccggcgctgccctgcccggtgcgcaatcaggtttcggttgataagcccgactggtcgacggtgccgtttatcatggccgatcaggggccggtacgccgccgcattgagctgtggtttcgccgccataaaatcagcaatccgcagatttacgctaccgtcggcggtcacgaagcgatggtctcaatggtggcgctgggctgcggcgtggcgctgctgccggaagtggtgctggaaaacagcccggagccggtgcgcaaccgggtaatgattttagaacgtagtgatgaaaaaacgccgtttgagcttggcgtctgcgcgcaaaaaaagcggctgcatgagccgctaattgatgcgttctggaaaattttaccgaattag

SEQ ID NO: 372906 - DNA, 288 bp, Salmonella enterica
atgcgaaaaattattgttccccgactttccggctggctgattgcctctgtcgtactgtttgcgcttatcggctggacatcatcagcgcaaattccggtcgtcatctataaactcagcctggtttcgttatcagcggtgctgggttactggctcgaccgcagtcttttcccctgggcgcgtcccgactccttttgcccctgggaagaatcgctgtgctgcgccgcggcgatgattcgtcgcgcgatcatcgttgcggcaatttgccttgccgtcgcgctggggctgtaa

SEQ ID NO: 372907 - DNA, 573 bp, Salmonella enterica
atgactttcttgtctgccgacgctgccgaaccgccgcgcgcttctctgcaatggcgaaacgaagtgattcgtaccgcgcgcgaaatctgggggcttaacgcccccgttgcggattttgccgggcaactacatcaggaatccggctgggcgcctgacgcgctttctccggctggcgcgcagggtatggcgcaatttatgcctgcaacggcaaaatgggtgagccagttgtacccggaactccacgaaaacaagccgtttaatcccgcctgggcgatacgcgcgctggtacagtatgaccgccagttgtggaaaagcatgtcagcaaaaaatagctgccagcgaatggctttcactctgagcgcctataacggcgggaaaggctgggttaacagagataaaaagctggccgccgcaaaggggttggatgcgtccatctggtttgaacatgtagaacgcgttaacgccgggcgcagcgccgcaaactggcgcgagaatcgtcactaccccaaagcgattttataccaacatgctccccgttatttgcaatgggggcaggctagctgcattcattaa

SEQ ID NO: 372908 - DNA, 315 bp, Salmonella enterica
atgaaactcagtatcgatttttgggaagtcatctccctcttactttcgtttgttggattaatgtttgccgctggtaaacttctgctggcgcaaattgaaaaacggctgaatgaacgttttgaagcactggaagctgcccggcgcgaatcagaagcgggctggtccaggctggagagagaatttctggaatttcgcgccgatttaccgctgcattatgtccgccgcgaggattatcttcgcggccaggccgttctggaagcaaaactggatgcgctatatagcaaaatagaactgattcaacgaggtaaccattaa

SEQ ID NO: 372909 - DNA, 456 bp, Salmonella enterica
atggaaacattatctgttatacataccgtggcgaatagactacgtgaattaaaccctgatatggatatacatatttcatcaaccgatgcgaaagtatatatcccaacaggacagcaggtaacggtattaattcactactgcggttcggtttttgccgaaccagaaaatacggatgccacagtacaaaaacaactaatccggatttccgccaccgttattgttccgcaaataagtgacgcgataaacgcgctggatcgtctacgtcgctcgttggggggcattgaacttcccgactgtgatcgtccgctctggctggaaagcgaaaaatatatcggcgacgccgcaaacttctgccgttacgccctggatatgaccgccagcaccctgtttatcgcggaacaggaaagcaaggccccccccctgctgacaatcgttaattatgaggaaattcaatga

SEQ ID NO: 372910 - DNA, 198 bp, Salmonella enterica
atgaaatatatctacagtggcccggcaagcggcgtcacgctcgccgacggtcaggaagtcttactgtggcccaatagcgaaatctcgctaccggaagataatgagtgggtgatgacgatggttgcacgccgccatctgacccccgtcgccacggaagaagcaaaaattaacgaagaggaaattgtccatggcagctaa

SEQ ID NO: 372911 - DNA, 1428 bp, Salmonella enterica
atggcagctaattacctgcacggtgtagagaccattgagatcgaaaccggcctacgtccggtgaaggcggttaaatctgcggttattggtctgatcggcaccgcgccatgcggcccggttaaccagccgacgctgtgtctttctgaaagcgacgcggcgcagtttggtccaggtctggcaaatttcaccatcccgcaggcgctgaaggcgatctacgatcacggcgcagggacggtcgtggtgattaacgtgctgaatccggcggtacacaaaagtaccattcccagtgaaaccgtgaaggttgatgacaacggtcagattcaactcaagcacggggccgtgcaaacgatgaacattggccgcagcacgaacgccggaaacgcttatatcaaaggcaccgattacaccattgatatgctgaccggtaaaatcacctgcatggggaccaacctgaaacccggcgttcaggcctatgtaaattatacttacgcggaccccaccaaagtgactgccgccgatattgttggcgcggtaaacacggcgggtgaccgtaccggcatgaagctgttacaggacacctggaaccagtttggtttttacgcaaagatcctgattgcgccggtcttttgtacgcaaaactcggtcgccgttaagcttatcgctcaggcagaagcgctgggagccattacctacattgatgcgcccatcggcacgactttccagcaggttctggcagggcgcggcccgcagggggcgattaacttcaataccagttccgatcgcgcgcgtctgtgctatccgcacgttaaagtgtacgacagcgcgacggacagcgaagtcctggagccgctctcctcccgcgccgctggcctgcgtgccaaagtggatctggaaaaaggcttctggtggagcaactccaatcaggaaattcagggcattaccggcgtagagcgctcgctgtcagcgatgatcgacgatccgcaaagcgaagtgaatcaactgaatgaaaacggcatcaccaccatcttcaacagctatggctccggtttgcgcctgtggggcaaccgtaccgccgcctggccgacggttactcatatgcgtaactttgagaacgtgcgccgtaccggcgatgtaatcaacgaatcgattcgttatttcagccagcagtatatggatatgccgataaaccaggcgctgatcgacgcgctgaccgaatcggtgaacacctggggccgcaagctgattgccgacggcgcgttgttgggctttgaatgctggtacgacccggcgcgtaacgaacagactgaactggcagccgggcatctgttgctgagctacaaattcaccccgccgccgccactggaacgtctgacgtttgaaaccgaaattacctctgaatatttagtttctctggagagcaatcgctaa

SEQ ID NO: 372912 - DNA, 525 bp, Salmonella enterica
atggctggaaaaattcaaattaaccgtattaccaacgccaatatttatctcgatggtaataatcttttaggtcgcgcgagtgaaattaaactgcctgatatcagcatgattatgcaggagcataaagcgctggggatggtaggtaaaattgagctgcctgccggttttgacaaactggaaggtgaaattaaatggaactcgttttaccacgacgtcatgcgtaaaacggcaaatccgtggcaggcggtggcattgcagtgccgctccagcatcgattgttataactcgcagggtaaagcggatcagttagcgctggtgacgcatatgaccgtaatgtttaaaaagaacccgctgggaacgtttaaacagaatgaaaacccggaattcagcagcgccttcggctgcacttatattaaacaggtggttgacggtgaaacgcttcttgaactggattatctggcgaatattttccgcgtaaatggcgcggatcaattaaatgcctaccgcaataatattggcggttaa

SEQ ID NO: 372913 - DNA, 318 bp, Salmonella enterica
atgaacgaaaaatataccctgaaattcccgtttacctccgccgccggggaacgtatcgacgttctgcaattacgtcgcctgaaggtaaaagatatgcgcgccgcgcgacgcgccagcgataaaccggaagagtgggatgagccgctgatggcggctatgaccgggctggtaaccgaagatctggcggaaatggatctgctggactatcaggcattgcagaaacgatttcaggccatgcttagcatggctacagaacccacagcaactgtggcaggcaatggcgctgctggcgaggtggtttcgctttccgcccagtga

SEQ ID NO: 372914 - DNA, 2355 bp, Salmonella enterica
ttggccaacgacattattactcagcttcaggcgcgtaatgagacgttgacgcaggcaatagcccgttacggctcactcaacgccagcacgctgcacacgctcagctttgagcaaacaaaaatcacccggcttacgcaacagctcgctaactccgcccttcgccgggaagagaacgataaacagcgcgccgggttgctggaaaaaacacaaacgttcgccggacaactcggcaagctcctgaacgttgagactcccgactggaagctgccttacgaatttcagggcaacatggtcgatatggcggcgaaaggcggcatggataacaccgcgcgggacgccctgagcctgaatatccgcgactggagccttgatttcaatcaggatcaaaaagatctgcaaagcgccgccgccacgatgatcgaaggcggcgtcagcgcattgcaggatcttagccgctacatgcccgatatcgccaaagccgcaaccgcctcccgcgacagcgcgcaaagctgggcgcaggcggctctggccactcgcgacaaactgaacatcgcccctgacggcttccgttttgcgcaaaatatgctgtacagcgtggcaaaaagcggcggcggctccgttgcagaacaaacccagtggattaacgcctttgccggaaaaaccggcgctcaggggaaagaaggcattgcggagctgaccgcaacgatgcaaatcgccatgaaaaacgcccctgacgcaggcgcggcggcagcgaatttcgaccatttcctgaaatctaccttctcaaaagagacggacagttggtttgcccgtcagggcatggatcttcagggatcgctgctggaacatcagcaaaacgggatcgacgtgacggaagcgatgacccacatcgtgcagatgcaactggagaaaatgaacccgcagatcctcgacaccttcaggcaaaccatgaagattgaggatctttccgcgcgcggcgacgcgctacaggccatggcggagaaatttaacctcggcgcgatgttcggcgatgcgcaaacgcgggattttctcgccccgatgctggcgaatatggtcgaatatcgccagctaaaagcctccgcaatgcaggcggcggggcaacattttatcgatgatgacttcgccgtgaaaatgacatcgcccggagaacagaccaaagcgttacaactttcacttaacgatctgtggctgaccgtcggtatggagctgatgcccgccattggcgaactggcgcaaagcatctcgccgctggtgcggcagttcagcgcctggctgcgggaaaatccggcgctggtgcaaggggtcgctaaagtcgttggcgttatctggctgttcaacggggcgctgaatattctcaggctgggagcaaacctcattgcgtcaccgtttattcgcctgatcgatatcttcctgaaggtcaaagccggtctggcgctgggcggcggcagtcgcgcgctgtcggttctgaaatcgtttggcaacggtgcgaaaagcctgacgatgctgctgggaaacggcctgataaaagggctacggctggtcggccagacgtttatctggctgggtcgggcgctgctgatgaaccctgtcggcctgactatcaccgctatcgcaggcgccgcatacttactttatcgctactgggaaccgatttccggtttctttgccggagtctgggagcgtatcaaaaccgcctttgacggaggcattgcaggcgtcacgcgtctgattctcgactggtcgccgctggggctgttttaccgcgccttcgccagcgtactggactggtttggcattgaactccccgccagcttcagcgaatttggcggcaatattctggatagcctgatcaacggcattctgaatgcgcttcctttcctgaacggggcgattgagaagataaaagcgctgatccccgactgggcgaaaagcgcgctgggcatcagcgctgaaatgccgtctgtcgccgccgccgtccccggtattgccggaacaatggtcgcgcaacaggccggcgcgccgctggcatcgggagcgaaagcggtgacaacctcggccaaaacgatgacctcgccgcagccaatgaagacgaaaagcgccgccacgccgccgacgccagccgcgcttcccggcaaatccggcgggaaaccttatatgctgccctcccgcgcgcaaagcaacgtgcaggtacacttttccccgcaggttaccgtgcagggaagcggcgcgaatgccgctaaagatatcaacaacgtgctgtcgctgagcaaacgcgagctggagagaatgattaacgatgtcatggcgcaacaacggcgccgggagtacgcataa

SEQ ID NO: 372915 - DNA, 954 bp, Salmonella enterica
atgtatgccgtattaggcgaaatagaatttgacgtcgtcgcttactgggacgaatttgaaagcacgatgggcgtggattataccagccatgcccgtattgaagggaaaccgggcgtgcaatttatcggcgataagctggacaaaattaccctgaaattcaactttcatagtcagtattgccagccgaccaccgagctgaaccgtctgcgggaagcgatgaccgcgcaccaggcgatggcgctggtgttcggcaacggcgattatcgcggctggttcgtgattaccgatctgaccgctacccaccagcacaccgatccttacggtaacgtcattgcccagggcggcagtctgtcgctacaggagtacaccggcgatccgaagagcccgctgctgcctccggccatcaccacccaggaaccgaacattgacgagatgttggatgagcttcccgacgttagcgattcctggttcgatgaactgctgagcgctgttgaagagggtatgcgtgaagccaaagagatgatggatgaggtggccgacgccattgatgacatcaaaaaaacgatcgcccaggcgaaagagctggtgaaggaagccaaagcgctgaaagaaaaatgcggcgatattgtcgattcgctgaaaaaaaccattagcgcgatagacgcgctgttccagcagccgctggatttgcaaacgctggccgggctgccgaaagcgctggcggcgaaaatgcaggaactgatcgacagcctgccggggatccgcgaatgcgcgggcgatgccggcacgcttattgaacacgccgaatcgctgtttgacgctatcaccagcagcgtcgcggaagcgacttacgacagcgccgcgacgctggtcaatcaggcgcgcggcacgctgcaaacaagcgctcctgacgtgagccagcttgccgctgccgatattacgaggagtctgtaa

SEQ ID NO: 372916 - DNA, 210 bp, Salmonella enterica
atgcgctaccttgaacatgtcaccaccgacggcgaacgctgggataatctcgcctggcgctattacggcgatgcgctggcctacgaacgcatcatcgcggccaatccgcacgtcgctattatgccggttttaccgtcaggcgcgcggctgatcatcccggttatcagcgtcacgcaaacgaccccggagctaccgccatggctgagataa

SEQ ID NO: 372917 - DNA, 1044 bp, Salmonella enterica
atggctgagataacggtatccggcggggtgttcgccaccctgacgcccatttttaccctttggtacggacataaagagatcacttacgacatcgcgccttacgtcaccagcatcagttacagcgacagcattaaaaacgagtcggatgtcattgccattgcgctggaagatagcgccgggcgctgggtaaacgaatggtatccgggaaaaggcgacacgctggcgctgcgcctgggctaccagggcgaagatctgctcgattgcggaatctatgtcattgataaaattgatatcagcgcgccgccttcgacggtcaatatcgacggtatcgccacctcggtcagcaaagcgctacgcaccaaaaacagccagggctttgaggagacgacgctttacgccatcgccagtcgcatcgcgcaaaaacacggtttaacgctggtgggcaagattgcgccgctgacgattgatcgggtcacgcaatatgccgaaaccgatgtggcgtttctcaaacggctggcgagtgaatatggctataccgtgaaagtgacggcgacggagctgatcttttcgcatctgccgacgctacgctgtctggcgccggtgaagacgctcaggcggacggatatttcgcactacacgttcaaagataccatcaaccggatctacaaaaacgccaccgtgcaacatcaaaatagcaagcaaaaagaactggttatctacacccatgacagccaggaaaaagccccggcgcgcggtgcggcgaccagcgccgatatcctgaagattaacagtcgcgctccggataccggcgcggcgcaggctaaagccaatgccgcgctggacagccacaacgaataccagcaaaccggcacgctcagcatgatgggctgcccgcagttgacggcgggcaacaagatagaactgagcgattttggcgtactttccgggcagtggctgattgataaatccatgcacaaactcacgcgcagcggcggctacactaccgaaatcgacatttcacgcggaccggcaaccagccagtaa

SEQ ID NO: 372918 - DNA, 723 bp, Salmonella enterica
atgaaaggcgttacccgccagacgggcattatcagcgatattgatgaggcggtcgtgcgcgtcagagtcactctaccggagtgcgataacctgcgcagtaactggcttgcggtgctgcaacgcaatacgcaggacaacaaagattactggttgccggatattggcgaacaggtcgaagtgctgctcgacgacaacggcgaggatggcgtggtgctgggcgcggtctactccagcgtggataccgcgccgctggcctcgcgcgacaagcgctacgtgcagttttccgacggcgcggcctttgaatatgaccgtgcgttacaccagctcaccgtcaacggcggcatagaaaaaatcgtcattgaagtgaaggaacgtacgcagcttacttcaccgcaagtagaggtcagggcgcagcacgtcacggtgatatcagaaaccgtagacgtggcggccacctccgtgggcgtcaaggcggtagatgtcaacgtggaagcgccccatacgggcattaaagcgctgaatgtcaccgtcgatgcgccgctcagcacctttaccggcgacgttaccgtgatgaaaaaactcacctggcttggcggtatggcaggcagcggcggcgtcggaaacagcgcggttatcacgggcaacgtgaatgtcctcggcaacgttaacgccagcggcacgctgatggacaacggcggcaactctaaccaccactctcactaa

SEQ ID NO: 372919 - DNA, 930 bp, Salmonella enterica
atgaaaatttcattagtggttcccgtctttaatgaagaggacgcgatccctattttctataaaacggtcagagaatacagttcacttaaaccttataacgttgagattatcttcgttaatgatgggagtcacgatgcgactgaatcaatcatcagcgcattagctgttgccgatcctcttgttgttccgatctcatttacccgcaattttggtaaagaacctgcactttttgccggattggattacgcgaccggagatgtggtgatccctatcgatgttgatttacaagatcccatcgaagtaatcccacatttgatcaataaatggcaggctggtgcagaaatggtgctggctaagcgtatcgatcgttcaacggatggccacctgaagcgtaaaagcgctgagtggttctacaggctgcataacaaaatcagtacgccaaagattgaagagaatgtcggtgattttcgattgatgtcgcgcgagattgtagaaaatatcaagctattaccagaacgtaaccttttcatgaaaggtatactttcatgggttggaggtcaaacagatgttgtcgaatatgcccgtgctgaacgtgtcgcaggtagctcaaaatttaatggctggaaactctggaacctggcgctggaggggattacaagtttttctactttccctttgcgtatctggacgtatataggagtgagcgtttctgccctctccctgatatatgccatgtggatgatcattgataaattgatgtggggaaaccctgttcctggttatccttcgcttatgaccgcgattctcttcttaggcggcatccagcttatcggcataggcatcatgggtgaatatatcggacgcgtttacacggaggtgaagcaaagaccccgctatatcgtgaaaaacaaaaaaacaatgatggaataa

SEQ ID NO: 372920 - DNA, 1548 bp, Salmonella enterica
atgattactatgctcaagatattaccgaaaacggcgatgatactactggcttttttggccatttttcttattgaatggtatacccccattcactctgatgattaccgctattaccttttaggaatttcgccggaatcacattttcatcattatatgacctggagtggcaggattatagctgattacaccagcgcactcatcctgtatacacgttctcaactcgtgtattccatcagcgctgccgtttcgacactggtattttgttatttcattgtgaagacaccctcaggcacattacgctggaataaatccgactacttattattcccactaatattcttcacttactggatttcgaacccgaatttgggtcaaaccactttctggatcgttggtgctgcgaattatttgtggacgaatctgttcgttgttgcatggctgttcttcttttacaccataacaataaaaaacagtaaagcgatcagcccgtgggttgcattactaagctttatggcaggctgttccaatgaaagcgtctcacctttcgtctcgcttatttctgttctggccattgcatacgagttatggcaaaacaaatctgtttcgcgcaataagatagtttatagtctctgtgcaatcgcaggctcatgcgtattgatactttctccgggcaatttcatccgcgccagcggaaaagaattctggtatggaaggccgatttttgaacgtattttcattcacttaacagaacgcgttcataaccatctggcgctgatctggatagcttatgttgttttgttattgctggtcttactggtcatattcaataagcagattcgcgccaaaattgataaaacgtcccttatctgcgctgcgttagtcgtatgtataggtattggcacttccttaatcatgttcgcgtcgccgtcctaccccgatcgggttatgaacggtacgtttatgtttttccttttagctatctccttcatcgcttacgccctgttgaaaagcggcgttaaggctggagtcgtcggcgtaactgccgtgactgttctctgtggtatcgtattcctttggtcctattcattgatgcttaacggttataaaaaaacggccggacaggaaatcgtaagacaaaaaatcattactaaagaaatagcggcaggtaaacagaagtttatcatccctgactattatttcgtcaagttgcaaaatagcggtggtcattttggtttattccatgatcctgctgtttacggcgagtattatcatgtacaagctattttcaaaaagaaagtcaattttgattattctgtaatcgctaatggagcgaagcacagcctttccaatgaaacgacggcttatagcaacacccgcggggatttcgctattatcagccgggagcagctaacgggttcgatcacactctcggttaatggacggcagaaaacgattccagttgaaaaaatgaagcacgcagaaatcaatgatgaattctggtactacgcttctgtaggcaaaggtgaaattacagcaatttcattttaa

SEQ ID NO: 372921 - DNA, 360 bp, Salmonella enterica
atgaacacgaaaacacgcccctcgaccctgcactggcaacctgccttgcaacgtcctgaagaatacgtctgcgggctggatgatattcatcaggcaatacacatcattctgcgcacgccgcgcggcagcgatccccacaggccgctttttggcagcaatctgtggcgctatatcgattacccgatcgagcgggccattccgcacgttgttcgggagtcggtggaagcgattcgcatgtgggaaccccgctgccggttgctgaaggtgacgccgacgattgacggcgaacacctgacgttacgcgtgcaatggcgcgccgcagacggcgtaatcaactcaacggaggtgttatggcgatag

SEQ ID NO: 372922 - DNA, 1116 bp, Salmonella enterica
atggcgatagccgaacccgactttattgaccgcgatcccgcgcaaatcaccagcgagatgattgcgcaatatgaagaagccagcggtaaaaaactctatccggcgcaggctgagcggctgctcattgacctgtttgcttatcgtgaaaaccttgtccgcatcgccatccaggaggcagcgaagcaaaacctggtcgcgtattcccgtgcgccgatgctggattatttaggcgagctggttggcgttcaccgtctgcccgctcaggcggcaaaaaccacgctgcagttttctgttactcaagcggctaaaagtaacctggtgattccacagggtacccgcgccagcgcgtcggatagcgtgatgttcgccaccgacgaagatgttctgttgcctgcgggcagcctgagcgttgcggtaactgcaacctgtgtagcaaccggtgaatccggcaataactggcaacctgcgcaaatcagcgcgctggtggatcgggtgggcaattacgatatcagcgtcaccaatctgacggcctcaagtggcggctgcggcgaagagaacgacgacgcgctacgtaaacgcatccagctagcgccggaaagtttcagcaacgcgggcagctatggcgcctatcgcttccatacgctctcggtcagccagtcgattatcgacgtggcagtgctggggccggatgaagggctggcggaaggctgcgtggaactctatccgctgaccctgaacggtctgccggggccagagcttcttgcccagatcgaacgggaggtgagcaaagagaaaaagcgcccgctaaccgataaggtgagcgctaaatgttctccgcgcgtggcttatcagatccgcgcccggttgacgctgtttaccaccgccgatcaggagacgacgcttgccgccgcgcgtgaagcgattaatacatggacgcgctcgcgccagacccggctgggccaggacattgtgccaaaccagataattaaagtgctacaagtggatggcgtttacgacgtcgcgctggatatgcccgcgaaaaaggtattgcaggcgcacgaatgggcggaatgtacggctattgacgtgacgattgccggagtcagcgatggataa

SEQ ID NO: 372923 - DNA, 633 bp, Salmonella enterica
atggataaactgcttctgccgccgccgctggccagcgacgaacgtttctcggttctggcaaatattgccgccgaacgctttgcgcaaatcgacctgacggcgttgctggtctatctggtggatatcgttgatgcctcggcactgccctcgttggccggacagtttcatgttcaggggctggagggctggctatttgccgccaatgaacaggagaaacgagagttaattaaacaggcgattgaactgcataaatataaaggaactccctgggccgttcgccgtgtactggaaatattatccttacccggcacgatttccgaatggtttgagtatggcggtaaagcttatttcttcaaggttgaaattaagctaatcaatcagggcatggatgaaaatctgtttaataatctggtcgatcttattcatgagtataagaacgtgcgctcaaagctggaagcgttaattgtctggataattaaccaaagcgctattcctgttatcggcagcgcgctttacggtggagaaataacgaccgtcttacccttccaggttctggaagttcaacaaactaaaccgttctatttcggtacagggcaatggagccttgaaattacatctatttacccggagtaa

SEQ ID NO: 372924 - DNA, 1755 bp, Salmonella enterica
atggataatgagttttataccctcctgaccgacaggggaatggcgaaaatcgccagcgcccttgcggacaaaaaacagctacatctgcaaaagatggcggttggcgacggcggcggacaatattatgagcccaccgccagccagaccaatttacgccacgaagtctggcgcggcgagatgaatacgctgaccgttgcaccgaataatcccaactggctgattgccgaactggtgctgccggaggacgttggcggctggtatgtgcgtgaagtgggcgtgttcgacgacgagggcgagctaatcgccatcggcaaattcccggaatcttacaaaccgctgttgcccggcggctgcggcaagcaggtctgtatccgcctgattatggaggtctccaacaccacggcggtgacgctgacggtcgatccgagcattgtgctggcgacgcgcgactatgtggatgtccggctggacgagcatgaacattcgacaaatcacccggatgcgacattaacgcagaaagggtttacgcagctcagtaacgccaccgacagcgatgacgagaccaaagcggctacgccaaaggcggtaaaagcggcgatggcggaagcgcgtaatcacacgcatacctggaaccagattaccggcgttccggacggtacgctgacgcaaaaggggattgttaagcttaacagtgcgacggacagcaccagcacaacggaagcggcaacgccgagcgcggtaaaggcggcgatggataaggcgaatgcggcagctccggcgaaccatactcacgtctggaaccaggttaccggtgtcccggacggcacgctggcgcaaaaagggattgtgaagcttaataacgccaccgatagcaccagcaccaccgaagcggcaacgcccagtgcggtcaaggcggcgatggataaggcgagtgcggcggctccggctaggcatacacacgcttgggggcagatcaccggcgccccggacggtacgctgacgcaaaaagggatcgtgaagcttaataacgccaccggcagcaccagtacgacggaggcggcgacgcccagtgcggtaaaggcggcgtatgacaaggcgagcgcagcggctccggctaatcattcccattatcagttttttaccgttaatggcacgtttattgtgcctgatggggttaatcgagtttttgttgaagttgttggtggcggtggtggtggtggtggaggttcattagcaaatgaggagtgttccactgggggtattgctgccaagtgtgtggctggttacgttgatgttgttcccaaaagtcagatacctgtaatggttggtgctggcggtagtggcggtgcaaaagggagtcgttcacaaagaaaagggtttagcgggaacgctggaggacaatcctcctttggcaatctgaacgcgcctggtggtgcgggaggggcggccgggggcacaggaggaaatacaataagctttttacctccaagtgggaatggaggagcacgtatgtatgaatacgtgacccttgggctgagaggaagtaattccgtcctgggcataggaggggtaccaggaacggtcacattagatcacttagagatagtggcaggctcattaccctctaatgcaagcgggtttggtgccggtggtgctggtggtagttccagtgccagtaaccgggagtatctgggggattgggtccttaataaggggtcaagtggttctcctggtatcgtcagaatttattggtga

SEQ ID NO: 372925 - DNA, 615 bp, Salmonella enterica
atgtcaaaatatgcttattacgatcctgcatctttacaagtgctagactggatggatactgaattattctgttatccagagagaacaagccttatcgaattaacagagcaacaatggctggaacatttcaacctggggcaatatgtatgggttaatgttaaagacagagcatttatcaccaatttaccaccaggggaatgttatcgattaaacggcaatacgtgggtttatgacgcagccagttttgccatcgtgcttgataacgctaaatcacgggttaaacaggcaataaaagtacggcgtgatgaagtcacggctgactatatcgttattgatgattatcacttccacagtgacgccagtagccgtattcagcaaatgtcactcaccagaatgggtcaggcacagcagattccggcagggttaatgtggcagaccaaaaataacggtttgattgaactgaccaacgacatcgccgcgcagtttgaaaccgtcactatggatcacgacatgcgcctgtttgccaacgcgcagcggcatattgcggcggtagaagcgctgggggatatagaggctgtgctcgactacgactattcatcaggctggcagccatga

SEQ ID NO: 372926 - DNA, 456 bp, Salmonella enterica
atgagtcaaaccaccgtctggctcgcttgctataaggggcgatcggagtatcgcggcatcgccaggtttgccgactggctcacgcgcaaggtcacgcgcggtatctactctcactgtgaactggcggtggcgcacggcggtaatgaatacctctgctactctgcatcgtttcgcgatcgcggcgtgcggggaaagataataccgttaccggacgataagtgggataagctaccgttaaaggccacgttgccggaagtggaggcctttttccgcaaacataacggcaaacgctatgactggcagggcgcgctcggtatcgcgctgtataaccgggagcgcaaagataaactgttttgcagcgagttttgcgctgaatttctcggactaaacgatagctggcgctactcccccagccacctttatgccttagtcagtagctggcaatacgattgttga

SEQ ID NO: 372927 - DNA, 942 bp, Salmonella enterica
atgctcgccgtcattacccggctgttcccgttatgggcgctgctgctctctctcattgcgtattacacaccatccacctttactcctgttgggccgtgggtcgcgacactactgatgttgattatgttcggtatgggggtccatcttaacgttgacgactttaaacgcgtgctctcccgaccagcccctgtcgccgcagggatattcctgcactatctggtaatgccgcttgcggcatggctgctggcgttgctgtttaagatgccgccagatctgtccgccgggatggtactggtcggcagcgtagccagcggcaccgcctctaacgtaatgatctatctggcgaagggagacgtcgcgctctcagtcaccatttcatcggtctccacgctggtcggcgtggtcgccacaccactactcacgcgcctgtacgtcgatgcccatattcaagtcgacgtgatgggtatgctgctgagcattctacagattgtggtcattccaatcacgctggggctggtgattcaccatctgtttccgcgcgtagtgaaagtggtaaaaccttatctgccagcattctcgatggtgtgcattttggcaatcatcagcgcggtggtcgcgggttcagcttcacatatcgcctccgtcggctttatggtgatcatcgcggtgatcctgcataacacccttggcctgcttggcggctactggggtggacgtctgttcggttttgatgagtcaacctgtcgaacgctggcgatcgaagtcgggatgcagaactctggtcttgctgctgcattgggtaaaatctactttggcccgctcgcagcgctgcctggcgcgctgttctcagtgtggcacaacctttcagggtcactactggctggttactggtccgggaaaccgattgttgaaaaatcgggcgaaacggcaaaggtaaattaa

SEQ ID NO: 372928 - DNA, 1263 bp, Salmonella enterica
atgtcgatggcccttaccgcccccccaaccaggaaaagatttttaatcgttgcctgtctgtttattggaatatttattgcttatctcgatcgcgttaatgtttcggtattagccgcgaatgaacccttcttagcctatatgggtattgaaggtatgccattgcaaatcggcatgatgatgaccgtctttctggccgcttatggtatcgctaacgttgtattatcaccgcttggtgattatctcggccccagaaaagcaatgatgctttgtattctgatctggactatcgctttaatgattggcggagtcgctacatcattcgctctaattattatttgccgtatattactgggcatcggagagggattttattatccactgcaaagcgtatttattaaaaactggttcccgaagcaggaacgcggcagagcaaacgcggcgtggatcgtcggccagtcagtcgctcccgccattgcgatgccttttttcacctggtggataggcacccacggctggcgctccaacttctttttatgcgccgctctcgggttaatccctctttggctactttggcgatatgttgctgataaaccagaacaacataaaagtatcagcgaacaagaactggcttatatcaaagctggacaggaaacggaaagcgcaggcaacagcgaaagttttatgttgcgggtcaaaccggtgattaccaactacagctattggctgctggtgctgtggtatctgtgtctgcaatgtttatattggggaatgattacctggctaccgacctatctaaaatcagccagaggtttcagttgggcggaaatgggttggctggcgtcgcttccctttgtcctgtcgatatttgccaaagcggccgcaggcgtcttcgtcgataaaataggacgcagcgcccccatattaatggtattaatgtttttcgctggcgtcagtatctatttcggtaccataaccgaacataaatatatgtcagcagtactcctctcctttgctgtggctttctgtacgatgggcacccccgttgcctggacgttattacagggaatgataccaggaaaatccatatccgccgccagcggcgtaatgaacggcgtcgccaatggactctcttcattatctcctgtatttatcggcttatttatttctatcactggaacttataccggcggcttactatgcctggtttttatcagcgctatcgccgtggtatcggcattaatcttaacgattaaaaaatattaa

SEQ ID NO: 372929 - DNA, 813 bp, Salmonella enterica
atggctatcaaacttattgctatcgacatggatggcacccttctgctgcccgatcacaccatttctccggcggttaaaaacgcgattgccgctgcgcgtgaaaaaggggtaaatgtggtgctgaccacaggccgtccgtatgcgggtgtgcacagttacctgaaagaacttcacatggaacagcccggcgattattgcatcacctataacggggcgctggtgcagaaagcaggggacggcagtacggttgcgcaaacggcgctcagctatgatgactaccgttacctggaaaaactgtcccgtgaggtgggttctcacttccacgcattagaccgaaatacgctttataccgctaaccgcgatatcagctactacacggtgcatgagtcgtatgtggcgaccattccgctggtattttgtgaagcggagaagatggacccgaacacccagttcctgaaagttatgatgatcgatgagcctgccgttctcgaccgggcgattgcgcgtataccggcagaggtgaaggaaaagtacaccgtgctgaaaagtgcgccgtacttccttgaaatcctcgataaacgggttaataaaggcaccggcgtaaaatcactggccgaggcgctgggtattaagccagaggaggtgatggcgattggcgatcaggaaaacgacattgcgatgatcgaatacgccggcatgggcgtggcaatggacaacgccattccgtcggtcaaagaggtggctaactttgtgactaaatcgaaccttgaagatggtgttgcctgggcgattgaacaacatgttctgtcctga

SEQ ID NO: 372930 - DNA, 1023 bp, Salmonella enterica
atgaaaaaacgctcccttttgctgttggcgctgcccgctatggctttttctacctgggcggctaccagccccccggcgaacctgtcgcctgtttatagctatcaggatgacgtcccatctgctgccacaccgccagtcgcgacaacgccggtggcaaagcctgccagtacatcagtgttgccttttctgggtgatgaagcccgaaagcgtggctatgagcttcccgagccatttggcctcaatattaactacatgaatattgggcagaatattaacgttgatagcatcaactttaatggcctggctttaggttccaacgggggaattccattagataacgcatttaaaattaacgtcggtcatacccgtgaaaagagcaagaccgaaacggtcaagctggatgcctggctgctgccatttatgaatgtgtacggcctggtgggctataccgatggtcattccatttcgcaaattggtgttgggttgatgacgaaaaatggccacgtttttcatcccgccgatctgcaaaacctcaagtttaaactcgactttaaaggcactacctatggcatcggcaccacgctggtcggcggcgtaggtaactggtttaccgctgttgatgctaactacacccagacacagttcgatattcttgatggcagcatcgacgcctttaccgtctcacctcgcgttggttaccgttttaccaccccgggtatagataagatgcatctgccgtcgggcaagctaaacgtctgggtcggcagcatgtatcaggatgtgcagcaggagtttaaaggcagcctcgacgacctgaccatgccgtcagcgacgctacaaaggctggtgagtatggctaactataacaataacggccgctttgacgtcaaacagcatctacaatcaccgtggaacatgctgctgggcgctcagtatgaaataacccgccatttcaacgttaccaccgagtttggctttgccgagcgcaatagcttctttgtggccggtgagtaccgcttttga

SEQ ID NO: 372931 - DNA, 1140 bp, Salmonella enterica
ttgaaccgctgccattgccgactgttgctttgcgtcgctggtgtgctgtccggcgtggcgcaggcggcgctgcccagccgcagtcaggtggacggctggctacaacaaatgggggatagcgatacttacgatgccgccaaaggcgtcaactggggagtaatgcccgggccattttatacccctgaactggggctgggcatcggcaccgccatcgtcggtatgtatcgccccgatcctgccgataaggttagccaggtatccacgctgtcgctgagcggctatttcagctccacaggcgcttttggcgtaagcctgcaaaattacgcttttttcgcgcaagatcgctggcgtttcttcctcactggcgcattgagcgacacgcccacttactattggggacagggttttgccaccggtgataaagacagccataagcaggcctatactgcgcaggtgctggatctgcaacccatgctgtatcgtcggctggtcaacaatatctatcttggcgttggctggacgctggatatacagcacgccgcgcaaattgatgagaccgatccgcccaaaattcaaagtacagcgcagggctgttcttcactgagtaacggcggtagcgttgagattagctgggatgatcgtgattttatacctaacccacgcaaagggcagtatgccacccttcgctatacccacttcgcaccggacgtcggtagcgatacgcggtttgatgaataccaactgcactatagtcgttaccatgccgtcaatgataaagatgtgctggcctgggaaacggacggcgcttttactcagggtgatgtgccgtggaatatgctgccgctgctgggcagtaaccatcgtatgcgcggctattatgaagggcgctatcgcgataaaaatgctatcagtggtcagctggaatatcgccataagctgagctggcggcatggcgttgtcggttgggtgggcgcgggcaccatgggatcgtctttgcaccatctggatgacgggcgatggctgccttctgcgggcgtgggctatcgctttgagttcaagccgcgcgtcaacgtgcggctggattacggcgtgggcaaagctagcagcggtttttattttcaggtaggagaagcattttga

SEQ ID NO: 372932 - DNA, 1128 bp, Salmonella enterica
ttgaggtccgtcgttcgggttatctttctggcgctactgtttctgacggggagcgcccgcgccgccttaccactgacgctctatctgtcctctctcccaatgccagctgccagtgaagcctggccgacgatgccgccgcagccgctgccaaaggggttgcgtccgtgttgcgcttttggttacgacctgcatgccgagctgctgggactgccggttccgttctatcagttaaataacgtcgtgacggtggactcgctggggcatcatcagtacaacgaccatctgtactcgggcgtggcaaacctgattggccttagcggtgagaataacggtattgtgtataccttgcgtggcggattcatcgacaccgcacatgtgcgggataccgctgatatgacagtgtatatcttcagccaactactaccaaagctggggcaggcttttacgctgaatctgggcgaggagctggccgaacggcgtctggtttttactgcttttacccctccggtcgatgcacgcgagcgttacacgctggccgcctggctgtcggcgcatctggcgttccaggtggcggagtggcacgaaatcgcccaatggtacggtttcgagtctgttcgcggattttctgagggagtatcggccttttcgccggaagatctctattctaacctcgcgggtgcccgtctggcagcgtctttaattgtcggcggccagacgaaaacgcaagagatgtacaacacggcgatggaaactgcgctgcggcaagcgctgacgcagctggcagcgcagccgacgcagatcacccgttttcagtttgatatgcttgatggccgttggtggaacagccagcggcgggtaccggaaaaatatctggtgctgcatcgtaattatcagatgggcgatgaccgcctgccgaccgccattcctggcgagataatgccgctattgccgctgagcttgccccatcgctggcgcggtatccagcttagcacgctggcgcaactacaattgtggcccagcgaggatatggcgcagctaccgcctcccgcgcactattacagcgaaaaagattttgccgccctggcggagcaggcacggctacaggacgaaaaaacacagaatcattaa

SEQ ID NO: 372933 - DNA, 2736 bp, Salmonella enterica
atgtcaacgccttcactgacccgcagattatggctggccttcgccctgatggcggcactcaccctgctcagcaccgtgatcggctggataagcctgcgcgtcattagtcaggtggagcaaaccaatacgcaagcgctgctccccacgatgaatatggccaggcagttaagcgaagccagcgcttacgagctcttttctgcgcaaaatctgaccaatgccgacagtgagggcgtttggctggcgcaggggaagatgctgaaagcgcaaagccttaaaattaaccatcttttgcaggcattaagcgagcagggatttaatacctcggccatcgcccggcaagaaaaagagattgcgcaaacgcttgggcaacagggaacgctggtcggtgaaattctcacgctgcgcgcacagcaacagcagttaagccgccagattgcggaggcggcggaaagcattgccgcccaggctcacggccaggccaataatgccgcgacatctgcgggcgccacccaggccggtatttacgatcttatcgaaagcggtaaaggggatcaggctgaacgcgcgcttgaccggctgattgatatcgaccttgagtatgtgaatcagatgaatgagttgcgggtcaatgccctgcggtttaagcagctcattgtgaccttaaaagacgcgcaagggctgagcgatgccgaggacaccgatgaaaaacttaatcagttggttaaaattttatcccgccgccagcagcgtatagaagatcctaccgttcgcgcccaaatcgccgacgcgttggagaaaataaaccagtacaccacactggttaccctgtttcgtaaggaaaacgccatccgcgatcagcttcaaacgcttatggccaataacctctttcagtttacccgcttcagtacggaagtgtcgcagttggtgaacgccatcgaaaaacgaaacgaggctgggttagcgcgtcttacacacgccagtcagcgtgggcaaatagggttagtgatcttaggtatcctggcgctgtgctcattaagttttattctttggcgagtggtttaccgttccgtatcccgcccgctggcgcaacaaacgcaggccttacagcggttactggagggcgatattgattcgccgtttccggaggcggctggcgtcagcgaactggataccatcagccgtctgatggaagcgtttcgcgccaacgtgcgcaaattgaaccgccatcgtgaggatttggcggaacaggtgcgatcgcaaacggcggagcttcatgcgctggtgctggaacaccggcaggcgcgcgccgaagcggaaaaggccaacgaggcgaaatcgacgttccttgccgccatgagccatgaaattcgcacgccgctttacggcattctcggtacggtacaattgctggccgataaaccgctcatggcaaactaccgcgacgatttacaggccattaatgattcaggcgaatcgctactggcgattcttaacgatattcttgattactcagcgattgaagtaggcggcaccaacgtttccattagcgaggaaccgtttgaaccgcgacaattgttgaatagcgcgctgcatttaatgcacagccgcgtgcaggtggcgctcatcaccgactttagcgagcaactcccttccacgctacaaggcgatccgcgccggatacgtcaaattgtgattaatcttttaagtaatgcggcgaaatttaccgatcgcggcagcatagtgctgcgcacgttttgcgacgatcagagctggtttattgaggttgaagataccgggtgcggtatccctgaagcgaagctgacggctattttcaaaccgtttgtgcaggcgacaggacgccggggcgggacgggcctggggctggctatcagcgccagcctggcagaagcgatgggcgggacgctaaccgtcaccagtacgcttcatgttggcagttgttttcgtttacaactgccagttcgccaccccaaacccgcaagcaaaaatgcgttcagagaaccgataaatcttaacggactacgcctgttgctgattgaagataatatgctgacgcagcgtattaccgctgaaatgctcacgggtaaaggggtgaaggtctcagtagctgaaagcgcgaatgacgcgctacgctgtttagccgaaggcgagtcctttgatgtggcgctggtggattttgatttaccggattatgacggcttaaccctggcgcagcagttgatgagcctgtatcccgccatgaaacgcattggttttagcgcgcatgtgatagacgataatcttcgtcagcgtaccgccggtcttttctgcgggattattcaaaagcccgttccccgcgaggagctttaccgcatgatagcgcactatttacagggcaaatctcacaacgcgcgggtgatgttgaatgaacatcagcttgccggcgatatggcgtctgtcggcccggaaaagctccggcaatgggtcgcgttattcaaagacagcgcgctgcctttagtcgaggagatcgaggcggcgcgcgccatgaatgacgacgttaacattaagcggctggcgcataaattaaaaagcggctgcgccagcctggggatgacgcaggcaaccgaagcctgtcgggagctggaattgcaaccgcttagcgatatagatattaaaactatcgtgacgcagggagtgacggcgctcgacgcatggatagccgatcatccttcgccataa

SEQ ID NO: 372934 - DNA, 1041 bp, Salmonella enterica
atgcgcgcgcttatttcgttcttttttttgataatcatcgtctcgaatgtagaaacggcgtcagccgaaaccggactgctacactggacgcgcgccgatcgggcgattccctggcggcaaacgtcagtcaatgcgagtaaaccctggaaactgtgcgcattataccccagcctgaaagattcttactggttgtccgtcaactacgggatgcaaaaagcggccaaattgtatggcgttgatttaaaagtgctggaagcgaatggctatcggcaactggcgacgcaacaacagcaaatgatgcaatgccgggagtggggcgccgacgctattctgcttggcagcagtaccgatcgtttcccggaactggaacggtatgccggtaatgtgccggttattgaactggtgaacatgattcacgatgccagcgtcgcaacccgcgttggtctgccgtggtttcagatggggtatctgccgggacgtttcctggtgcagtggagcaaaggaaaagcgcttaacgttttactcttcccggggccggaagaagccggcggcagtcaggagatggtggcgggttttcgtcaggcaattaaaggcagcgccatcaacattgtggatatcgcctggggcgataacgacattgaagtgcagcgaaacttactccaggaaatgctggagcgccatccggacgccaatgtggtcgccgggtcggcgatagcggcggaggcggcgatgggcgaagggcgaaatttgacgactccgctcacgatcgtctcattttatctgacgcatcaggtttatcgcggtttaaaacgcggccatatcctgatggcgctcagcgatcagatggcctggcagggagaattagcgataacgcagtcgattaaggtcttacaggggcaaccggtacctgaaaatatcagcccgccggtgcttattttgacgcataacaacgctgacagcgcgcgcgttcgtcgttcgctatcgcctccgggatttcggcccgtctatctgtatcaatacacctccgaggctaaaaagtag

SEQ ID NO: 372935 - DNA, 1185 bp, Salmonella enterica
atgcgaaaactctggagagcgctactcaggccaagcgcccgttggtcgatactggcgctggtcattgtcgggattgtgatcggcgttgcgctgatcgtgttacctcacgtcggtatcaaactgaccagtacgacagagttttgcgtcagctgccatagtatgcagccggtgtatcaggaatataaacagtccgtacatttccagaacgcttccggcgtacgcgcggaatgccacgattgccatatcccccctgatattccaggcatggtgaaacgtaagctggaagccagcaacgatctttaccagacatttatcgcccactcgattgataccccggaaaaatttgaagccaaacgcgccgagcttgccgagcgtgaatgggcgcgcatgaaagagaataactccgcgacctgtcgttcctgccataactacgatgcgatggatcacgcgaaacagaacccggaagcggcgcggcaaatgaaaatcgccgcgaaagaaaatcagtcctgcatcgactgccataaagggattgcccaccagctaccggatatgagcagcggtttccgcaaacagtttgatgaactgcgcgccagcgccagtacgcataatgacggcgatacgctctattcgctggatatcaagccgatttacgccgctaaaggcgataaagaaccggcaggttcgctgttgcctgcttctgaagtgaaagtccttaaacgggacggtgactggctgcaagtgcaaatcgaaggctggacggagacggacggtcgccagcgcgtgctgacgcagttgccaggtaaacgtatttttgtcgcctcgattcgcggcgatgtgcaacagcatgtgaaaacgctggaagagaccaccgtcgcggcgaccaatactcagtggagcaaattacaggcaactgcgtggatgcaaaaaggcgacatggtaaatgacattaaaccgatttgggcctatgccgactccctctataacggcacctgtaatcagtgtcacggcgcgccggacaaagcgcactttgacgctaacggctggatcggcacgctcaacggcatgatcggtttcaccagtctggataagcgtgaagaacgtaccttgttgaaatatctccagatgaatgcgtctgataccaccaacacgccgcacagcgataagggagaacacaatgaaaaataa

SEQ ID NO: 372936 - DNA, 699 bp, Salmonella enterica
atgggaattttaaaaagtttgttcacgttaggtaaatcattcgttgctcaggcagaagacgccattgatgaagcacagggggtacgtatgctggagcagcatattcgcgacgcaaaagccgagctggataaagcgggtaaatccagagtggatttattggcgcgggtgaagttaagccatgacaagctgaatgatttacgtgagcgtaaagccagccttgaaacacgggcgttggcggcaatgagtaagaatgtcgacgccgctttactcaacgaagtggcggaagaaatagcccgtctggaaaatgccattcttgccgaagaacaggtgctgactaatctggaagcctctcgtgatgcggtggagaaggccgtaacggcgacaggccagcggattgcgcagtttgagcagcaacttgaagtggttaaggcgacagaagccatgcagcgcgcgcagcaggcggtgacgacctcgaccgtcggagccgcgtcgaatgtgtctacggcggcggagtcgcttaaacgtttacaaacgcgtcaggctgaacgccaggcccggctggatgccgccgcgcagctggaaaaagtcgccgatggacgcgacctggatgaaaaactggcgcaggccggtattggcgcaaccaataaaagcaatgctcaggatgtgttggcgcgtttacagcgtcaacaaggcgaataa

SEQ ID NO: 372937 - DNA, 225 bp, Salmonella enterica
atgctctttacgtggattgtcaaaacctgccagcgtcatttgtccagactgacctggcccgctttgctgggcctgtttatcgggcagtatctgctttgttatctggtgctgcgcctgttgcgcgaaagcgcgttggtgagccagttaagcgattttatctattactgctcggtggtgggttccacattaggttttggcgatcttagcccgcagacggcgccatga

SEQ ID NO: 372938 - DNA, 225 bp, Salmonella enterica
atgactggacgatgcccgcagccaggcggcatcgcaaacgttgaaaggcagaagatgacgtttataaatcacgaaaccttcatctgttattgcgaactggctcttttcgtcccgcatacggcaaccggcggaacactcttagtgtattacactgattactttaaggatatgcgtctactctttttcaatactgagcggcaaatgattttttcagtattgctttaa

SEQ ID NO: 372939 - DNA, 834 bp, Salmonella enterica
atgtctaaacatcaaactcaactttctttactgcaggatgatatccgcagtcgctatgacagccttagcaaacgtcttaaacaagttgctcagtatattctggataacagtaatagcgttgcttttgacacggtcgcttccatcgcgcaacatgccgatgttcccccttcgacactgattcgttttgctaatgcgtttggttttagcggatttaatgaaatgaaacaggtatttcgccagcacctgatggaggaaacagtaagctataccgagcgggcgcgtctgttcagacagaaaaatgcggatgaaggggaacctaccccggaaaagccgggtgaaattctgaagctattttcaatggtgaatgcacaggtattacaacaattaccggtgcagattaaaaatgagcagttggatgcggcggtaaatctgttagcgaaagccgacaatatttatgtgattggattacgtcgttcgtttagcgtggccagttatttaacctacgcattgcgtcatctggagagacgggcatttttaattgacggtattggcggaatgttctctgaacagctaagtatggtcagccccgacgatgttgttattgccatcagctactcgccttacgcgcaggaagtggtggaattagtcgagcttggcgcgaaacgcggtgcgcaccatattgcgataaccgatagccaggttagcccgctggcagcgttcagtgaagtctgttttgtggtacgtgaagcgcaggtcgatggtttccgttctcaggtcgcgtccatgtgtctggcgcaaacgttagcggtttcactggcgctggcgacggagtaa

SEQ ID NO: 372940 - DNA, 1434 bp, Salmonella enterica
atgtccacatcagatagttgttataatacgggttacatattacgcatctgcgcgattgccgcactgggcggaatattatttggctacgatactgctgttatttcaggtgcgattggttcactgaccagctactttcatctatctcctgctgagaccggctgggcggtttcctgcgttgtggtggggtgcgttattggttcgtttagcgccggatatttatccaaacgttttggacgcaagaaatcattgatggtttcagcgctgttattcactatttccgcagtgggcacctccctctcctacacgttcacccattttgtgatttatcgcattatcggtggactggcagtcggcctggcggcaacagtatcaccgatgtatatgtctgaagtctcaccgaaaaacatgcgcggcagagcattaagtatgcagcagttcgctatcgttttcggtcagattctgatcttctacgttaactacaaaatagcatcgattgcagcggatacctggctcattgaacttggctggcgctatatgtttgctgcgggtattattccctgcattttgttctgtattttagtctttttaatcccggaatctccccgctggatgatgatgattggtcgcgaggaggagacgctaaaaatactgaccaaaatatccaacgaagaacatgccagacatcttcttgccgatataaaaacctcactgcaaaatgaccaactaaacgcccatcaaaaactcaattaccgcgacgggaacgtgcgtttcatcctgattctgggctgcatgatcgctatgctgcaacaggtaacaggggttaacgtcatgatgtattacgcgccaatcgtccttaaggatgtgaccggtagcgcccaggaggccctgttccagacaatctggatcggcgtgattcagcttatcggttccattattggcgcaatgattatggataagatggggcgtttgtcgctgatgcgtaaaggcactattggcagcatcatcggcttgttgctcacttcatgggcgctgtacagccaggcaaccggttatttcgcgctatttggtatgctgttctttatgattttctacgcgctttcctggggcgtgggcgcatgggtgcttatttctgaaatattccctaaccggatgaggtcgcagggaatgagtatttcggtcggatttatgtggatggcaaactttttagtttcgcaattcttcccgatgattaatgaaaacccgtatttactttcgcatttccacggcgcatttccaatgtggatattcgccatctgctgcatcttcagttacttctttatctgccgttacctgccggaaacaaaaggcatttcgctggagaaaatggagagcgtagtgttagcaaaacgcaggaaaaaactgcagccaattcaaaccgaacgttattctgattaa

SEQ ID NO: 372941 - DNA, 195 bp, Salmonella enterica
atgaaatttttcattttatttttgcattcattagaagaaaaattccatgcaaaagatcacgaaatagagatgttccaggaaagaacaaaaagtacggcccctgacaaattgaattcaggcactgtcacgaaagcaataaaatcaagtaaattcaccaagatagaggatggcactgcgcaaaacgcagcatcttaa

SEQ ID NO: 372942 - DNA, 1437 bp, Salmonella enterica
atgtctcagagaagtaagtacaattcggcctatgtgtacgtcctgtgttgtattgcggcgctggctggattgatgtttggttattcaacggcggtgattaccggggtggtattgcctttacagcagtattaccaactgacgccaaccgagaccggatgggccgtttccagtatcgtgattggttgtatcatcggcgcgctggtcggtggaaaaattgccgataaactggggcgtaaacctgcgcttctgatcattgcgatcatttttatcgcttcttccttaggggcggcgatgagtgaatcgttcatgatcttctccctttcccgcattgtgtgtggttttgcggttgggatggccggaacggcatccaccatgtatatgtctgaactggcgcctgctgaaattcgcggcaaagcgctgggcatttacaatatctccgtggtatctggccaggttatcgtgtttatagtcaactatctgatagcaaaaggaatgcctgctgatgtgttggtttcccagggctggaagtctatgctttttgcccaagtggtaccctccattgcgatgttagcgattacgcttttcctacccgaatcaccggcatggtgcgcccgtaacaaccgcagcgaagctcgttcgataaaggtgcttacccggatctacagtggattaacggccacagatgtggccgctatttttgacagcatgaaagaaaccgtacgtccacaggacaacgtcgccgggggagaacgcaccaacctgaaaagctcgccggtgctccgctatattctgttggttggatgctgtatcgccgttttgcaacagttcacaggcgttaacgtaatgaactattatgcgccgctggtgttgcagaacagcagtaccgaagtggttatgttccagaccatttttatcgcggtatgtaatgtggtgggcagttttatcggcatgatcctgttcgaccgctatggccgtataccgattatgaaaattggtaccatcggctcaattgtcggcctgttgatcgcgtcatacggtttgtacacccacgatacaggctacattaccatctttggcatcctgttttttatgctgctgtttgccgtcagctggagcgttggcgcatgggtactgatttctgaggttttccctgaaaagataaaaggttttgggatggggctggcggtgagcctgatgtggatagccaacttcctcatctcactgttgttcccggtcataaatgataacgcctggctgcaggagaccttcggcggcgctttttcgatgtggatttttgtcgtctttaatttggtctgctatgtctttatttctcgttatgtgccggaaacaaaaggggtgccgctaacagaaattgaacggctggccgagaacaagctgcgtgaaattcaggggaaacgtcgcgatgtaatagcctga

SEQ ID NO: 372943 - DNA, 780 bp, Salmonella enterica
atgaatcaagttgccgttgtcattggcggaggccagaccctgggggcattcctttgccgtgggcttgcagaagaaggataccgcgtggcggtcgttgatattcaaagcgataaagccgcgaatgtcgcccaggaaattaacgccgattttggcgaaggtatggcgtacggttttggcgccgacgccaccagcgagcagagcgtgctggcgctgtcccgcggcgtagacgagattttcgggcgcgtcgatctgctggtttacagcgcgggtatcgccaaagcggcgtttatcagcgatttccagttgggcgattttgaccgctcgctacaggtgaatctggtgggctatttcctctgcgcccgtgagttttcccgcctgatgatccgcgacggcattcaggggcgcattattcagattaactctaaatccggcaaagtgggcagtaaacacaactccggctacagcgcggcgaaattcggcggcgtggggttaacccagtctctggcgctggatctggcggaatacggcattaccgtacactcgttgatgctcggcaacctgttgaaatcgccaatgttccagtcactgctgccgcaatacgccactaaactgggcattaagcccgacgaggtggaacagtattacattgataaagtaccgctcaaacgcgggtgtgattatcaggatgtgctgaacatgctgctattttatgccagcccgaaagcgtcttattgcaccgggcagtcgatcaacgtaaccggcggtcaagtgatgttctga

SEQ ID NO: 372944 - DNA, 972 bp, Salmonella enterica
atgacacgggttcgtattgagaaaggcgccggcggctggggcggcccgcttgaactggacgttacgccaggcaaaaagatcgtctatatcacagccggtacgcgcccggcgatcgtcgacaaactggcgcaactaacaggctggcaagcggtggacggctttaaagaaggcgaaccgccggaagcggaaatcggcgcggccattatcgactgcggcggtacgctgcgctgcggtatctatccgaaacgccggattccaaccattaatattcactcgacgggtaagtccggcccactggcgcagtatattgttgaggatatttatgtctccggcgtaaaagaagaaaacattactcttgtcggcgaaacgcctgccagtcctcagcctgccaaaacgacattaggacgtgactacgacaccagcaaaaaaatcaccgagcagagcgacgggctgctggcaaaagtcggtatgggaatgggctccgccgtggcggtactgttccagtccggtcgcgacaccattgatacggtcctgaaaacaatcctgccgtttatggcgttcgtttcggcgctgatcggcatcattatggcctcaggtcttggcgactggatcgcccacggtcttgcgccattagccagccatccactggggctggtgacgctggcattgatctgctcgttcccgctgctgtcgccctttctcggccctggcgcggttatcgctcaggtcattggcgtcctgatcggcgttcagataggcctgggcaatatccccccgcatctggcgcttcccgccctgttcgcgattaacgcgcaggcggcctgcgactttatcccggtcggcctgtcactggcggaagcgaaacaagacaccgttcgcgtcggcgtaccttctgtgctggtcggacgcttcctgactggcgcgcccacggtacttatcgcctggtttgtttccggctttatctatcaataa

SEQ ID NO: 372945 - DNA, 573 bp, Salmonella enterica
atggctactattgggtatattcgggtgtcaacaattgaccaaaatatcgatttacagcgtaatgcgcttacttgtgcaaattgtgaccgcatttttgaggaccgtatcagtggcaagattgcaaaccgccccggcctgaaacgggcgttaaagtatgtaaataaaggcgatactcttgtcgtctggaaattagacagactgggccgcagcgtgaaaaacctggtggcgttaatatcagaattacatgaacgtggagctcacttccattctttaaccgatagtattgataccagtagcgcgatggggcgattcttttttcatgtaatgtcagcactggccgagatggagcgagaattaattgtcgagcgaacccttgccggactggctgccgccagagcgcaaggacgactgggagggcgccctcgggcgatcaacaaacatgaacaggaacagattagtcggctattagagaaaggccatcctcggcagcaactagctattatttttggtattggcgtatctaccttatacagatattttccggcaagccgcataaaaaaacgaatgaattaa

SEQ ID NO: 372946 - DNA, 972 bp, Salmonella enterica
atggattatcgcaagatcatcaaagagatcgggcgaggtaaaaatcacgcccgcgatctggatctggataccgcgcgcggtttgtatacccgaatgctgaatggcgacgtccccgacctggagatgggcagtatattgatggcgctgcgtattaaaggcgaaggcgaagccgaaatgctgggcttttatgaggccatgcagaatcataccatcaaactgacaccgcccgcagataggccgttgccggtcgttattcccagctataacggcgcgcgtaaacaggcgaatttaacgccgctgctggctatcctgctgcataaattgggcttcccagtcgtagtacacggcgtcagtgaagatccgacccgcgtactgacggaaactatatttgagctgatggggattatccccaccctacacggtggacaagcgcaggccaaactggacgggcgccagccggtgtttatcccggtgagcgcgctctgcccgccgctggaaaaacagctggcgatgcgctggcggatgggcgtgcgtaacagcgcgcattcactggccaagctggcgacgccatttgctgaggatgccgcgctgcgtttatcaagcgtttctcatcctgaatatgttccgcgtgtggcgaccttttttagccgcattggcgggcgggctttgctgatgcatggtaccgaaggcgaagtctatgccaacccgcaacgctgtccgcaaatcagcctgattgatagccgtggcgtgcaggtactgcatgagcgtcagagcgacacgcacgacgagccgctttcactgcctgcgactaaagatcctgaaatcaccgcgcgctggattgagcgctgccttgccggccgcgagccggtgccgcaatcattaaaaacgcaaatggcctgttgtctggttgcgacgggagaggcggcgacgttagaagacgggattgcgcgcgtcgaacaggcttttagctga

SEQ ID NO: 372947 - DNA, 11475 bp, Salmonella enterica
atgcgtctactcgccgtggtttcgaaattgactggcgtctccaccactgtggaatcctcagcggtcactcttaacgccccgtcaattgttaaattatcagtggcccgggaggaaattagtcaacttacgcgcattaatcaggatctggtggtgaggctccattccggcgaaacgatcacgattaaaaacttttacgttaccaacgatctgggcgcaagccagttagtactggcggaaaacgatggcacgttatggtgggtagaaaatccgcaagccgggctacattttgaacaaatcgctgatattaatgagctgctggtcacttctggcgcttcccatgaagcaggcggcgccgtttggccgtgggtactggctggcgcggtggcggctggcggcattgccgctatcgcgtctgccggcggcggcgattcccatcatcattcggatggcgataatccgccccccaataacaccaatcctgacggtaatccccctgataacagcaatcccggcggcagtaaccctaacggcaatactccaggtagcagtaatcctgtagatactaccccgcctctcgctcccggcaacttgttgatttcagcggacggaaaaacggtaagcgggcaagccgaagcgggcagtaccattaccattaaagatccttcaggtaacgtcgttggcgagggcaaagcggatagcgacggtaaatttagtattgatctgacagcgccacagattagcggcgaacaacttaccgtgaccgcgactgacgatgccggcaataccggcccatccgcaaccattgatgcgcccaacattcctctccccgatacaccggttatcaccgccgctatcgatgatgccgctcccctcaccggcacgctgagcaataatcagtttacgaacgacagtacccccactctggagggcaccggcagcgcaggcacagtcatccatatttacgccaatggtcaggaaataggctccacaacggttgataccagcggaaactggcgttttgccattaccagcgcgctagcggatggggaaaatcatttcaccgccattgcgactaacgttaaaggcgaaagtagcgaatcagcccgctttacgctgactatcgacacactcagccccgatgccccacgcgttgaactgattgccgataacaccggtttgctcaccgggccgctacagaataatgaccggactgacgaggcaaaaccgctattttccgggcagggagaggcaggcaataccatcacgattaaagaaggttcaaccgttatcggcagcgctaccgtagacgaaaatggacgctggacctttacgccgactacgccgttaagcgatggcgaacatacctttaccgtcgaacaaagcgacaaagccggaaacacgagccgcgtgacgacaacgcctactatcattgtggacaccacgccaccggacgccgctatcattgataatgttgcgaaagacggcacaaccgttagcggcaccgctgaagctggcagtaccgtgtcgatctatgacccggcgggaaattacctgggctccacgattaccggagaaaataaccacttcagcatcacgctgaatccggctcagacccacggcgagcgtctggaagcgcgtattcaggacgccgtcggtaacatcggccccgccacggagtttaccgcttctgactcacagtatcctgcccagccgactatccttaccgtgacggatgacgctggcgccgttaccgggctgctgaaaaatggcgatgccacagatgataaccgcccaaccctcagcggtactgctgaaccaggcagtacgatatcgattaacgataatggctttcctgtagcgacctttccgcccattgtcgctgacgctgacggcaaatggagctttaccccctcgctggcgcttgccgatggcgaccatgtctttaccgctaccgcgaccaacgatcgcggcaccagcgggcagtccgtctcctttaccattgatatcgacacgcagccgccggtgctggaaggcctgacggttagcgacgtcggcgacaaactcaccggcactacggaagctggcagtacggtggttatcaaagatagcctgggaaatacgctcgggagtggaacggcaggcgacgacggcaccttctcaataggtattagcccggcgaaaattaacggcgaaacattaagcattagcgttaccgataaagccgcgaatagcggtccggtagaaacgctgaacgcgccggataaaactgcgcctgcggcaccgaacggtcttatcgtggcgaccgacggtctgtccgtaagcggtcaggcggaagccggggcaacggtcactatccgcgacagtagcaacaccgtacttggcagcgccgtcgctaacggcaacggacaatttatcgttccgctgaatacggcgcagactaacggccaggcgcttatcgctaccgccaccgatgtcgcgaaaaacgaaagcgccgccgcgacggttatcgcgccggacagtaccgcgccggaaatgccgaaaaacgtggtaattagtgaggatggcaccagtatcagcggcaccgccgaaccgggtagcgccatcacgatcgccacgccggacggcaagccgcttggcagcggcaaagcagatggcgaaggtcattttacccttcccctcgtccccgcacagaccaacggcgaacaggttaccgtcaccgccaccgacagcgccaacaatgtcagcccgccaaccacagcgcaagcgcccgatatcaccgccccggataagcccattatcactcaggtgttggacgatgttgaaagcttcaccgggccgctggtgaacggacaaaccaccaacgacaaccgtcccacccttagcggtacggcggaggccggcgcgcgtgtcgaagtctttgataacggcgtttcactgggactcgccacgctacagcccaacggtgcctggacgtttacgccgtcgcaaaatttaggtgaaggcgcgcatcgactgaccgtaatcgcaaccgacgctaaaggcaatgccagtcaggccgcgtcattcgacctggtggtcgatacacaatcgccgcagcaaccggtaatcaccttcattacagatgatgcgccgggtattctcggtagcgtcgcgcatctggggctcactaacgacagcacgccaacgattaatggtacaggtgaaccgggttccacagtacacctgtatcagaatggcgcccggatagcagatattatcgtcggtaattccggcgtctggagctacgcttacaccacggcctcgccactggcggacgacacctacacctttaccgtgacggccagcgacagtaacggcaacaccacgcctttttcgaccgattttacgattaccattgatacccaggcccctgccgcccccggcattatcggcgtagctgacggcgacggaaatacgattgataccaatcagattacccaggaatcccagccccggttgagcggtagcggcaccgcaggcgacacaatcatcctttacgataacggcaatgccataggtcaggcgctggtcggcacggacgggcgctggcagtttacgccgcctgccgcgctgggcgacggcgaccaccttctgaccgctcgcgccaacgatccggcggggaacgaaagtcccgaatccctcagctttaccctgcgcgtcgatacccaggtgccggatgcgccgcagatcgtgtcagccgccatcaccggcggagaaggcgaggtgctactggcaaacggcagtattaccaatcagcgtatgccgaccctcagcggcaccggcgaacccggcgccatcatcaccctgtacaataacggcgtagaactggctaccgtccaggtcaatccacagggtagctggacctatccgctaacccgtaatctgagcgaaggattaaacatcctgacggccaccgccacggatgccgcaggcaatagtagcccgacctccggcgttttctccgttacccttgatacccagcctccagcgcagcctgacgcgccgctaatcagcgataacgtcgcgccggttatcggcaacatcggcaataatggcgcaacgaacgataccacgccgaccttcagcggcacgggagagatcggcagcacgattattctctacaataatggcagtgaaattggtcgcacaacggtaggcgataacggtagctggaactttacgcctgcggcactgacgccagaaacctataccattaccgtcacggaaaccgatatagcgggcaatatcagtccaccttccgcctcagtcacttttacgctagacaccactgcgcccgccaatccggttatcacttttgccgaagataacgtcggcgaagtccaggatactattgtcagcggcgcaaccactgacgacaatacaccggtcattcacggcactggcgacatcggcagcattattacgctctataatggcagcagcgttttaggcgtagccaccgtcgatgagaccggcacctggacgctgccggtgaccagcgcgttgccggatggcgtctacaccctgaccgccattgccgccgatgccgccggaaacagcagcggcgtatcgaacagctttaccttcaccgtcgacaccgttccgttgcagccgcccgtcgtcaatgagatccttgacgatattgcaccagtgaccgggccattaaccgatggcgcctttactaacgatcggatgctgactatcaacggcagcggcgaaaacggcagcaccgtcacgatttacgacaatggcgtggcaatcggtacagcggtcgtcaccgacggggcctggacattcaatacgcccgaattgtcagaagtcagccatgcgctaaccttcagcgcgactgacgacgctggaaataccacggcgcaaacccaaccgatcaccattaccgtggatatcaccgccccgcccgcgccaacgatccagacggtggacgacgatggcacgcgcgtcgccggacttgccgatccttacgctaccgttgaaattcatcatgccgatggcaccctggtcggcagcgctgtcgctaatggtaccggtgaattcgtcgttacgctcagtccggcgcaaaccgatggcggtacgctgacggcaattgctatcgatcgcgcggggaataacggcccggctacgaattttcccgcttccgacagcggtctgcccgccgtcccggccatcacggcgattgaagatgatgtcgggagcgtacaggggaatattgcggcgggcggcgccacggacgacaccatgccgacgctgcgcggcaccacggatatcggctctaccgttgaagttttcattgatggcgattcggcaggctttgccaccgttgacgccagcgggaactggatctttgagatcgcgacgccattaagcgaaagcacacattacttcaccgtccaggcaaccaatgcgaatggcccgggcggcctgtccgcaccggtcgggatcactgtcgatcttagcgcgccggcgcaaccggttattaccagcgcaacggatgatgtccccggcatgaccggtacgctggataacggcgcgctcaccaatgattcacgcccgacgctcaacggaacgggagaagctggcgccacgatccgcattctggataacggcgtagaaatcggttccgccacggtagatcaaagcggcaactggcgcttcaccccgaacgcgccgctggagagcaacgcgcacatctttaccgccgtggcgaccgatcccgctggcaatagcggccagccttcggacggctttacgctgaacattgacgcgcaggcgccagatgtgccggttatcacgtccgtgattgacgataacaatcaaccgaccgttccggtgttaccggggcaatccaccgacgatcggcagccaatactgaacggaactggcgaacctggcgcgacaatcaccatttttgataacggtacgccgcttggcacggctcaggtaggcgaaaacggtagctggaccttcccggtgccccgcaatttgtcagagggaagccataatctgacggttagcgctaccgatccggcgggcaataccagcgcggtctccgcgccgtggacgatcgtggtcgatattacgcctccggcgatcccggttctcacctccgtcgtggatgaccagcccggaattaccggcaacctggttagcgggcagctaacgaacgatgcgacgcccaccctgaacgggcgcggagaggcaggcgcgacgattaatgtctatcttgacggtaatcccgcgtccatcggtaccacgacggtgaatagcgacggcacgtggagtttcacgccgcagacgccgcttgcaaacggtagccacacgttcacccttagcgccaccgatccggcgggtaatagcagctcggtgtccagcggatttgtgctgacgattgacgccacaccgcccgccgcgccggttatcgccagcgtggcagataatacggcgccagtaacgggcatcgtccccaacggcggctcgacgaacgaaacccgaccaacactctcgggtaccggtgaggcgggtacaaccatctcgatttataatggcagcgcgctggtcggcacggcgcaagttcaggccaacggtagctggagctttacgccgtctacctcgctgggcgcgggcgtctggaacctgacggcgacagcaaccgatgcggcaggcaataccagcgccgcgtccgaaatacgctcgtttactattgataccacggctcccgccgcgcctgttattgatacggtctacgacggtacgggccccattaccggcaatctgagttcaggacagatcacagacgaggcgcgccctgtcattagcggcacccgtgaagccaacacaactattcgtctctacgataacggcacgctgctggctgaaattcccgccgacaatagcaatagctggcgctacacgcccgatgcctcgctggcgacgggcaaccatgtaatcaccgtcattgccgttgatgccgcaggcaacgccagccccgtttcagacagcgttaatttcgtcgtcgataccacgccgccgctgacgccggtaatcacatcagtcagtgacgatcaggcgccaggcctcggcacgatcgcgaacggccaaaataccaacgatcctacgccaaccttcagcggcaccgcagaagccggcgccacgattacgctctatgagaatggcacggtcattggcacgacaacggctcagcctgacggcgcgtggagcgtctccacctcaacgctggcaagcggaacgcacgtcatcaccgccgtcgccaccgatgccgcaggaaacagcagcccgaacagtacagctttcaccctgacggtcgataccaccgcgccgcaaacgccaatcctgacgtccgtggtggatgacgtcgcgggcggggtcacaggaaatctcgctaatggtcagataaccaatgataaccgccccacgctgaacggcactgccgaagcgggcagcgtggtcagtatctatgatggcaacactctgcttggcgtcacctcggctaacgcgggcggcgcgtggagcttcacgccgacgacagggttaaacgacggcacgcgcatattaacagtgaccgccaccgacccggcaggcaacgttagcccggccaccagcggttttactatcgtggtcgatacccttgcgccaacggttccgcttataaccagcatcgttgatgatgtcccgaacaacaccggcgccattggcaatggacaatcgaccaacgacacacagccgacgctcaacggtaccgcggaagccaacagcgcggtaagcatcttcgataatggcgcgctggtcgcgaccgtgaacgccaatgccagcggcaactggagctggacgccaaccgccgcgctcggccagggaagtcacgcctatagcgttagcgccgccgatgcggctggcaacgttagcgccgcttcgccatcgacaacgattatcgtggataccattgcgcccggcgcgcccggcaacctggtcatcaatactaccggtaatcgggtgacgggcaccgcagaagcaggcagtacagtgacaattacctctgagactggtgtggtactgggaaccgccaccgccgacggtacaggcagcttcaccgccactctcacgcccgcgcagaccaatggtcagccgctactggcatttgcccaggataaagcaggcaacacaggcattgccgccggatttaccgcgcccgatacgcgcgtgccggaagcaccgatcatcaccaacgtagtagatgatgtgggtatttataccggcgctatcgccaacggccaggtcactaatgacgcacaacccacattgaatggtaccgctcaggcgggcgccacggtgagcatttataacaacggggcgctgctcggcaccaccacggcgaacgccagcggaaactggagctttaccccgacaggcaatttgaccgaaggcagccacgccttcaccgccaccgcgactaacgccaacggaacaggcagtgtatccaccgccgcgacggtgattgtcgatacgctggcgcccggtacgccgtcaggtacgctcagcgccgatggcggttcactttccgggcaggcagaggcaaacagcaccgtaaccgtcacgctggcgggcggtgtgacgctcaccaccaccgccggcagcaacggcgcatggtctctcaccttgccgacaaaacaaattgaaggtcaactcattaacgtgacggccactgacgctgcgggtaacgcctccggcgcgttaggcattactgcgccggttctgccgctggcggcaagggataacatcaccagtcttgatctgacctctaccgccgtcaccagtacgcaaaactattcggattacggcctgctgctggttggcgcgcttggcaatgtcgcctcggttttgggtaacgataccgctcaggttgagttcaccattgctgaaggtggtacgggcgacgtcaccatcgatgccgccgcaacgggaatcgtgctttcgctgctcagtactcaggagattgtggtacagcgctacgacaccagcctcggcgcctggacgacgatcgtcaacaccgccgttggcgacttcgcgaatttgcttaccctgaccgggagcggcgttaccctgaacctgagcggcctgggcgaaggccagtaccgggtactcacttataacaccagtctgctcgctaccgggtcatataccagcctggatgtcgatgtacaccagaccagcgcaggtattattagcgggccaaccatcagtaccggcaacgtcatggctgatgataccgcgccgacgggcaccacggtcaccgccatcaccaacgccaacggcgtcagtacgccggtcggcgcgggcggcgtggatatcctggggcaatacggcacgctgcacattaatcaggatggcagttacacctacacgctgactaagcccacggcgggatacggacataaagagagcttcacctacaccatcacccagaatggcgtcggtagcagcgccgcgcaactggttatcaatctgggccctgcgcctgtaccgggcagcgtgatagcgacagacaataacgcctcgctggtctttgatactcacgttagctacgtcaacaacggtccctcgacacaaagcggcgtcacggtattaagcgtcggacttggtaatgtactgaacgcgaatctgcttgatgatatgactaatccgatcatctttaacgttgaagaaggcgctacgcgaaccatgacgttacagggaaccgtcggcggcgtctcactggtttccacgttcgatctgtacgtttatcgcttcaacgatgccattcaacaatatgagcagttccgggtgcaaaagggctggattaacaccctgctgttagccggacagtcccagccgctgaccctgacgttgcctggcggcgaatacctgttcgtgctgaataccgccagcggcattagcgtcctcactggctatacgctggcgatttcccaggaccacacctatgccgttgacagtatcaccgccaacaccaccggcaacgtactgaccaatgatgtcgcccctacggacgccctcctcactgaagtaaacggcgtggcgattgcggcgaccggcacgacggaggtaaacgggctgtatggctcgctcatcattgacgcaagaggcaactatacctacacgctgaagaacggcgtcggcgccgacagcattaaaacgccggacagctttatctatacggtcaaagcgccaaacggcgataccgatacggcctcgctcaatatcacgccaaccgccagggcgctggatgcgattaatgatgtcagcgataccctcagcgtcgccacgcttcaggataccgctgcctggctggactccagcgtcggcagcgccagttgggggctactcggcaaatcgggcagcgggagcggcacctttgacgttgcaacgggcaccgtacttaaaggcgcgtcactggtttttgatgtctccacgctcattacgctgggcaatctgaatattagctgggccattcaggagaacgggaccgtcatacgcaacggaaccgttccggtggcgaatatcacgctgggcagcgcgacggtaaccgttaacctgagcggcctggagctggatgccggaacgtacacgcttaactttaccggcaccaataccctggccggggcggcgacgatcacgccacgcgtcatcggcaccaccgtcgatctggataattttgaaacgtccggaacgcataccgttctcggcaatatttttgacggcagcgacgcggcgggggcgatggatcagcttaatacggtgaatacccgcctgagcattagcgggtataacggcagcgccgccacgctggacgccgcggcgaataccaccagcgccacgattcagggacattacggcacattgcaaattaaccttgatggcgcttacacctacaccctgaataatggcgtcgcgatgtcgtccatcaccagtaaagaggtctttacctatcaactggatgacaagatgggtcatacggatagcgccacattgaccattgatatggcgccacaaatcgtcagtaccaaccaaaacgatgttctcatcggctccgcctatggcgatacgctgatttaccacctgttaaacggcgcggacgcgaccggcggcaacggcgtcgatcgctggcaaaacttctctaccgcgcagggcgacaagatcgatatccacgaactgctgaccggctgggatcaccaggcggcgacgctgggtaactttgttcaggttcataccagcggcgccaatacggtgatatccgtcgatcgcgacggcgccggcagcgcgtttaaatcaaccgaccttgtcactctggagaatgtgcagctcacgctaaatgatctgttgcagaacaaccacctgataaccggcggttga

SEQ ID NO: 372948 - DNA, 1191 bp, Salmonella enterica
atgaaaatcaatcagcatgatgccgcgatggacgatcccgatattcagcgtgaacgggcgttttccggcgcgggtcgtattgttctgatctgctcactgttatttctcattttcggcatctgggcgtggtttggccgactggatgaggtttccaccggcaacgggaaagtgatccccagttcacgcgaacaggttctgcagtcgctggatggcggcattctggcgcagttgacggtgcgggaaggcgacagagttcaggctaaccagattgtcgcccggcttgatccgacgcgtctggcgtccaatgtgggtgaaagtgcggcaaaatatcgcgcttcactcgcctccagcgcacggttaaccgcggaagtcaacgacttacctctcgccttccccgctgagctgaacggctggccggacctgattgccgcagagacgcgtctctataaaagccgccgcgcgcaactggccgataccgaagccgagctacgggatgcgctggcgtcggttaataaagagctgaccattacccagcggctggagaaaagcggcgcggccagtcatgttgaagtgctacgcctgcaacgacaaaaaagcgatttaggcttaaaaattaccgatctgcgctcacaatattatgtgcaggcacgcgaagcgttatcgaaagcgaacgctgaggtcgatatgctctccgccattttaaaaggacgcgaggattccgtcacccgccttaccgtgcgttcgccggtacgcggcattgttaaaaatatccaggtcacgacgattggcggcgtgatcccgcctaacggcgagatgatggagatagtgccggtagacgatcgtctgctgattgaaacccgcctttcgccgcgtgatatcgcctttattcatcccggccaacgcgcattggttaaaattactgcttacgattacgccatttacggcgggcttgacggcgtggtggagaccatttcaccggataccattcaggataaagtgaaaccggaaattttctactatcgcgtatttatccgcacccaccaggactatctacaaaataaatcaggacgccgtttttcgattgttccaggcatgatcgccacggtagatatcaaaaccggtgaaaaaaccattgtcgactatttaatcaaaccgtttaatcgcgcgaaagaagcgctgcgcgagcggtaa

SEQ ID NO: 372949 - DNA, 1197 bp, Salmonella enterica
gtggcacggacaacacgccccctgaccaacaccgaagttcttcgaactaaagctttagagaaggatctgacgctgcatgacggcgacgggcttttcctgatagtaaaaacaagtggtaagaagctttggcgttttcgctatcaacgtccggctacaaaacagcgaacaatgataggtctcggcgctttccccgccctatcacttgcagatgcacgtggcttacgagcggattaccttgccttgttagctaatggcatcgacccccaagttcaggccgaagttgttgaagaacaacaacagatagcactagacagtattttttcgactgttgcgaccaactggttccagcttaaaagcaaaagcgttacctctgattacgcaaatgacatttggcgttcactggaaaaagacgtatttccagctatcggggagacccctgtccagcaaatcaaagcccgaacactggttgaagcccttgaaccaataaaagctcgtggggcgctagaaactgtacgtcgattggtacagcgcattaacgagataatgatttatgccgtaaacactggtctgattgataccaaccctgcatcaggtattggtatggcatttgagaaacccaaaaagcaaaacatgccaacactacgaccagaagagttaccgaaactcatgcgttctttgataatgtcgaatctctctgtttcgactcgctgcctaattgaatggcaactcctgactctcgtgcgcccctctgaggcttctggcgctcgatgggtagagatcgatctcgatgccaaactttggacgatcccggccgaacggatgaaggcaaagcgtgaacacatcgtacctctatctcctcaggcattagatattctggaagtgatgaaaccaatcagtgctcaccgtgaacatgtttttcccagtagaaatgaccctaagcaaccaatgaatagtcagacagctaatgctgcacttaaacggattggttatggtgggaaattagttgctcacgggttacgctccatcgcaagtactgcactcaatgaagccggatttaaccctgatgttatagaagcagctttagcacattcagacaaaaatgaggttcggcgagcatataaccgttcaacatatcttctaaaaagaattgaattaatgaactggtggggggaattaattagagtttcatttaggtaa

SEQ ID NO: 372950 - DNA, 1410 bp, Salmonella enterica
atgaagttttctgaatcttttaatatggaatttcagcaatcaaatttagattttatcgatatcccattggatactgacttacaattttttatagatccgacatctattcgagccttaaaaacaaattggggaggtagtcttgaaaaattaattcaagattatttcgcagacgttcttgctagtataaagaacggagatcttaaaagagctggaatattattgtcttctttgaaagaatcaaattcatttcatctcggatattcttctaaaaaatcctctggtaaagccttaggggtaaaaacggcagagttaattctggattcattgaaaaaaagtaaggcagctcaatcaggattacttcatgatcttgaggatacagcattaactattgacgggattgcatctgacaggatatctgattctgtatgtaatatacttaagcttccgtttatagaatatacacaaaagatttgtgagttttataatgtagatacgtcagatgtttctggtattcgtttgtgggatccgaatagtgggcgctgggtgaaaagaacattcaagcttcctatttacaatggtgaagaagttatacttattccaaaagtactggcgagagaaaagatagcgtattcacactctaaattttatcggagatatataatcccagaaattagagctgaacatattaaagcaggctctgcacttgtaactcttttaaaagggaagcaaacagtaaccgctaaaaagattatcgaagaatttgggcagtctaagggattcattgaggaacagatagtaaaatatcctgacgcaataaagcaatacaaagaagagctattgctttcaccaccgccgccgcttccccataaaagctttgatgattcaacaggggctgtaactagtccactatcatcagatattgagaatctcaagctttcaataaaagaaaatgatgagcaattatatgttgacagccttaaaaaaatatttctgactatattttatccatctcttttttatccgtgcttgataagtgggaatatgaatgattatagatttacaatgttgaatgaatctcgtgcgggattcttttttgatttctcagtttttgagattcctgctgagaaaattttagttaacattgtaatgtcaagttctcatattaatgaaaattatctagaaagcctaactcaagaaatggatgttattaaaacatcagtttgtttgttggcctgctgtgaagcaacaaacgaactgcaaaaagaaaaaataaaggcgttggcaaaaagcaaaggtaagtatatctttattataaatagtgtggctattaatggtattctagacgagtattataaaatcggcgagcagcatttcagcatgttacgtgataaatttaaagagcttaattaa

SEQ ID NO: 372951 - DNA, 567 bp, Salmonella enterica
gtgaccaccctgacattacaacaggcttttgaagcctgccagacgaacaaaaccgcgtggctgaaccgtaaaaccgaactggccgccgcagagcgggaatatcaggaattattgctggatgacaatgcatcaggttcccgcagattacagtcgctgcgcgacctgattgacgtaaaaaagtgggaagttaatcaggccgccggtcgctacatcttctcgcatgaggaggtgcagcgcatcagcatccgtaaccggctgcatgattttatgcagcagaacggcgcagagctgaccgccgcactggcaccggagctgatggggattaaaaaccagcccgcgatgataaaaaaccgcgcgcttgaccgttcagcctcttacctgagagaagctctttccgtctggctgaccgctggaaatgacattaattattctgcacaggataaagatattttaacggccatcggatacaggcctgacgcgccttcgcgggatgataatcgtgaaaaattcacccctgcacagaacatgatttacacccgtcgacgcgccggactggtcgcgcagtag

SEQ ID NO: 372952 - DNA, 243 bp, Salmonella enterica
atgatgcgctgccctttctgccgcacggcggctcacgtccgcaccagccgctatatgtctgagagcgtcaaagaaagttacctgcagtgtcagaatgtgcactgctcggcgacattcaaaacgcatgagtccatctttgaagtgatacgttcgccggtcgtcgatgagaaacccgcgccggtaccaacagcccctgcaccccgtcgggtaaaaggctgctacagctcgccgttccgccattaa

SEQ ID NO: 372953 - DNA, 738 bp, Salmonella enterica
atgactcataccgctgttattcccgactaccttaaacctgcaatggaacgccttgagactgcccgctcggcgcatctcgccaatgccagccgtatggatgaaaccacgacggccatcagccaggtgcaaacgcaaaaaaatgaactggagcaggaaaacggcaatgattccggcgcatggcgcgccgcctttcgtgccggtggtgctgtcattaccgacgagcttaaacaacgccatctggcgcgcgtggcacggcgggaactggcgcaggaatgtgacagcatgaacgaggtactgtcttttgagctggacaggctcaaaggagcctgtgaccgcacggccagagcataccgtcaggcacatcacggcgtcctcagtcagtatgcagagcatgaacttgatgctgccctgcgtgaaagctgcggtgccctcatcagagcaatgaaactcaacatactggttctgaataatccgcttgctaatacgaccgggcatcagggatatatcgaaccggaaaaagttgtaatgcagcaggtgaaagcgtggcttgaacaggccgtgaagggctgcaatatccgtctgaccgatgaaccggtgctgtttaaaacagggctgtcggcctccacgatgccgcatatggagcatgacgttgcggccacgcccgttcagcggaaattctggcaggaaaaaatgcgggaacgtgaagccgacctgaaagcacgggggctactgtcatga

SEQ ID NO: 372954 - DNA, 267 bp, Salmonella enterica
atgcacaccgctttttcttccccgtcttccgcccctgccgcgccgttgatgcaggtttctgataccgttcacgagcgctttatccgtctgcccgaagtgatgcatttatgcggcctgtcccgctcgaccatttacgacctcatcagccgggaagccttcccgaaacaaatctccctcggtggtaaaaacgtggcgtgggcgcagtctgaaatcaccgcatggatgactgaccgcattgccgaacgcaaccggggttatgacgcatga

SEQ ID NO: 372955 - DNA, 195 bp, Salmonella enterica
atggctacgatcctcaccccgtcatacccgcagtttgtctttgtgtttgccgctgttcgtcgcgcagaccgtaaaccccgtatctgtatgcttcgcaccgttgccggtgatgaacaggccgcacgtctttccctcgttcgcgattacgtcctctcgttcgctggtcgtctgccggttgcggaggtgcgcgcatga

SEQ ID NO: 372956 - DNA, 228 bp, Salmonella enterica
atgagacacaccaccattaccgcccgtgacctcgaatgtctggagcatatgcgcaacgtcggccagctcgtcaatgagctgatgcaggtgcaggactgcgccaccgttcgtcgcgacccggtgcagcagtcacagctcacctcggtgatttacctcatgaccgcccagcttgacggcgtggtagagcgctgcaatcagcgctggctgaccggggagggcaacgtatga

SEQ ID NO: 372957 - DNA, 321 bp, Salmonella enterica
atgaaaaatccattaccgcccgtattacgcgccgcgctgtatcgtcgcgccgtggcctgtgcctggctgaccctgtgcgaacgccagcaccgctatccgcacctcaccctcgacgcgctggaaagcgccattgccgccgagctggagggcttctacctgcgccagcacggagaggaaaaaggccgccagattgcctgtgcactgctggaagatttaatagaagccgggccacttaaggccgcaccgtcgctgtcctttctcgggctgaccgtgatggatgagctttgcgcccatcatatcaccgcaccggtactgcactga

SEQ ID NO: 372958 - DNA, 2334 bp, Salmonella enterica
atgaaaatgaacgtaacggaaacggtaaaacaggcctgcggccactggtcgcgtattctcccggcgctgggtgtgaaggtgattaaaaaccgccatcaggcctgtccggtgtgcggcggctctgaccgtttccgctttgacgataaagagggacgcgggacgtggttctgcaaccagtgcggcgcgggtgacgggcttaagctggttgagaaggtatttggcgtgtcggcctccgaggccgccggaaaggtggatgccgtgaccggcaacctgccgccggttgccctggaagtgattgcggccgcagaagcagaaacggaggctgaccgcaaagcggcggccgcgctggccgtaaagctcatggagaaaacccgaccggccagcggcaacgcctacctcacccgcaagggattccccggtcatgagtgtgtcatgttgacggccatacacaaaaccggcggcgtgacgttccgcgccggtgatatggttgtcccgctgtatgacaatgccggggcgctggttaacgttcagcttattaattctgacggtctcaaacgcaccctgaaaggcggggcggtaaaaggagcgtgtcacaccatcgaagggaaaaaacaggcgggaaaacgcctgtgggttgcggagggctatgcgaccgcgctcaccgtacatcacctgaccggggaaaccgtcatggtggcgctgtcctccgtgaacctactttctctggcgagccttgcccgtcagaaacacccggcctgtcagattgtcctcgccgccgaccgtgaccttaacggcaacggccagagtaaagccgctgcggccgcagacgcctgcgagggcattgtcgccctgccgccggtgttcggtgactggaatgatgcgtttatgcagaaaggtgaagaggccacgcggaaagccatttatgacgccatccggcctccggctgacagccctttcactaccatgagcgaagcggaatttaccgccatgagcaccagtgaaaaggcaatgcgggtgcatgaacattacggcgaagcgctggccgtggatgcgaacggccagctcctgtcccgatatgaggcaggaatatggaaaatcattcccccgtcggattttgcccgcgacgtggccgggttgtttcagcgtctgcgcgccccgttctcgtcggggaaaattgcctcagtggtggagaccctgaaactgattattccgcagcaggacgcccctgcgcgccgtctgattggctttcgcaacggcgtactcgataccgccaccggcacattcagcccgcaccataaatcacactggctgcgcacgctatgtgatgttgatttcaccccgccggtggagggcgaaacgctggaaacccacgcccctcatttctggcgctggcttgaccgcgctgccggtggcaaaccggaaaaacgcgatgtgattctggccgcgctgtttatggttctggcgaaccgttacgactggcagctctttctcgaagtcaccggccccggcgggagcggaaaaagtattctggccgaaattgcgaccatgcttgccggggaagataacgccacgtcggctaccatcgaaacgctggaatcaccacgtgaacgtgctgcgctgattggcttctcgctgattcgtctgcctgaccaggaaaaatggagcggtgacggggcaggactcaaggccatcaccggcggggatgcggtctcggtagacccgaaatacaaggatgcatactccacccatattccggcggtgattctggccgtgaacaataacccgatgcgctttactgaccgcagcggcggcgtctcacggcgccgggtgatcctgcatttcccggaacagattgccccggaggaacgcgacccgcagctcagggataaaatcgcccgcgagctggccgtgattgtgcgccagctaatgcagaagttcagcgacccgatgaccgcccgcaccctgctccagtcacagcagaattccgacgaggcgctcagcatcaagcgcgacgccgacccggcatttgatttttgtggctatctggaggcactgccggatcctgacggtatgtatattggcaatgctaacatcatcccgcgtcagccgcgtctgtatttgtatcatgcctatctggcgtacatggaagcccacggctacaggaatacactcagccttaccatgttcggtaaaggactgccagccatgctgaaagagtacgggctgagttatgaaaagcgccgtaaaaatcagggcatacagaccaatctcacactcagagaggaaagcaacgccgactggctaccaaaatgcgatgaccccatagcgaaataa

SEQ ID NO: 372959 - DNA, 357 bp, Salmonella enterica
ttgattctggcttcggataaacctaaaggaaataatcgcattgaagttaaattagagtctctggcaattcttgaagaattatcaggtaatgacgcttttaatctttcgttggtgccggctgacgaatttaatcttcagcaatatactccatcaagaagagattatttctcgatttgcaataagtgctataaacagggagtcggtatcaaaatctatatgaagtatggacaggttttgactggtaaaacgacaggtgtaaatgcgtgtcaggttggtgtgaggaaatccaatggcaatcatatgcaagttatgtttgactgggtgagcaggatcacgtcttcggactacgctgaataa

SEQ ID NO: 372960 - DNA, 1119 bp, Salmonella enterica
gtgaaagtcctggcgcaggacaacaccctgaccatccaggttggtgccaacgacggtgaaactatcgatatcgatctgaagcagatcaactctcagaccctgggtctggattcactgaacgtgcagaaagcgtatgatgtgaaagatacagcagtaacaacgacagcttatgccgataatggtactacactggatgtatcgggtcttactgatgcagctattaaaacggctacgggtggtacgactggtacggcttctgtaaccggtggtgcggttaaatttgacgcagataataacaagtactttgttactattggtggctttactggtgctgatgccgccaaaaatggcgattatgaagttaacgttgctactgacggtacagtaacccttgcggctggcgcaactaaaaccacaatgcctgctggtgtgacaactaaaacagaagtacaggagttaacaactacaccggtagttgcttcagcagatgctaagaatgccttaatcgctggcggcgttgacactgccgatgctaatgccgcgacattggtcaaaatgtcttataccgataaaaatggtaagacaattgaaggcggttatgcgcttaaagctggcgataagtattacgccgcagattacgatgaagcgacaggagcaattaaagctaaaaccacaagttatactgctgctgacggcactaccaaaacagcggctaaccaactgggtggcgtagatggtaaaaccgaagtcgttactatcgacggtaaaacctacaatgccagcaaagccgctggtcatgatttcaaagcacaaccagagctggctgaagcagccgctaaaaccaccgaaaacccgctgcagaaaattgatgcagcgttggcgcaggtggatgcgctgcgctctgacctgggtgcggtacagaaccgtttcaactccgctatcaccaacctgggcaataccgtaaacaacctgtctgaagcgcgtagccgtatcgaagattccgactatgcgaccgaagtctccaacatgtctcgcgcgcagattctgcagcaggccggtacttccgttctggcgcaggctaaccaggtcccgcagaacgtgctgtctctgttacgttaa

SEQ ID NO: 372961 - DNA, 519 bp, Salmonella enterica
gtgcgccgggctggtggtgtacgagagcgtgccctgggcgtgggcgccgtggctgcgtaccgcctgcagtgcggctttcatattgcgcgggtcgttcatggcatcgaagacgcggaacacgtccatgccgtttttcaccgcgcgttcgacgaagcgttccaccacgtcatcggcgtagtggcggtagccgagcaggttctggccgcgcagcagcatctgcagcggggttttgggcatggcttttttgagttcgcgcaggcgcagccacgggtcttcgccgaggaaacggatgcaggcgtcaaaggtggcgccgccccagcattcgagggatccgtagcccacatcatcaagctgggcggcaatcggcagcatatcatcaaggcacaggcgggtggcgaacagggactggtgggcgtcacgcaggacgacgtcggtaatggcaatggtcatggattcctccggaaattaaacgttaaggtggcggtgatggtgaatggcggcggcaatcaccggctttaa

SEQ ID NO: 372962 - DNA, 2100 bp, Salmonella enterica
atgccggttagtgagtacaaccacatccttgtggcggtttcatttgctgtcgctatttttgcgtcctataccgcattaaatatggccggacgcgtagccggaagcgcccgatcaaacgccagaatatggctaatgggcggcggcttcgcgctgggcgtcggtatttgggcgatgcattttgtcgggatgctggcgatggatcacgcgatgaacatgcgcttcgatccgttcctcaccggcctctccatgctgatcgcgatcggctcctccctgtttgcgctatggctggttagcgctgaaaaactgcgcctgcgccgtttactaccgggcgcgctggtgatgggactgggcatcagcgcaatgcattataccgggatggcggcgttgcaatttgcttccattatcgcctggaatagcgcatgggttgccctctctatcattatcgcgctactggcgtcctgcggcgcgctgtggctcacgttccgcctgcgtcatgagggaacagatgtcgccctgaggcgagcaggcgccgcggtattaatggggatagctatcgccggcatgcattacgccggcatgaaggccgcacactttccccaaaactggccgatggagcatcgtggcgtcgatagcaactggctggccgttcttgtcagcgtggtcgcgctgactatcctgggcattactctgctggtttctttatttgacgcccggcttcaggcccgtaccgcactacttgcctcttcgctggcgcaggcgaaccaggaactggcgcagttggcgctgcatgatacgctcacccgtttaccaaaccgggtacttcttgaggatcgtctggaacaggccatcagcaaagcgaatcgggaaggcacgtctttcgcgctactgtttatggatctggatggctttaaagccgttaatgacgcttatggtcatgatatcggcgataagctactggtggcggtcacgcatcgtctgaaccaaccactgagcggtcagtttaccctggcgcggattggcggcgacgaatttgtgctgcttgcagaagtcagcgcgcctgacgaagcggcttcccttgccagcgcgctggtacattcgatagatgcgccctttacgatagatccgtatgaactggtcgtcacccttagcgtgggaatagcgctctatccgctggacggaaaaaacgaacgggaactgatgttcaacgccgatgccgcgatgtaccacacgaagcatacagggcgtaacggataccatttctttcagccatcaatgaatatgctggcgcaaacccaacttcagctaatgaatgacctgtggctggcgctggaaagacaagagctcaggctggtgtatcagcctaaatttcaggcccctgccggccccattgtaggatttgaggccctgttgcgctggtatcatccaaaacaaggcgtactgaatcctgaccagtttttaccgctggcggaaaaaacgggtcttatcgtcactatcggtagctgggtgatagacgaggcgtgtcgacagctccgcgagtggcacttacagggatacgccttatggtcagtggcggtaaatctgtccgccttacaatttgagcagcccgggcttgtggacaccattacgcggagcctggcccgacacagtatccgtcccgatttattgattctggaaatcaccgaaaccacggcgatgaacaagccagagcaaagcgtcgctatactcaccagattaacggaaatgggggttaaggcctctattgacgactttggcaccggttattccagccttctctatctgaaacgtcttccggcgtgcgaactaaaaattgatcgcgctttcgtacatgaactcagcgaggcaggcgacggcgcgaccattgttgcggctattgtcgcgctggcgaaagcgttaaatctgcaaattgtggcagaaggggtagaaaatgaaacgcagcaacaatttttgacccagttaggatgccatacgcttcaggggttcctgcttggcaagccgcgtacggcagaggaaattgctcgcgatattcgggaccctgccaatatattcacaaggccaatatataatatcaactcaaaataa

SEQ ID NO: 372963 - DNA, 834 bp, Salmonella enterica
atgatcttcacggtctttggtcagtgcgtggccggtggttttattgttctggctctggcgctgatgaagggcgacctgcgcgcggaaacgcagcagcgggtgatcgcctgtatgtttggtctgtgggtgctgatggggattggctttatcgcctcgatgctgcatctgggctcgccgatgcgcgcgtttaactcgcttaaccgcgtgggtgcttccgcactgagcaatgaaattgccagcggctcggtgttttttgcggtcggcgggattggctggctgctggcggtgctgaaaaagctgccgccggcactgcgcacactctggttgattatcacgatggtactgggcgtcgtcttcgtctggatgatggtacgcgtctataacagcatcgatacagtaccgacttggtatagcgtctggacgccgctgggcttcttcctgacgctctttatgggggggccgctactgggttatctgctgctgcgcatcgcgggcgtgaacggttgggcgatgcgtctgttgcctgcggtgtcggtgctggcgctggtgattattgccattatggtggccatgcagggcgcggaactggcgacgattcacagttccattcagcaggcgtctgctctggtgccggattatggttcgctgatggcctggcgtatggtgctgcttgcggcggcgttgtgctgctggattgtgccacagttaaaagggtatcaacctgcggtaccgttgctctctgtcgccttcattctgatgctggcgggggaattgattggccgcggcgtattctatgggctgcatatgaccgtgggcatggcggtagccagctaa

SEQ ID NO: 372964 - DNA, 1422 bp, Salmonella enterica
atgccgaatgtgcaggaaaaacagttgcgatggtacaacatcgccctgatgtcgtttattaccgtttggggattcggcaatgttgtcaataactatgctaaccaggggttagtggttgtcttctcctgggtgtttatttttgcgctctattttattccttatgccttaatcgtggggcaactgggctcaaccttcaaagagggaaaagggggcgtcagtacctggattaagcatacgatggggccggggttggcttaccttgcggcatggacttattgggtcgtgcatattccctacctggcgcaaaagccgcaggcgatactcattgcattgggatgggctttaaaaggcgacggctcgttgataaaagaatataccgtcgttgccttgcaggggctgacgctggcattgtttgttttctttatgtgggttgcttcccgggggatgaaatcgctaaaggttgttgggtctgtggccggaattgccatgtttatcatgtcaattttatatgttgtgatggcagtgaccgcgccagcaattacaaacgttgaaattgcgaccactaacatcacctggcagtcatttattcctcatatcgattttacctatatcaccaccatctctatgttggtctttgcggttggtggggcagagaagatctcgccttatgtcaaccagacgcggaatccaggaaaagaatttccgaaggggatgctctttttagccgtcatggttgcggtctgcgctatcctcggttcgttggcgatgggaatgatgtttgattcgcggcatatacctgacgatttaatgactaatgggcaatattatgcattccagaaattgggtgagtattaccatatgggtaattcattaatggtgatttatgccattgccaatactctggggcaaatcgccgctctggtgttttctattgatgcgccactgaaagtcttactgggtgatgcagacagtaaatatatcccgcagcgcttatgccgtactaacgcttcaggtacgccagttaacggttatttgctgacattagtgttggtcgctatcttgattatgttgccaacgcttggcatcggcgatatgaacaacctgtacaaatggctgcttaatctcaattcagtcgttatgccgctgcgctatctgtgggtatttgtcgcctttattgccgtcattcgactggcgcaaaagtacaaacccgaatatgtgtttattcgcaaccgggcgttggcgttaactgtgggaatatggtgtttcgccttcaccgcgtttgcctgccttaccggtattttccccaaaatggaggcgttcacgccggagtggacattccagctgacgttgaacatcgtgacgccttttgtcctggtcgggttgggattaattttcccactgctggcgcgtagaaacacataa

SEQ ID NO: 372965 - DNA, 435 bp, Salmonella enterica
atgtatgaacagcaggtattttataatggcgagccaatagactttaataacttagatttatgggataaatttaaagtcacatttggatttaatgttacagaaaaaaagaaacccaatggtaaaaaattcaattttgagtattgtggattctctacttttattacgccggttgatggcgttgacgggattttagcaaagtggttctcaaacaaacataatgtaattgtcccaacgccttatacattcggtcaggaccccattcctggcgtcaatctttatcataatacaaaagcaaaatttgttatggctaacggcggtaatagtcttccctgtgcgatggcaagatataacgcaaaaactggacaatttattcatataaccagtgatagtgagttttcagcaataatacgagaaacaagagtcataaaaaaataa

SEQ ID NO: 372966 - DNA, 1008 bp, Salmonella enterica
atgatagtaataaataattattttagtggtgttttaaaaagaggaataccgatttatactgaagagttagttcttcaaatgaaaaaggactctatgcaagtctgtgaattaacttgtccaaaagtcctataccctttacctgcttttatacataattttttattcatattctatgaacaaatacttactccgcttattggacttatattaaagtcaaaatttaatatctatccatataatagtacatcaattatagacgcgtacttgggtaaatcagtggttattattcatgatctaataagcttaagaaaaaagaaccattctttatccgcgaaatatgtgtcatattgtatgctcaaagcatcacaattaaaagccgattatatatatatatcaaaaacaactaagcgtgttatagatagcattgaactctttaaaaattgtaaaggctattatttcccaaacacattttttcgtttcgaggaaattgcgaaaaaaaatacgattcttgatcttggatatatattattggtaacaggggtgggtgataataaagatctcgatggtgctttgaaattatattcatctattagcaaggatgaacgattgccgcttaaaatattaggctgtggaaatgctatagagagggtaaaaaaaataattgatgaccatagagtccaaagtgaaattgaagttattcctttcctggatcttgatgatgttgtaagcctttattgtaactctacctttatttgggcacattcgaaatatgagggttatggaagagctgtagcagaggctaagttgtcccataaaaagattttatgtacacaaatatcagcctttatggaacaaaaagatgaaaatgtatatctttatactaatcaaaatgactttcacatccaatataaagctgtgttagctagcaagtataaagatatccatggacaattgatagaacatgaaatttttaaatcccaactcgagtttttatatggaaaaaagtaa

SEQ ID NO: 372967 - DNA, 1002 bp, Salmonella enterica
atgttattaatatatacgggttcgtatccagatgataaatgtggagtaggtgattatgtttataatctaaaccaagaaattaaaaagaattatacagttaacgttgtcaaactatccttattcgaattaatctataaaatagtttctaatagaaaaattatcaaacttattaatattcaatatccatcgattggattttcgacaaacaaaattgcggcttttaaacctcatgttgcatttatcttagctaagttagttggcttaaaaacatcgataacgctacacgaatttagtagtttatcaaagagagctcaatatttcctaaaaatttttaagcttgctgattatataatctttacaactcagtatgagaagaatataggtgaaaaaacattatttaattctgcaaaaacaagactaattcctatcgcatctaacataccttcttgccaaaagaaagaaaaaaaatttgatcttgttcattttggtataatttccaaaggaaagggaatagaagaatttatctggattattaaagagcttaataagaaaaatattaaattccgctctgccttgattggttatgttcctggtgctgacaatagttatgccaatttaattatagaacagtgtacagaacaaaagtgcgagttacttttaaataaatcagcagccgaaatatcaaatctgctagctgaaactgacatggctatattaccatatcccgatggcatctcagaacggagaggtactgcccttgctgcgatgattaatcgagtattagtattttccctaagggggcagttttcgtctgaatttgaaaatattgccgtattagggaacgataaaaatgatcttttgagtaaggttttatattatataaataatacagatagctttgccaaaattaatgatagtgcctatgagtactctgaaaaaagaaattggcagtcgatcgctcaactgtatataggactaataaacaatgatagtaataaataa

SEQ ID NO: 372968 - DNA, 1080 bp, Salmonella enterica
atgatatattatatttttattgtaatttttccgttcttttcatttgttaagaataaaaatataaaaatttacgccttgatgctaagttttttatttcttgtctcgttttgttctttacgttggcagactggtactgattggctcccctattacgatgatttcatgagtccagggaatcgacatgactttgaaatcgggtatgtattatacgtcaaattaataagatatttgacagataattatacattgtttctattcactacatcaattattcctatcgcgttaatattctggggatgcctgaaaacacaaaaaaatatatcattaactattctgtctgtttgtgttttttatagttattattatctggggtctttttttggggccgaaagaagaattattgcaattgggttatcttttttcgctttaatccaatataaaagtaataaaaaggtgcaatcgcttattcttattctatgtgcgtcgacatttcatatctcgtctttagttaccttatctgtttttttaatcaataagttatctttaaacttatataaaatattacttgtgcttggtgccattctatcattgcctttgtcacattatttatcagatataatttcttccgttattagtctaattcctgtcgaaattgttcgctataaactcactgtttatactcaaaatgcacaagaatatggttccataagtatatctggaattttaaaaagggtggtaatttctgctatttttctttacacattatcttttgatataaaaaataataaggcaaatttatttttggtaaaaacatatttatttggaactatcatatatttatttttatctccgatctcagccatgttctcagtaattagtatatattttactatagtcgaaatattgttgattcctgcagtattagtgcgtgtaggaatttttacacggattcctgctctgatttttatagtgattttttattttggctatcaagtttactctatactagggtcttatcctgaacttttctatccttacatatcggtattttcagaaattcagcgtcaaggtatttactaa

SEQ ID NO: 372969 - DNA, 1479 bp, Salmonella enterica
atgagtttacgacaaaaaacgatcagcggcgctaaatggtcggctatcgccacgatagtgattatcggtctggggttaattcagatgacggtgctggcgcggatcatcgacaaccaccagtttggcctgttgaccgtatcgctggtgattatcgcgctggccgacacgatctcggactttggcatcgcgaactcgattatccagcgtaaaacgattgggcatctggagctgaccacgctttactggctaaacgttgggcttgggattgtggtatttgcggtggtcttttggctgagcgatgcgattgcccatgttttgcataacccggatctcgcgccgttaatcaaaacgttgtcgctggcgttcatcgtgatccctcacgggcagcagttccgcgcgctgatgcaaaaagagctggagttcaataagatcggcatgatcgaaacgacctccgtgctggcggggttcacctttacggtgattagcgcccattactggccgctggcgttaaccgcgattctcggctatctggtgaacagcgcggtgcgaacgctgctgtttggttactttggccgcaagatttaccgtccggggctgcatttttcgctggcatcggtgtccacgaacctgcgttttggcgcgtggctgacggcggacagtatcgtcaattacatcaacacgaatttatcgacgctggtactggcgagaattctcggcgcaagcgtcgccgggggatataacctcgcgtacaacgtggcggttgtgccgccggcgaagcttaaccccatcattactcgcgtgctatttccggcattcgccaaaatccaggacgataccgagaagctgcgcgtcaacttctataagttgctttccgtggtgggaattatcaattttcccgcgctgttgggcctgatggtagtggcgaacaattttgtgccgttagtgtttggcgagaagtggaacagcattatcccgatcctgcaattgctgtgcgtagtggggctgttgcgctcggtcggcaacccgattggttcgctgctgatggcgaaagcgcgcgtggatatcagctttaagttcaacgtctttaaaacgtttctgtttatcccggcaattctcattggcggccatctggcgggggcgattggcgtgacgctggggtttctggtggtgcaaatcatcaacaccattctgagctatttcgtgatgattaagccggtactcggctccagctatcgtcagtatattctcagcctgtggctaccgttttatctctcattgccaacatttattaccagctacggcacaggaaagctggtcgacggttatttaccgttgtcaggggtattcgcactacaggttatggtcggtattttgagttttattttaatgattattttttcacgcaatgcgctggtgatggaaattaaaaatcagcttgttggcagtgcaaaactgaaaaagttattacgtgtcggatga

SEQ ID NO: 372970 - DNA, 1587 bp, Salmonella enterica
atgatggaatttaaaaaaaattatttttggcatgtatctgtaatcattattggtcttgccattggcttagtgcatcacatttatatttatccgaatttttttcacgcagattcagcagcatatcaagttttagcttcagccataagagatgaaggggttttacttccacatgattttttctacggcaaccaacttattatgctaaaaataagcccattcatagccttagccaactacattggtttttcaggatataaggcttatgcaataggcggtgcaatagcgatctgcgtttggttttatatttgcaatctaattatctctaaatattgtggaaataaatatttttcacttttactatcaacttgcttattcattccgcttggtatggatgatattgattttttacttggtcaggaatcgcatctttcgaatgtagtactttctattatgatatgcctaccggtcatcatatatattcaagaaagcaaaaagagttttttgtgtatttcttcccttgctgttattctaatgactgcagagcagccaattagaactttgattattatagcaccttttattttattcatactgattatattcagatcaaagacttcagttgtgtcaatgttatctatagctgtatcttttgttatcggcaagatggcaaatgattatcttttagacagacatttcccactcaaggtcgactattctcaagcatcgttgttaatatctccagataaagcaattgacaatctttttataattttaaagtcaatcctggtgtactcttcatcctctagcttggctgttggaagtaatgcaataggaatattgacacctttctactttatgggcttattgtatatacttttatttattgcaactattgtatatggcttaaaaatatttcttcatattttgattgatggcagaaaaactaaaactagtatttgtcgactagatctgttatgtgcattgggagctacaggttttgttttaggactgctacttatatcatgcctcaacccagaagggcgccatattttctgggcaacttgtatactaaaaatttctgtatttgccaccatttttaaaatttttaaaagtaatataaaaaataatgtgtattcatattcattaactattgcaatggctatatgcatgtcagcaatagcaccagtactatatacaacaaaagcagagtcttttagttataataaatccaatatgaattcagaaataaataaaaaaattacttcaattgtaaggttaactggaataaaatatatttatggagaggatttctggagaatgcaactattaaactcgattgatgcagaagtacactcttctgaactcacagactcttatgataaatttgtaattcctagaacatggttgtccagaccaagttggtactgcattaatggtgaggttttatattacacaaaagatggtaaggcggataaaataatagagtcagaattaaagagtaaaaacggaaaaatattgtataacggtgcggaaggaaaaatatggttagggcctgtaatatggagcaagcctaagtggtgtaattaa

SEQ ID NO: 372971 - DNA, 234 bp, Salmonella enterica
atggacgaaaataaactcaaagcgctggctgctgaactggctaaaggccttaaaaccaaagccgatctcaaccagttttcccagatgctgacgaagcttactgtcgaaactgcgctcaatgcagaactgaccgaccatcccgggcatgagaaaaacatgcacaataaagctcaaacatccgtaatggctactcgtcaaacatcctgctttgcggtgatggcgagattgaattga

SEQ ID NO: 372972 - DNA, 339 bp, Salmonella enterica
atggatgatgcactgctggatatgggtctgcggatagacgctgtttatcgcatccggaaagtctttcaggccgtccacacaggcaatcaggatgtcctgaaaaccacgatttttcagctccgccagcacattcagccagaatgttgcgccttcattttcggtcagtcacctacccggcagcgctttctggccttcggtgttgatacccagcgccaggaagacagttctgtttatgacgctgtcattttgacggatttttacgacaatgcagcccatgtaaacgatgggatacagcgcatccagttaccggttttgccactccgtagcctgctcttttag

SEQ ID NO: 372973 - DNA, 291 bp, Salmonella enterica
atgatgctgaatgtgttcgcgggcgtgtgtgacgacaaatacccgcagatcagcaaaagcaggcgtgcgcactgggaaaacctgaacacattcttcagctacctgccggatatccgccaggcgatctacaccacaaacgctatcgaatcactgaacagtgtgatccgggccgagataagaaatgcaaggtattcccgggagacgactcagtgtggaaggttatttatctggcgatcaaagatgtctcaaaaaagtggagtatgccgatccagcactggcggctggcaatga

SEQ ID NO: 372974 - DNA, 1248 bp, Salmonella enterica
atgatagtaatcagggtttttggtgacagtatatacctgatgtatgtgttaccagccgtattctacacgattactattatgctggcctttgctctgtcacatacagatgggaaaatgaagtggtcaatcgcagcgctaattccatgcgtaatcatttcatctcctatggcgtcaaccatgacactagagacatgtgtacatgtaggaactatcatatttgctctggtgtgcttaaatatgcttaggtatgataaacatacaacaattaaactgacaagcgtcacgactctcactgctgcatctgtattcagtgactcgatattcaactactatatcactataccgatagttgttacttttgttgttcatgtattgataaacaaagattttagcaagtggcgctatgtatttgcagttattgttggcgttgtcatagcaaagtttcttgctttagtggcaaattattttggtctactaaacacccccgggactcaacctccagcatttgttaattacgagaatataccatctaacctcaatcttttcattgttggcatcatccagtatttcgacgccttcattttcggaaaacagctttctgcaagcaatgcgatgatatttagtagatttgcagtgatgatattttggttagctcttttagttgtagctatcaaaaacaggtttaaagcgtcgtttgttgatactgcattatccatttcctcagtattgctaccagccgcatatgtagcaagtaacatgcctgtagaccttggcactacaaggtatctggttttctcttttattactggatccgctctaattgcacgttatctaaattcacaagccgatcaaagactctatgcttttgcttcaactatcatactgatttttattttcatcccaagcggaagatacgaactaccgaattcgagagtacaagatattagtaactttgttcgtgataataacctcggtgatggttacggcacatactgggttgcgtctgccgtgactctgtttaaaaacggagacgtaaggccaatcacgtttactgatgaaaacaaagcggttaggttaaactggctgtccaataaagcatggtacggttttaaatcaagatatatcgtcacagagttcaagcatgatattgataagatattaaaccagtatggacgggaagggcatataaaagagattgataacgcatatataatttactatgatgatgcaaggattgttatagagtag

SEQ ID NO: 372975 - DNA, 1077 bp, Salmonella enterica
atgagcgccacctacggccacccggccaccgaagcgctggtcgccacgcttgccggaaccggatatgacaccgggctggatatcctgaagctggaaaacatcgccgcgtacttccgcgaggtgcgcaaaaaatatcacgcctttgaaggccagctgaaaggctacgacagccgtattctggtggcgcaggtgccgggcgggatgctgaccaacctcgaaagccagctgaagcagcagaacgctgcggacaaactcaaccaggtgctggcggaaatcccccgcgtgcgcgaggacctcggcttcatcccgctggtgacccccacctcgcagattgtcggcacccaggcggtgctcaacgtgctgaccggggaacgctacaaaaccatcgccaaagaaaccgccggcattctgaaaggcgagtacggccacaccccggtgccggtcaacgccgggttacaggcccgcgtgctggaaggggctgaaccggtgacctgccgtccggcggatttactcaaaccggaactggctgaactggaagcggacgtgaagcgccaggcgcaggagaagggcattcagcttgcgggaaacgccatcgacgacgtgctcaccgtggcgctgttcccgcagattgggctgaaattcctcgaaaaccgccataacccggcggcgtttgagccactgccgcaggcggaagccgcgcagccggtggcaaaagcagagaagcctgccgcctccggtatctataccgtggaagtggagggcaaagcctttgtggtcaaagtcagcgacggcggcgatatcagccagctcactgcggctgcacctgctgcctcttctgctcctgccaccgccccggcaggcgccggcacaccggtcaccgccccgctggcgggcaacatctggaaggtgattgccgccgagggccagacggtggccgaaggcgatgtgttgctgattctggaagccatgaagatggaaaccgaaatccgcgccgcgcaggccggcaccgtccgcggtatcgcggtgaagtccggggacgccgtctccgtgggcgacaccctgatgacgctggcgtaa

SEQ ID NO: 372976 - DNA, 1419 bp, Salmonella enterica
atgattacaccaataattatggctgggggaaatggaagtcggttatggccactttctcgaacgttatatcctaaacagtttttatgtttagatggctctcaaagtatgcttcagaccacaattacgcgaattaataatttgaatgcttcagatcctattgttatttgtaatgagcagcacaggtttattgttgcagaacagcttaaagaattatctaaatcatctggcgatataattttagaacctgttggacgtaacacggcccctgcagtagccttggcagctttaaaatgccttaagaaaaacgctttactgttagtattggctgctgaccatataattaaggacgaagaaacgttttgtaagactatacaagacgctagaaaatatgccgaagcaggaaaattagttacgtttggtattgtacctaccatgccagagacaggttatggttatatacggcgtgggcaagctcttttctctgcagaaaatgattgttctttggcgtttagggtggctgaatttgtcgaaaaacccaatctagaaacggctcagagttatcttgattctggtgagtattactggaacagcggtatgtttttatttagggcagatcgatatattgaagagttaaaaaaatttcgccctgatatttataaagcttgctcattagcgatggaatctgctgttacggatctcgatttcattcgagtggatgaagattcattttgcgcttgcccggatgaatcaattgattatgcagtgatggaaaagacgaatgacgcggttgtcgtacctttaaatgcgggttggagtgatgtcggttcgtggtcttctctttgggagataagtgataaagatagtaatggtaatgtgactaaaggcgatgtattaagccacaatgcagataattgctatctccatgcagaaacgggtttggtaaccgctgttggtgtcaaagatcttatagtcgtgcaaacgaaagatgccgttttagttgcaaacacaaactgtgttcaagatgttaagaaaattgttgagaaaattaaattagaaaatcgtcatgagcatataactcatcgggaagtttatagaccatggggtaaatacgattcaatcgatttcggtgagcgttatcaggtaaagagaatcactgtaaaacccggagaaggaatttcagagcagcaacattatcatcgcgcggaacactggattatcgttgcaggtaccgcaaaaataaccataaaaggtgaagtgaaaattttaactgaaaatgaatccgtatatattcctgtcggtgttaagcactgccttgaaaacccagggaaaattgcacttgaacttattgaggtaagatccggcgcatatttaggggaggatgatattgttcgtttttcagataagtatggtcgtaattaa

SEQ ID NO: 372977 - DNA, 684 bp, Salmonella enterica
atgcaggcagataaaacgctgaatatcggacgggaccgtctgtttaatctgctgggtgaataccggctcctggtacccgtgaaacgggcatatcacaaaaccaccaacagccatcatcgcttttaccggcatcctaatctgctgaaacccggccctgaacaggttaccgcccttgagccagagcaggtctgggtcgccgatattacttaccttccactacgcagcggcacggcctatctgagtctggtcaccgatgcctgctccagaaaaatcgtgggttaccatgtcggggaaaacctgcagacagaaaatgtggtaaaggcgttcaggcaggctctgaggcggagaaaaacgacaggtccgctggtacatcactctgacagaggactgcaatactgttcggtactttatcagtcagttcatgagcgaaacggaataacctgttcaatgaccgatggttacgactgctaccagaatgcgctggctgagagaataaacgggatactgaaaaatgagtttttactctcgcgtcctgcagacctggagcaagcgcgggaaatagtaaaagagtccgtggcaatttataaccatgaacggccacacctggccctgaaatacaaaacgcccgatgatgttcatcaggcgttttacagacaaaaaactgtcaacctatatcaggactag

SEQ ID NO: 372978 - DNA, 402 bp, Salmonella enterica
atgatgactgagttcaaacgcacccaacgcgattatcctctatcctttaaaatagccgtcgttgagcaggtcgaaaaaggcgagatgacctataaacaggcccagcagcgatatggcattcaggggcgctccaccgtacttgtctggctgcgtaaatatggccggcttgactggagacccggacttcctgacctggtgaagaggaaactgcctgtggctcagacaactatcccgctgacacccgagcaaagaatcagggaacttgaagaacagcttgagctggcaaaccagaaagctgagttttttgagtccgttatcaacgtcctgaaaaatgattacggggtaagtgttgtaaaaaagcggcccggcaagtcctcacgcaaagtcaggcccccaaaataa

SEQ ID NO: 372979 - DNA, 363 bp, Salmonella enterica
atgttgaagttattcgctaagtacacatcgatcggtgttcttaacacgcttattcattggggcgtatttgctttttgtgtgtatgggatgcatacgcatcaggcgctggcgaacttttccggttttgttatcgcagtatcgttcagcttctatgccaatgcgcgcttcacctttaacgccagcaccaccacgcttcgctacatgatgtacgtgggatttatgggaacactgagcgccgttgttggctggatggctgacaaatgttccctgccgccactccttactcttgtcaccttttcagctatcagcctgacatgcggattcatttattcaaagttcattgtctttagggatgcgaaatga

SEQ ID NO: 372980 - DNA, 987 bp, Salmonella enterica
gtgtgtactctcggtattgatgtcagtaaaaataaaatcgatctttgtctgcttactgccggccccggcggtaaaaaaaagcacaaggttctgactaacgaacccgccgttgcccataaagttatcgactggctgaacgcacaaagatgtgttcctgaaagcgtgactgtcgtactggaagcgacgggtatttaccatgaaaatctggcgtatggcctgcatgaggccggtgtcagcgtctgcatggccaacccctgtcgtgtccgcgaatttgcccacgggatggatatcctcaacaagaatgatgctgtcgatgccttcgtgctggcctgttatggcgagctgaagcccccggctgtctgggttcctccttcgcctgaagtacgtaagctgagggcattgctgcgccagcgggatgcgctgagagaggatgtacagcgtacggtgaaccggctggaaaaagcgaattccacatccacaccacaggaggtcatccgttcacttgagcgaacaaagagctggctgaacgaggaactggcccggatagagaagctgataaccgatcatacggataacgatccggggctgaaggctgatctcgatttactgaaatcaatcaagggagtgaaagatcaggtcgggcgggagatgctggcgttgctaaaagacgggacgttcaaaagcgcctcacaggtggcggcctatctgggactgacaccggtagagaaaacgtcggggagctcagtgcgtggcagaccacatatgtcaaaaacaggaccgtcaggagtgcgggctaagctgtacgttgcagcgctgaccgcgagccgctggaacaaacaggcgaaggctatctatgaaaggctggtcgcaaagggcaaggcgaagaaagccgcgctgggagctgtgatgcgcaaactggtacatttatgcttcggcgtgttgaaaacgcggcttccgtgggatgaaaattatgtagctaccgcttga

SEQ ID NO: 372981 - DNA, 672 bp, Salmonella enterica
gtggataatcttcgcccccgggtgtttttccagaaacgcttccgccagcagcccgacgatgtagtacccctcgataaactgccctttctcatcgaacaggaagcagcggtcgaagtcgccgtcaaaggcgatgcccatgtccgccccgtgttcaataacggccttgcgggtgtcgtcgcgacactccggcagcaacgggttgggaatgccgttcgggaaggtgccgtccggggtgttgtggattttgatgaactccaccggcgcgcccagcgccttcagacgcgcttcgatggcgtcaatgaccggccccgccgccccattgccggaattcaccaccagcttcagcggggtgagattgttgacgctgatatagccgagcaggtggccgatgtaggcgtcgcgcaggctgatttgtctgtagctgccgcgcgcggcctcgttcaccggcgggaagtcgcccgcttccgccagacgctgaacgtcgcgcagaccggtgtcgccgcttatcgggcgggcgccctcgcgcaccagcttcatgccgttgtagtccatcgggttatggctggcggtcacctcaataccgccgtccacgccgaggtggaaggtggcgaagtaaatctcttcggtgccggacatgccgatatccagcacgtcgacgcccgcgtcctgtaa

SEQ ID NO: 372982 - DNA, 618 bp, Salmonella enterica
atgacaacccagtatggattttttattgattccagtcgttgcaccggttgcaaaacctgcgaactggcctgcaaggactacaaagatctcactcccgacgtcaacttccgccgcatttatgagtatgcgggcggtgactggcaggaagataacggcgtctggcaccagaacgtctttgcctattatctctccatttcatgcaaccactgcgaagacccggcctgtaccaaagtctgcccgagcggcgcgatgcacaagcgcgatgacggttttgtggtggtgaacgaagaggtctgtatcggctgccgctactgccacatggcctgcccgtacggcgcgccgcagtacaacgcggccaaaggtcatatgaccaagtgcgacggctgttatgaccgggtggcggaaggcaagaaaccgatttgcgtggaatcctgcccgctgcgggcgctggattttggcccgatagacgaactgcgtaaaaaacacggagagctggctgccgtcgcgccgttgccgcgcgcgcatttcacgaagccgaatattgtgattaaacccaacgccaacagccgcccgaccggggacactaccggttatctggccaatccgaaggaggtataa

SEQ ID NO: 372983 - DNA, 504 bp, Salmonella enterica
atgccgggcaactgcacgcattatgggcgttggcctcaacacgattttacgtcacttaaaaaactcaggccgcagtcggtaacctcgcgcatacaaccgggcagtgatgtgattgtctgcgctgaaatggacgaacagtggggctacgtcggtgctaaatcacgccagcgctggctgttttacgcgtatgacaggctccggaagacggttgttgcgcacgtattcggtgaacgcactatggcgacgctggggcgtcttatgagcttgctgtcagcctttgacgtggtgatatggatgacggatggctggccgctgtatgaatcacgcctgaagggaaagctgcacgttatcagcaagcgatatacgcagcgaattgagcggcataacctgaatctgaggcagcacctggcaaggctgggacggaagtcgctgtcgttctcaaaatcggtggagctgcatgacaaggtcatcgggcattatctgaacataaaacactatcagtaa

SEQ ID NO: 372984 - DNA, 330 bp, Salmonella enterica
gtgaaagaaatcgattgcttttcacttcaactaaaaagagcgcagtctatggcgttttgtgtttctcatcacaaaacgaataatattatgtcaccacggctgtcaattaattgccggatggtgacgctggcgtcttctgcaacctctatacccttcaccggcctgataagcaaaaacccgccagcttacactgacgggttttatgaagagatgatactgaccgataagccgctttcttttgggtatagcgtcgtggacagtcattcatcctgtcgcccggtaaaagcaaaaacccgccagcttacactgacgggttttatgaagagatga

SEQ ID NO: 372985 - DNA, 495 bp, Salmonella enterica
atgatactgaccgataagccgctttcttttggacatagcgtcgtggacagtcattcatcctgccgccctgtaaaagcaaaaacccgccgaagcgggttttatgaagaagtgaaactgaccgataagccgggttctgtcgtggacagtcattcatctaggccagcaatcgctcactggctcaagcagcctacccgggttcagtacgggccgtaccttatgaacccctatttggccttgctccgggtggagtttaccgtgccacggactgttaccagccgcgcggtgcgctcttaccgcaccctttcacccttacctgatcccacttgcgtgggccatcggcggtttgctctctgttgcactggtcgtgggtttcccccccaggcgttacctggcaccctgccctatggagcccggactttcctcccctccgcccgtctccccgaaaggacgacgacgaagcggcgactgtctggtcagcttcggcgcgcagtatag

SEQ ID NO: 372986 - DNA, 948 bp, Salmonella enterica
atgaacataacaatcgcaacattgggtgaattgctcgtcgagtttctggcaaaaaaagagaaccagggattttcctcaccgggggaattttgggggccgtatcccagtggggcgcctgccatatttgccgatcaggttgctaaacttggttttcgttcattgttgtttagctgtgttggcaacgatgcctttggcgttatgaatattacccgcttgtcgcgcgatggcgtaaatgtacagggaatttccgtactgccgaacgccacaacaggcagtgcttttgtcagctaccgaagccaggcccagcgagattttattttcaacatgccggacagtgcgtgcggtttgctgagtgccgaccaccttgatgaaacattactcaggcaatatcgccactttcatattatgggatcatcattattttcctttcgtttgatcgatgccgtacgcaaggcgatcagcattgtaaaagaaaatggtggcacaatttctttcgatcctaatatccgtaaagagatgctaaagatccgcgaaatgtcgcaggcctttgaatatattcttgattacacggatttcttcctgccaagcgatggcgaactggattatttcggcctgagcaaatcccgcgatgaagagaaaattgtcgcaaggcttcacaagcgtggaattgcccatgtcatcattaaacgtggcgcccgtggagccagttactattcaaaagacgaacaacatcatgtggctgggtatccggtgaaggtggttgatcctacaggcgctggcgattgctttggcgcaacctttgtcagcctgtttcttgcgggatattccgtacccgatgctttagcccatgctaatgccgcaggatcgctggctatctctgcgcgtgggccgatggaaggcacgtccacgctggcacaaattaaagaattgatgaggcagcagaattaa

SEQ ID NO: 372987 - DNA, 834 bp, Salmonella enterica
gtggcaaaaccatctaccagcctgttgaaaaggcgtctggacattgccgaaatcgtccgtaaaaacggcgaaataaaagtagacgatttggctgaaatgttatcggtttcaggggtaacgatccgtaatgatctcaattacctggagcaacaaggctatctgaaacgctcctttggcggagcgatttacacggcccaacccgtcagagcagcggtaagccatgaagtggtgcagtcgcaggcgttagagcatagcgtagagcttgaactggctaagcaagttgcccgtctggtctgcgacgacgataccgtgtttctgggggccggagaggtgttgcgtaaagcgcttcctttcatgggcgattatcgggatctgtgccttatcatcaacgatcttagccatgttgcaccggcccgtgattatatcgatggtgaaattgtgttgttgggcggtgtactggggcatagtggtcaggcgttggggggcgaaatcgccatccaatctttgcaacaatttcaaccgtcatgttgtctggtgatggtggaccatatcagcgaggatggcacgctcaacgtgaaaaacgaaagtgcagctgctttgctaagtgaatgcctgcgccttagtggacagagtattgccgtggtggcgcagcgtccgattcatgatgtggcgcgttatccggtaggaaaactgaatacgctgagcgcgattattacgccacagattgtcgccgctgagtaccactcacggtttctggccgacggcttaaccaacagctataccaataacgaatgtctgacctggataaacccgaccctgcatcaggcaagatga

SEQ ID NO: 372988 - DNA, 855 bp, Salmonella enterica
atgttcattatttccagtaaaaatatgctccagaaggcccagcatgcaggctatgccgtgccagcctttaacatccataacctggaaaccttgcaggtggtggtagaaaccgccgcagaaatgcgctcaccgctgatcgttgccggaacaccaggcacgtttagctatgccggaatgggtaacattgtggcgatcgcgggcgatctggctcgtgaatacaatctgccactggccattcatctggatcatcatgaatcgttagccgatattgaaagcaaagttatggcagggatccgttcagtcatgatcgatggttcccactttccctttgaagagaatgtggcgctggtgaaaagcgtggtcgatttttgccatcgctacgacaccagcgtggaggcagaactgggccgcctgggtgggatcgaagatgatttagtggtagacagcaaagatgccctttacaccaacccacagcaagcacgtgagtttgtggcgcgcaccggcattgattcgctggcggttgctatcggcacggcacacggcatgtatgccgctgaacctaaacttgattttgagcgactggcagaaatacgcgctctggtggatatccctctggtattgcatggggcatctggtttgccagaaagcgatattcgccaggccatcagccttggggtatgcaaagtcaatgtcgccaccgaactgaaaatcgccttctccgacgccttaaaagagtatttcctacaaaacccgaaagccaatgatccccgccactatatgcaaccagcaaaacaggcgatgaaagaggtggtacgcaaagtaattcatgtttgcggctgtgaagggcaactgtga

SEQ ID NO: 372989 - DNA, 915 bp, Salmonella enterica
gtgatctacacgctaacacttaatagcgcgattgatatgaatatatttagcgatcctttacagccaaatattgtcaatcgcactcaccacaccgagttttgcccaaatggtaaaggggtaaatgttgcgctggttctggatcactttcaaatacctgcgcatatattaggcatttttggtggtttcaccgggcattatattgtagaaagcctgcgtacccgaaaaatgccagtcacaccagcatgggtagaagaacccacgcggattaatattttcattcatgacggtaagcaggaatataaactggtcaaccctggctcatatattccagatgaatgtaaacaacaaattatcacgattatttcgcaactgcccgatgcagactatctggtgataagcggcagcctgccacaaggtattgaaagccgcttttacgcagaaattatgcatatttgtcagcaaaaaaatatcggcgtaattttagatattagtcatccgtcattacgtcagttactggagttcaaaccgttattaattaaaccaaatgatgaagaggttaaagcaatattcggtttaactgtctctgacgacaatgatgcgaaaaatactctaaccactttacatgcacttggtgcacaaaatgttctgctaacccttggcgctaaaggaatgtatttctccaatgggattgattactggttttgtaacgcgccaacggttgatttggtgagctccgcctgtgcaggcgatgctgcactggccgcctttctcagccagtggttatctacaggagaagtggaatatgccttatctcttgccagtgcaacaggagctgatgtcgcaagttctgccggactaggccaacttgcggcaatagaaaccttactttcgcaaatcctcgtcagaaagctgtag

SEQ ID NO: 372990 - DNA, 1428 bp, Salmonella enterica
atgaaaaagatcattgcagtgaccggctgccctaccggtattgcgcatacatttatggctgaagaagccttaaaaaatgccgcgaaaaaattatctgttgaaataaaagttgaaaccaatggtgccagtggcgttgaaaatgccattcaacctgctgatctggtagatattgccggagtcattattgcggcggataaagatgtcttacctgatcgctttaatggtttaccggttattgaagtaccggtaaaagaagcaatccatcatcctgcggagctgattaacaaagttattaatggtgaagccccaatacgtaaaggcgaatcaaccaccagcacggaaattatcgaaaaagaatcactggggcgacaaatttataagcacctgatgagtggtgtttcaaatatgctaccttttgtagttgccggaggcatattaattgcggtgtcgtttttatgggggatttattccgctgatcctaattcagctgaatacaatgcaaccgccgctatgctaatgaaaatcggtcagcaagccttttcgattatggttccggtctttaccgcttatattgcattctctatttctggcagaccagggatggtggctgggtttgtcggcggcttactggcaaatgctaccggcgcaggatttctcggtgggataattgccggattcgccgccgggtacctgatgttatgggtaaagaatcgactcgaaggcttaccgcgtcagtatgaaggcctgaaatcgatttttattatgccgctcattggcgtactggttattggcgtgttgatgtcgctgcttgggcaacctgtcgcagctatcaataatagcatgatgaaatggctggcatcgctacaggaagcgaatccaatattgctgggtattgtggtgggtgcaatgtgctcttttgactttggcggcccggtaaacaaagccgcttatgtcaccggcacgcttttactgggccagggcaacttctactttatggctggtgtgtctgccgcatgtattactccaccactggtaattgctctggcgaccaccttctttccaaaaggttttagcgaggaagaacgtgccgcaggcatggttaactatatcctcggttgtacacacatcactgaaggcgcgattcctttcgcagcgaaagatcctttgcgtgtcatcccgatgatgatgattgcttccagcatttccgcagtacttagctacagcttgcgtattcaggttccggctcctcacggcggcttcttaattttacctttggtgagtcagccgctggcctgggtgttatgtatccttgcgggctctgcatgtggtgcgatgatgcttggcctatggagattgtgggctgtgcgcaaaaattcagtcaacacaactcctgtagcaaaggctggaggtcagaatgcagctctgtga

SEQ ID NO: 372991 - DNA, 807 bp, Salmonella enterica
atgcagctctgtgaacacgatatttttatcagcgatgagcgcctcgataaagtcaccgctctgcaccgtgtggtggaaaagttatctgcggctggcaataccacgactgactatttacgcggcatgttggatcgcgaagcacagatctccacttatctgggaaatggaatcgcgatcccacacggtacgccagagtctcacgatgcggtattacaaaccggtgtaaaggtaatcgtttttcgccacggcgttgactggggtgacggcaataccgcgtatctggtcaccggaattgccgcgcgctccaatgaacatcttgagattttgcgccaactgactcgcgtgctcagcgatgacgctattctgcaagcactggctaaagccgaatcccccagtcaggttttagcgctactgactggatcgacgaccaatacgccagcagccgtggagttgcaggagggtgagcaggcaacgtttgtcatccataatccgcatggtttacatgccagacccagtgcggtactggtgaagtttatcaaacagtttcaaagccacattacggtagaaaatctggatagcgcctccggcccggtggacgggaaaaacctgatgcgagtggtgtcgctcggcgcgaaaaaggggcatcgcttgttgttccgggcgcagggcgaagatgcacagcaggcactacgtgaaatcggggagcttatcgcctctggtgcaggcgagatgatcaccgttcccgttaccccaccaccagaagtcatgcagccaaagcgcagttggctatctcgattgtttaattag

SEQ ID NO: 372992 - DNA, 1272 bp, Salmonella enterica
gtgaaagaaataattgctcgtcataaagcaggagaacatctgggcatctgttcagtttgttctgctcatcccctggttatcgaatcagctctgcttttcgatctcaatactgacaacaaggtattgattgaagccacatccaatcaggtgaatcagtttggcggttataccggaatgaaaccggctgattttcgtgattttgtttatggcattgctcaggaagtgggatttccacgtgagcggttgattcttggtggcgatcatttagggcctaactgctggcagaacgaaccggcagcggcggcaatggaaaagtcggttgagttaataaaagcgtatgtcgccgctggttttagcaaaattcacctggacgcgtcaatgtcctgcgctgacgacccgacaccgttggatccgatggtcgttgcacgccgtgccgccgtgctttgtaaagcagcagaagagaccgcaaacgaagaacaaaaatgccatctgacttatgtcatcggcacggaagtgcccgttcctggcggtgaagccagtaccatcggcagcgttcatgtcacccgcgaagtcgatgctgcacgtacgctggaaactcaccaaatcgcgtttcgtgaatcaggtctggaagaagcactgtcacgcgtgatcgccattgtggtacagccgggcgttgaatttgatcatacccagattattcattatcagccgcaggcggcacaggcgctctccgcatggataaaagaaacgccgatggtctatgaagcgcattcgactgattatcagacgcgacaggcctaccgtgcgctggtacgcgatcattacgccattctgaaggtcggcccggcgctcactttcgcgctgcgcgaagccattttcgcacttgcgcaaatggaaaacgagctgatctccccggaacaacgtagtcgggtactggaggtcattgatgaagttatgctaaacgaaccgggctactggaaaaaatactaccgtccaacctggagccaggcgatggtcgacatccactttagtttgtctgaccgtattcgctattactggccgcacccgcgtattcgtcaaagcgtagagaagttaatcgccaatctgaacaacgtcacattgccgctgggattaattagccagtttatgcccgtacagtttgaacgcctgtctgagggcgtgctcacccctacgccgcataacctgattattgacaaaattcaggatgttctgcgcgcttatcgcttcggttgcacgccggatgtcgcctga

SEQ ID NO: 372993 - DNA, 198 bp, Salmonella enterica
atggcttttgtggatggggttgtgattatgaatgagccgcgttgtattgctcagttactgcgtaacgaaagccccagggcgattgacttcaccatcacccacgggaaggggcgtaagggaatcattatccgtaccaaaaaacagagtccgttaaaaaaggctctgacctttctgaaaagccggagggtctggaaatga

SEQ ID NO: 372994 - DNA, 225 bp, Salmonella enterica
atgccggacaacgtagattttattcaggagcaacaggctgaattactggagcgccagattaacgcggcaagggtaaaacattgcggtgcttctgcgctggtttgcgaagagtgtgatgcgccaatacctgctgcccgtcgtgcggcttatccgtcagccacgcgttgtgtttcctgtcagtcagtctttgaagcaaaaaacaaacattaccggagaacggcatga

SEQ ID NO: 372995 - DNA, 672 bp, Salmonella enterica
atgaaaacaaaatggtttactgccaacttccctgctggacttgatggtttatatcagtctatcattaacactccttttgatagtgataaaggctggggatttagtatcaactcatatgaagaaaatgcaatatcatctcgatacatcgagaaagtagaggtcaacgagataatcgttgatccatatggaaacgagactcaatatacacagctaaaatatattcaatttaacttttggctttacacaacaaaaggtaaaaacttcatcttaatcattgagtcgcctcccagaagcattaagaacttcatatcaaacataattaaatcaacacattctgattttaatgtgtcaaatctcaacatcaaaattgaggacttcatttatttcctgaccccgcactttgaaaaaatacaagtgcacaaggcaaaattaaaagacttaacgtttagcaaacacacatccggcatactggaacttgagtcatcaagtgacgcacttatggaaataagaaacattttcaaaaatgcaaattttacaattgataaagttaaacttaatgttaaggatgtgaccggttatgagtcattagaaattaacacaaatgggtccatttcactttcagagcaaatttttgacaaggtgtatcgaaccatagaaaggtttgccctttaa

SEQ ID NO: 372996 - DNA, 1113 bp, Salmonella enterica
atgaaaattggattatatagtgtaaatgataaggcaatgtttgacgcattgaatcaaactaaagtcactcatgaagatatgaaaagtctcttttttaaaagaggaatgattatatccaaagagactaaacgaaaaacattggctttggatttttccagatactatcatggctattctgattttgaatttctttcaaacatactcggttctgttgggcggagagaaaaagtatcaattaacattattaatacaaatatagataaaaatagtatggaaaatactattaaatctatttgtgaagatcttcaaaaagaaggcgatataactaatataaattacaccgagaatggttttgaagtatcaataaaatatgtgaaactagatttcaaaatgagcgagtttcgccaatcctcatcacgtgaagccaaaatacaagttgaaatgaatgaaagcggtgaatttatcacccgtttccctcaaaatgctaaagcaagggaattcaacgagcgcctcgtggagaagatcaaagaagacaacaatgaggatccagccagtcttgatgaaatttcgctcgaaactgttaaatcaccagcggaaagaagcaagttttttgagcaactcatctcaagcatacctaactacaaatgcattgacgtatcggatgtatacgttacgcatccaattcttgagtcaaataagtctaacgaaaatgaagatgattctgatgatgacgatacaattattgacacaggatatcatatctccaaagcttcactaaaagggcgcagcgttcttgactctctcgagtttaaagagttgttaggaaaaggattttatattaccaaaatcatttggagttctgttgttgacacttataaagactcggacaaatatgaattcgaggctcaatttgtcgacccagataattgcaagttattctcgtatatcgttcgcggtgtttataagtacaaaaatataaatgaatatgcaaatcgtcaaaatgtagataaagagaaggaaaaactgctattattagcacttgaaaaaaccgctcgcgaaatttcaaacagtattatcgcctcaaacacaattgaggttgttactgataaataa

SEQ ID NO: 372997 - DNA, 1065 bp, Salmonella enterica
atgtcaggtgaaactcaaaatatttcagcaatggcagaaaaaatatcttcagacctattcaaatggtttaagtgggaactcgttggtccaaccaatgaaaactttccatgcatgaaaaaagatcaacataaaacactagccggaacacatccaactgatgttgtattttcttataaagatccctatttgaatagaactatttttttaaatactgatttaaaaagctatattaaaggctcaattacagcaactaaaatgcgcaatgctttagtatcgctggctaattctattgactgtgctcaaggttgtaaagaatggaaggagcgttattcttataaaagtggtgcgtcagaagtcagaggcatgctctttgtatacaaccatgacggagactttgaccaatctttttatgatgtattctatcagtctcacaatactgaaactgataagaagaaaagaggtattaatcttgacaatataccggtaagagccggtcaaaaaatacacatcattgaaccaagaactataaactacttgcagtcaataatctgcgatttatcacaactaagccacaaaagagagtttccactcggtaaaaaatatcaattcttttacccagacctttcactacataaagtaagcggttcgcccgaagaacttccagcaactgtagaattattgacaggcccattccttattataaaacataatgacgtcagacattgcaatgaagaaacatcacaatgggaaaccacatttaaacatggttacattatttattacaatggcgaaggaaaaaacgagctagagtttatttacattctagacacgctatctaaatatcaattactggatggcaatgaaaatataagaattagaatagttaaccctaacatacataaagatgttcgcagtatttttatgcgtgcgaaggatagttattgtcaagaatgggggttcgatgaacataaaaaaacgataatagatgctattgattttcaacaggtagaatttacaaagcctcgttttagttcggtagagattggttgggagcgacaggcatga

SEQ ID NO: 372998 - DNA, 1047 bp, Salmonella enterica
atgggtaagcaaaaatcccgtaaagccgccgcgcagaaagcccgcgcaccacagcaactaaaagccagcgcaccgcaaaaaatggaggcattcaccttcggtgagccggtgccggtgctcgataagcgcgatattctggattacgtcgagtgcatcagtaacggcaaatggtacgagccgccggtcagcttctccgggctggcaaaaagcctgcgctctgcagtgcatcacagctcaccgatttacgttaaacgcaacgtgctcgcgagcacctacattccgcatccactgctgtcccgtcaggatttcagccgctttgcgctcgactatctggtattcggtaacgcctttcttgagcagcgccacagcgtcaccggacggttaatcaaactgctgacttcaccggcaaaatacacccggcgcggggtcgatgactcggttttctggtttgtggaacacttcactcagccgcatgaattcgcacccgataccgtgttccacctgctggagcctgatattaatcaggagatttacggcctgcctgaatatctcagcgcacttaattccgcctggctgaatgaatccgcgacgctgttccgccgcaagtattaccagaacggcgcgcacgcaggttacatcatgtatgtgactgacccggcgcaaagcgcgactgacgtcgaatcgctgcgcgatgcaatgcgtaactctaaagggctcggcaactttaaaaacctgtttttctactcaccgaacgggaaaccggacggcataaaaatcgtgccattgagcgaggtcgccacaaaggatgactttttcaacatcaaaaaagccagcgccgccgacctgatggatgcgcaccgcgtaccgttccagctcatgggcggcaagcctgagaatattggctcaatgggtgacgttgagaaggtggcaaaggtctttgtgcgtaacgagttatcgccgctacaggacagattcagggaggtaaacgactggctcggcatggaggtcatcaggttcaaagagtacaccctcgacaacccggaataa

SEQ ID NO: 372999 - DNA, 1770 bp, Salmonella enterica
atgaccatttccaccgatacaaccttattgcatgacccgcgacgacaggcatcgctgctttactggcagggcttttccgtgccacagattgccgaaatgctgcaggtcaagcgcccgaccgtgcaaagctggaaacagcgcgacggctgggacggcatcgcaccgatttcccgtgtcgaaagcagccttgaggcgcgcctgattcagctcatcgccaagccgcaaaagtcaggcggcgacttcaaagagattgacctgctcgggcggcagattgagcgactggcgcgcgtcaaccgctacagccagaccggcaacgaggccgaccttaaccccaacgttgccaaccgtaacaaaggggagcgtaagaggccgaaaaagaactttttcagcgatgaggctgtcgcaaagctggaagaaattttcttcgaccagtctttcgaataccagttgcagtggtaccgggcaggactggcgcaccgtattcgcgatattctcaaatcccgccagattggcgcgacgttctacttttcccgcgaggcactgctgcgcgcgctcaagaccggccataaccagatttttctgtcggccagtaaaacgcaggcttacgtgttccgggaatacatcatccagtttgcgcgactggttgacgtcgacctgaccggcgacccgattgttatcggcaacaacggcgcaaagctgatttttctcggcaccaattccaacaccgcacaaagccataacggcgacctgtatgtcgatgaaatattctggatcccgaattttcagaagctgcgcaaagtcgcatcgggcatggcctcgcagaagcatctgcgctcaacttacttttcgacaccttccacgctggcgcacggcgcttatcccttctggtctggcgagctgttcaacaaggggcgcgccagtgctgctgaccgcatcgaaatcgacatcagtcacagcgcgctcgccggtgggcttctttgcgctgacggacagtggcggcagattgtcactattgaggacgcccttgccggtggctgcaccctgttcgacctcgaccagctcagacgcgaaaacagtgatgaggactttaagaacctgtttatgtgcgagtttgtcgacgataaggcatcggtattcccgttcgaggagctgcagcgctgcatggtcgacgtgatggaaacatgggaggacttcgccccgttcgccgaccacccgttcggctcgcgcccggtctggattggctacgacccgtcccacactggcgacagtgccggatgtgtcgtactcgcgccgccggtggtttcgggtggcaagtttcgcatgctggagcgtcaccagtggaaaggcatggactttgccgcgcaggcagaaggcatccgcaggctcactgagaaatacaacgtcgaatacatcggcattgacgcgaccggcctcggtctcggcgtattccagttggtgcgctcattctacccggcggctcgcggtatccgttacacgccagaaatgaaaaccgcaatggtactcaaggcgaaagacacgattcgccgtggctgtctggagtacgacgccggtgcaactgacgtcacacagtcgtttatgtccatccgcaaaaccatgaccagcagcgggcgcagcgccacctatgaggccagtcgcaccgaggaggccagtcacgctgatatcgcatgggccaccatgcacgccctgttaaacgaaccgctttctgccggtagcggcatgcagcctaaatctattctggagttcaactaa

SEQ ID NO: 373000 - DNA, 855 bp, Salmonella enterica
atggcaaaaaaagtctcaaaattctttcgcatcggcgtcgagggcgatacctgcgacgggcgcattatcagcgccagcgatattcaggaaatggccgaaacctatgacccgcgcgtctacggttgccgtatcaaccttgaacacattcgcggccttttgcccgacggcatgtttaaacgttatggcgatgtggttgagctgaaagccgaaaagattgacgacgattctgcgctgaatggcaaatgggcattgttcgccagaatcaccccgaccgatgaccttatcgcgatgaataaagccgcgcagaaggtctatacctctatggaaattcagccgaattttggtaacagcggcaaatgctatcttgtcggccttgcggtcactgatgaccctgcgagcctcggtactgaatacctcgaattctgccgcaaggcgaagcacaacccgctgcagcgctttaaggccagtcctgaaaatgtcttttcagtcgccacgctggccgaactggaatttgaagacgttcccgacacggtgctcaacagcctggccgacaaggtgaaagccattttcagccgtaaacaggtcagcgacgatgcgcgcctgcatgatgtgcatgaggcggtgaccaccgtcagcgaacatgtgcagaccagcctcactgcgcaggataagcgtctttccgatatggaaaccgcgctagccacctttaaacaggagctgaccggcaaggttgaagaaaccagccaggcattttccgccctgaaaaccaccctcgacaaaaccgaaagtttcagccagccgcgacgcacgaaagccagcggcggcggtggcgatgagctgctgaccgactgctga

SEQ ID NO: 373001 - DNA, 1068 bp, Salmonella enterica
atgcgcccggaaacccgttttaagtttaatgcctatctgacccgcgtcgctgagctgaacggcatcagcactgatgacgtcagcaaaaaatttaccgtcgaaccgtcggtcacacagacgctgatgaacaccgtgcaggcgtcatccgcgtttctgcagacgattaatattctgccggtcgcagaaatgaagggtgagaaaatcggcgtcggtgtgaccggtactatcgccagcacgactgatacctcgggcgatgatgagcgtaagaccgcagacttcaccgcgcttgaatccaacaagtacgagtgcgaccagattaactttgacttccacctgaaatataaaaccctcgacctgtgggcgcgttttcaggacttccagcgccgcatccgcgacgccattgtcaagcgtcaggcgctcgatttcatcatggccggttttaacggtaccacccgcgccgccacctctgaccgcaccaaaaatccgatgctgcaggatgttgccgtcggctggctgcagaaataccgcaatgaagccccgacgcgtgtgatgagcaatatcaccgatgctgacggtaaggtcgtttcggcagtgattcgcgtcggtcgaaacggcgactatgagaacctcgacgcgctggtgatggatgcgaccaataacctgattgacgaggtttatcaggatgacccgaaactcgttgccatcgttggccgtaagctgctggccgacaaatatttcccgctggtgaacaagccgcaggaaaacagcgaggcgctcgcggcagatatcatcatcagccagaagcgaatcggcaacctgcctgctgtgcgtgtgccgtacttcccggcgaatgccgtgttagtgaccacgctggaaaacctctctatctatttcatggatgagagccaccgccgcagcattgatgaaaacccgaaaaaagactgcgtggaaaactacgagtcgatgaatatcgactatgtggtcgaggcgtatgccgccgggtgcctgctggaaaacatcaccctgggcgatttcaccgcacctgcagcaccggaaagcggagcctaa

SEQ ID NO: 373002 - DNA, 750 bp, Salmonella enterica
atgacgagccccgcacagcgtcacatgatgcgggtctcggcctctcaagccgcgctgcgggaacaagccccgctgcgccatgcaaccgcctatgagcagatgctggttaagctggccgatgaccgccgcacgttaaaaaacatccgttcaaacgaacgtaaagccgagaaaaagcgcgagctgctgccgttctatgcgccgtgggtcgccggtgtgctgactgatgggcgtggtgcgcaggatgacattgttatgaccgtcatgctgtggcgtcttgatgccggtgatatcgctggcgcgctggaaattgccccctacgcgctgaaatacggcctcacctctgaccatcgccgcacaacaccttacatgctggttgaggaagtggcgcttgccgcgcagcgtctgcgcgatgccggtgagtctgtcgacctttcctggctgcagaccactatcgacctgaccgacggtgctgacgttcccgatatggtgcgcgcccgtctgcataaggtgacaggcctgaccctgcgtgatgccggtatgaatgcagaggcgctggcgcagtttcagcgcgcgatgcagctcgaccgcaatgccggtgtgcgcaaggagattgagcggctggaacgcgcactgaagccaaaagcggaggcaccaccccgtaaaacgactaaaccgcgcacgcgcaaacctgtcgccagaccggcagcaaagcgcggacgtccaccaaaggcggtaaaaaccgccggttaa

SEQ ID NO: 373003 - DNA, 507 bp, Salmonella enterica
atgacgacagtgattctgaaccagcccgacgaaccacaggacgtaccgggcgtggtgattcccgtaccggagacgggcgatgcagtaattaaaaacacgttctttttccctgatgtggatccgaagcgtgtgcgcgagctgatgcggcttgagcagacggtttccgatgcgcgcctgcgccatgccatcagaactggcatggcggaaaccaatgcggagctttacgactaccggctgcgccagactgccgccgggtttaagcatctggccgacgtgcctgctgaggaaatcgatggcgagaatgtgcgtattttccactatctgagcgccgtaacggcgatggcaaccgccaccctgtatgagcgctatcgcggtgttgaagccaccggcaagggtgacaaaaaagccgacagcgtcgaaaccaccattgatgacttgtggcgggatatgcgctggtcggtcgcgcgtctgcaggacaaaccgcgctgcatcgtgggccagctctga

SEQ ID NO: 373004 - DNA, 204 bp, Salmonella enterica
atgaaggtcagatcgatgcagggcgacaccctcgacgtgatttgcgccaggtattacgggcgcactgagggcgttgttgaaacggtgctgcaggctaatcccggcctgtctgagctgggcgtcattctgccgcatggcacggcaattgagctgccggatgtgccgtcttcacccgtaactgaaactatcaatctttgggagtaa

SEQ ID NO: 373005 - DNA, 297 bp, Salmonella enterica
atgacagaaggggaaaaaggcgtcctgtcactgtttgtgattggggcactgattgtggtcggaaaagtgctggcaggcggtgaacccatcacaccgcgtttgtttatcgggcgcatgttgctcggcggttttgtctcaatggtcgccggtgttgttctggtgcagtttcctgatatgtcactgcccgctgtgtgcggtattggatccatgctcggtattgccggttatcaggtggtggaaatcgccattcagcgccgctttaagtcacagaagggggaaggcgatgccggtcattaa

SEQ ID NO: 373006 - DNA, 498 bp, Salmonella enterica
atgccggtcattaatactcaccagaatatcgccgcctttctggacatgctggcgtattccgaaggaacggcgaaccatccgctgacaaaaaaccgtggctacgacgtcattgttaccggccttgatggcaggccagagattttcaccgattacagcgaccaccctttcgcacatggccgaccaccgaaagtgtttaatcgccgtggcgagaaatccacagcatcggggcgttaccagcagctttatatgttctggccgcactataaaaaacagctcgcattgcctgatttcagcccactgtcgcaggacaagctcgcgatccagttaatccgggagcgcggtgctattgacgatatccgggcggggcgtattgagcgtgctgtttcccgttgccggaatatctgggcgtcattgccgggtgccggttacggccagcgcgagcacagtctcgaaaagctggttaccgtctggcgcacggctggcggggtggtggcatga

SEQ ID NO: 373007 - DNA, 414 bp, Salmonella enterica
atgaaagtcctgataacgctgtttgtgctggccgtgctcggtctgatgtggttgcgccatgagaacggcaatttatcccgctcctttgagacggcaaaccgcgttgcgagcgagcaaaaggcgacgattggcatgctgaaaaatcagctcagtgtcgccggccagctcgccagacgtaatgaatccgcgcaggtggcactgcgcgaacagctcgcaaaggcaggcgcagaagcaaaccgccgcgagcagacgataacgaggttacttgatgaaaatgaagcctttcgccgctggtataacgctcctctgcctgatgctgtgcgcaggctgcacacccgcgccgcctgcgccagcgccggtgattgtggtcagcggatgcccgagggtgagcctttgcccgatgccgggaagtga

SEQ ID NO: 373008 - DNA, 159 bp, Salmonella enterica
atgccgggaagtgacccgaaaaccaatggcgacctgagcgcagatattcgccgtcttgagggcgcgctgaccgcctgcgcgctgcaggtcaaaaccgtcaaacactgtcaggatgaactcgatgcagaagcacaaaagcctgcgcaaggcgctgattaa

SEQ ID NO: 373009 - DNA, 468 bp, Salmonella enterica
atgcagaagcacaaaagcctgcgcaaggcgctgattaacgctgtgccgcagcttcgaaacaaccccgatatgctgcgcctgttcgctgataacgggcatacggattcccgactggagagctcgctgtcgtttgaaaaggtgtacgtgcttaacgtggtggtgactgactttaccggcgacctcgatttgatatttgtgccggtacaggcatggctgcgtgagcatcagccggacattatgaccaccgacgacgggcgggagaaaggattcacatggatgattgatatcaataacgacgattcgctcgatatcagtatcagcctgagactcaccgagcgcacgctcgtcaaagaggtcgacggcgcattgcatgtcagctatgcccctgagccaccgctgcctgagccagtgacgcgcccggtcgagctgtacgttaacggcgagctggtgagtaagtgggatgagtga

SEQ ID NO: 373010 - DNA, 450 bp, Salmonella enterica
atgagtgagttaaccgcgctgcaggagcgccttgccggtctgattgccagcctgtcaccggcggcgcgtcgtcaaatggcggctgacattgcaaaaaagctgcgcgccagtcagcagcagcgcatcaggcgacagcaggcacccgacggcaccccgtatgccgcccgaaagcgccagccggtgcgaagtaagaaaggccgtatcaggcgcgaaatgttcgccagactgcgcactaaccgctttatgaaagccaaaggcagcgacagtgcggcggtggttgaatttaccggcagggtacagcgcatggcgcgggtgcatcagtatggcctcaaagaccggccaaatcgtcacagccgggatgtgcagtacgcggcgcgcccgttgctcggtttcacccgcgacgatgagcagatgattgaagacatcattatcaggcatctcggtaaataa

SEQ ID NO: 373011 - DNA, 642 bp, Salmonella enterica
atgaatacgttatccacaatacaggagctcgcgcgcgcgattcgcaacctcatccgctcaggtgtggtgactgaggtcgataccgcgcaggggctgtgccgcgtacaaagcggcgggatccagactgcatggctgaactggctgaccacccgcgccggtcgttcgcggacatggtgggctccctcggtcggtgagcaggtgctgctgctggcaattggtggcgagcttgatactgctttcgtgctgccggggattttctccgacgataaccctgccccgtcagcctcggcggatgcgtggcatatggtgttccccgacggcgctgttatggagtatgagccggaaaccggtgcgctgacggtcagcggcatcaagactgccgatgtgacggcatcggagtccattaccgccaccgtgccggtggtactggtaaaagcagcagaacgtatcaccctcgacaccccggaggtggtatgcaccaacaaactgatgacggcgacgcttgaggtgcagaaaggcggcaccatgcggggaaacatcgaacataccggtggcacgttgaaatcaaacggcgtgcaggtcgataaccacggtcacggcggcgtacaacggggcggtaactggacggagggcacaaaatga

SEQ ID NO: 373012 - DNA, 348 bp, Salmonella enterica
atgacagcgcgttatctggggatgaaccgcaataccggcataggtatcagtgacagtgagcatatcagccagagcatgcgcgacattctgctgacgccggtcggctcgcgggtaatgcgtcgtgaatatggctcgctcctgtctgcgctgattgacatgccgcaaaacccggcgctcaggctgcaaatcatggtggcgtgctattccgcgatccagaaatgggaaccacgcatcaggcttatctccatcagctttgagcgcggcgacactggcgaaatgtatgtcgatattaccgggatgcgtaccgataccggtgcgtcagtttcaaccactgtttcactgagttaa

SEQ ID NO: 373013 - DNA, 909 bp, Salmonella enterica
atggcaaccgttgacctgagtcagttacccgttcccgacgtggttgaggaactggactatgaaaccatccttgcggaacgcattgcgacgctgatttcgctctatcccgaagaccaacaggaagccgtcgcccggacgctcgcacttgagtctgagccaattgttaaattgctgcaggaaaacgcctaccgcgaggttatctggcgtcagcgtgtcaatgaagctgcacgcgcagtgatgctggcttatgccatagacagtgacctcgataatatcgggggaaatttcagtgttgagcgtcttgtcgtcacgcctgctgatgacaccaccattccacccaccccggcagaaatggaactcgacgccgattatcgtctgcgtatacagcaggcttttgaggggctgagcgtggcggggcctgttggggcgtaccagtatcatggccgtagtgctgacgggcgcgtcggcgatatttcagttatcagcccgtcgccagcctgtgtgacgatttccgtgttgtcacgtgaaaacaacggcgtcgcatctgaggaactgcttgcaattgtgcgcaatgccctgaacgcagaagatgtcaggccggtcgctgaccgggtgacggtacagtcagccgaaattgttaactaccagattaacgccacgctttatctttaccccggcccggaaagtgaacccatcagggcggcggctgaggcaaagctgaaagcctatatcagcgcgcagcaccgcctcgggcgcgatatccgtaaatcagcgatttatgccgcactgcatgttgagggggttcagcgggtggagctggcggcaccggtcgcggatattgttctcgataacacacaggcgtcattttgcactgactacagccttgtaatcgggggatctgatgaatga

SEQ ID NO: 373014 - DNA, 531 bp, Salmonella enterica
atgaatgactcacgattattgccggtaggctcatcgccactggaagtcgccgccgcaagggcatgtgctgagattgaaaggacgccggtcaacatccgcgcgttgtggaatattgacacctgtccggaaaatttgttgccgtggctggcgtgggcgttttctgtcgaccggtggaatgagaactggccggagggaacaaaacgtgcggttatccgtgatgcatatttcattcactgccacaaggggactatcggcgcaatccgtcgggtagtggagccactcggctatgtcatcaatgtaacggaatggtgggaaagcggcgacacgccaggcacattccggcttgatatcggggtgcttgaaagtggcattaccgaagaaatgtatttcgaaatggaacgactgattgcggatgcaaaaccagccagtcgtcatctgactggcctgaatattgtccaggacattcccggttatttgtataccggcggcgtgtcctgcgatggcgatattattacggtttacccgggataa

SEQ ID NO: 373015 - DNA, 1977 bp, Salmonella enterica
atgagcacgaaatttaaaaccgttatcaccactgccggagctgccaagctcgccgcagccaccgtgccgggcggtaagaaaataaatcttaacgttatggctgttggtgacggcggcggaaaactgccggtgcctgatgccggtcagacgcagcttgttaatgaggtgtggcgtcatacgctgaataaaatcagccaggataaccgttacagtaattacattgtggccgaactggttattccgccggaggtgggcggcttctggatgcgtgagcttggcctttacgacgatgaagggacgctgattgctgttgccaatatggccgaaagctacaagccagaactggctgagggctcagggcgtgcgcagacatgccgcatggtcattattgtcagcagtgtcgagtctgtggcgctgtccattgactcaacgatggtgatggcgacgcaggattatgtcgacgacagactcgccgaacatgaaaaatcccgtcgtcatcctgatgccactcttaaagaaaaagggtttactcagctcagtaacgcgacagacagcgagtctgaaacgctcgcagcgacgccgaaagctgttaaggcagcatacgaccttgctgacgggaaatatacagcgcaggacgccaccacaacgcgtaaagggattgtacaactcagtaatgccactgacagtgtgtctgagacgcttgccgcgacaccgaaagcggtcaaagtggcatatgaccttgctaacgcgaaatatacagctcaggacgccactacagcgcgtaaagggattatccagctcagcaatgccactgacagcacgtctgagacgctggccgcaacgccgaaagcggttaaagcggctatggataatgcgaacgggcgtgtcccgtcagaccgtaaggtcaatgggcatccattatccggggatatcaccctgtgggcgtcagatgtgaaggctatttccgccgatgccattggacagattaccgataacggcacgatggcatcagctaatactccaggatggtggcgggtggcggtgtcgaattctgatacggtcgctgattttccgacctatccggatggcagcaagctgtacagctacggatatatgtttgttgagaaaattggagaagtctggtttcagcactattacgcgcatatgggcgcgaacgcaaagcgccaggactggggaacggaaccgaataccagccgtcagtgggttattgactacaacaccgtaaataaaccttcagccagtgatgtgggtgcattgccgattaccggggggcggcttaacggcccactgggtattggtactgacaatgtactgggcggtaattcgattgtattcggcgataacgatacagggtttaagtggcacagtgacggcgttctgggtatttatgccaatagtgcccaggtcggttatatcgacaattccgggctgcacatgctggcagatattcgcgctactggtgtcgtgcgcaccggcaacggaaaaacactgacgttatcgagtggtaacaattctgcactgaatgctggtttaagtctgtggggaggtggagaacgtccaacagtcattgagctgagcgatgaacagggatggcatttatacagtcaacgaaatacggacggaagtatttcatttactgttaacggtatcgtctactgtaacgcgttaaatataggtggcgctatttatcagaataacggtgatatctttggttcgttatggggaaatggctggttaagtacatggattcacaacaatgtagtaaaagcggtcagacttggccccgtggcgctttctggcggtctgtggcgtgattttcagcttggcggcggacaggtggtgacggggttccatactgacggtagctgggaaatggaaggtggtgatgacaaggtttattaccgtccaattcagtatctggttggtgatgcgtgggtgacagccccaagtgtataa

SEQ ID NO: 373016 - DNA, 549 bp, Salmonella enterica
atgacagcggcaaaaaataaaaagaacaagcagtttttaaatattaaaaatttcattccgtatacaccggaaccagacgacacattattcgccggtgcggcgcatctacaatcagaggatggtcaggactggtatgcatgccagcaattattttcagaagacacgctgaaaattacctacgacgataacgatgttattacgtgtatcacgcgcgatatttccggtttatggcctgcaggccagagcgtggcggagctacctgatacggatgaaaaccgtcgcgctgatatttcaggcggctggcagtttaaagacggtaaagtcgttcaacgggtttattcgccggaagagctgcgtaaaaaggcggaagctgaaaaagttcgccgccttgctgaggctgaatcagccattgcaccactggcgcgggcagtaaaactaaaaatcgccacagatgaagagattaaacggctggaagcatgggaactctacagcgtaatggtaaaccgggtggatacatctgcgcctgactggccggatataccacgctaa

SEQ ID NO: 373017 - DNA, 1179 bp, Salmonella enterica
atgagtgattttcaccacggcacgcaggtcatcgaaattaatgacggtacgcgtgttatttccacagtagcgactgcagtcgttggcatggtctgtacagccagcgatgcagatgccacgctgtttcccctcaatgagccggtgctgattaccaatgtgcaaagcgccattgcgaaagccggtaaaaaaggcacgctgtctgcttccctgcaggcaatcgccgaccagtcaaagcctgtcaccgttgtcgtgcgtgttgccgaaggtaccggagacgacgcagaagcgcagaccacatccaacattatcggcggcacggatgagaacggtaagtacaccggtatcaaggcgctgttaactgccgaagcggtcaccggtgttaagccgcgcattctcggtgtgccgggtctcgatacgcaggaggttgcaactgcacttgcgtcggtttgtatcagcctgcgcgcctttggttatgtcagcgcatggggctgtaaaaccatttccgaggcgatagcctatcgtgagaatttcagccagcgtgagttgatggttatctggcctgatttcctcgcgtgggacaccgtcaaaaatgccaccgcaactgcttacgccactgcgcgtgcactcggcctgcgtgcttacatcgaccagactgtcggctggcacaaaaccctgtctaacgttggtgtacagggcgttaccggcatcagtgcctcagtgttctgggatttgcaggcatccggcaccgatgctgacctgctcaacaaggccggggttacgacgctggtacgcaaggacggtttccgtttctggggtaaccgcacctgctcagatgacccgctttttctgtttgagaactacacccgtaccgcgcaggtactggccgacacgatggctgaagcgcacatgtgggcggtcgataagcccattaccgccacgctcattcgtgacattgttgacggcatcaatgccaaattccgcgagctgaaaacaaacggctacatcgtggacggtgaatgctggttcgacgaggaatcgaacgacaaggaaaccctgaaagccgggaaactgtatatcgactacgactatacgccggttccgccactggagagcctgaccctgcgccagcgtatcaccgataaatatctggtgaatctggccgaatcggtcaacagctaa

SEQ ID NO: 373018 - DNA, 519 bp, Salmonella enterica
atggcactaccccgtaaactcaaatatctgaatatgttcaacgatggcctcagctacatgggtgttgttgaatccgtaacgttgccgaagctgacccgcaagctcgaaaactatcgcggcggcggtatgaatggcgcggcagcgattgacctcggcctcgacgatgatgcgctcaccgtcgaatggtctgtcggcggcctgcctgatgtggcgctgtgggcgcagtacgccgccccgggtgctgatgctgtgccgctgcgttttgccggttcttaccagcgcgacgacaccggcgaaatcgtggcggtcgaggtggtcatgcgtggccgtcataaagaaatcgacggcggcgagaataagcagggtgaaaacacctcgacaaaactgtcgactgtctgcacctactaccgcctcacgattgatggtagcgacgtcatcgaaatcgacaccgtcaacatggtcgagaaggtgaacggcgtcgaccgtctggagcagcaccgccgcgcaatcgggctgtaa

SEQ ID NO: 373019 - DNA, 336 bp, Salmonella enterica
atggcaaaagcaccacgtaaaaccgctgaatttattgatacggctggaaatgaaattgacaccgtaaacccgaacgtcgtgaccctggacaaaccgattaagcgcgccggtcagacgattgataaagtcaccctgattgagccgaacgccggtaccctgcgcggcgtcagtctggcagcggtggcgcagtccgaagtcgacgccctgattaaggtgctgccccgcatgacctaccccgcgctcaccgcgcaggagcttaccgcgatgaacctgcccgatatgttgtcgctggccgctaaggtgattggttttttgtcaccggcttcggcggaatag

SEQ ID NO: 373020 - DNA, 2442 bp, Salmonella enterica
atgagtaataacctgaggcttgaggtattgctgaaagcggtcgaccaggcgacccgaccgcttaaatctatccagaccgcgagtaaaaccctgtcgggtgatattcgcaacacacaaaagggtctgcgcgacctgaacggtcaggcatcgaaaatcgacggctttcgtaaggcaagcgcgcaactggccgtaactggtcaggcgcttgacaaggcgaagcgtgaagccggtgagctggctgtgcagtttaaaaacaccaccagtccgacccgcgcgcaggcgcaggcgctcgaagcggcaaaacgtgccgcctctgagctgcagacgaaatataacaacctgagaacatcggtacagcgccagcgctccgagctgatgcaggccggtatcaatacccgcaccctgtctgctgatgagcgtcggctcaaaacctccatcagcgaaacgacggcgcagcttaatcgccagcgtgaggcactggcgcgcgtcagcgcgcagcaggcgaaattaagccgggtgaaagaacgatataaatcaggtaaagagcttgccggtaatgcagcggcggctggtgctgcaggtgttggcattgcggctgcgggaacgatggccggggttaaattactgatgcccggttatgactttgcgcagaaaaattccgagctgcaggccgtgctcggggtcgacaagcagtcgccagaaatgcaggcgctgcgcaaacaggcgcgccagctcggcgataatactgcagcctctgcagatgatgcagcgagcgcgcaaatcatcattgcgaaaagcggcggtgacgctgctgccattcaggcagcgacgccagtcacgctgaatatggcgctgtcaaaccggcgctcaatggaggaaaacgctgcgctgctgaccgggatgaaatcagcgtttcaactttcaaacgacaagattgctcacattggcgacgttctctcgatgacgatgaacaaaaccgccgccgattttgacggactgagcgacgcgctgacctatgccgcgccggtggcgaaaaatgccggggtgagcatcgagcaaaccgccgcaatggtcggtgcgctgcacgacgccaaaatcaccgggtcaatggcgggcacgggtagccgcgccattctcagccgcctgcaggctcccaccggaaaagcgtttgaggccattaaggaactcggcgtcaaaacgtccgacagcaaggggaacacgcgcccgatattctccatcctgaaagaaatgcagcgcagctttgagaaaaacaacctcgggacaagccagcgcggcgagtacatgaaaaccattttcggcgaggaggccagctcggcggcggcggtgctaatggaggcagcctcaagcggcaaacttgaccggctcactgccgcgtttaaagcctcggacggtaaaaccgaggaactggttaaggttatgcaggataacctcggcggcgactttaaagagttccagtcggcttatgaggctgtcggtaccgacctttttgaccagcaagagggctcactgcgtaaactcacgcaaacggccacgaaatatgtgttaaagctcgacggctggatccagaagaataaaggactggctcagaccatcggcattattgccggtggcgcacttgctctgattggtatcatcggcggcattggtcttgtggcgtggccggtagttatggggattaacgccatcattgccgccgctggcgttatgggtacggtctttactgttgccggtagcgccattgtgacagctctcggtgcgattacctggccgattctggctgtggggtcggcgattgtggctggtgcgctactcatccgtaaatactgggaacccatcagcgcatttttctcgggggtgattgagggcatcatgagtgcttttgctccggtcggggaaatatttgcgccactggcacccatttttgacggactcggtgagaagctgcgcggagtctggcaatggtttaaagacctgattgcaccggtgaaggccacacaggagacgctcgatagctgcaaaaatgtcggcgttatatttggtcaggcactggcttcggccttgatggctccgctcaatgtttttaacaagctgcgcagcggtgtcgactggcttctcgaaaaactcggcatcatcaacaaagaatcggacagcctcgaccagactgccgccagaaccaatgccgccacgcagggtaattcctacatcccggcaaccagcacatatggcggctatcaggcttatcagccagttaccgcaccggcggggcgctcttacattgaccagagcaaaagcgaatacaacatcactctgccgggaggtgttgcgccggggcatcagcttgacagacagctacgcgacacgctcgaacagattgagcgcgaaaagcgtgcgcgtcagcgtgccagtatgagccatgactga

SEQ ID NO: 373021 - DNA, 486 bp, Salmonella enterica
atgatgcttgcgcttggaatgtttgtgtttgaacgccgcaccctgccttatcagtcgatgcagcactcgaaagattatcgctgggcgtctaatgaccgggtcggtaaacctcctgcatatcagtttctcggcgagggggagaactcgatcctgcttgccggtacgctttaccctgctattaccggcggtcgcatatccctgctggctgttgaattgatggccgacgagggcagagcatggccgcttattgagggaactggcaatatcttcgggatgtttatcgtcgataaggtgtcaaccacgcatgccgagtttttcagcgacggcgcggccagaaagattgatttcaccctttcgctgaaacgggtcgacgaatcactgacggcaatgtttggcgacctgaataagcaggccagcgagcttctcggttctgccggtaatctcactgataagctgcagagtgcgctcggagggctgacagcatga

SEQ ID NO: 373022 - DNA, 1176 bp, Salmonella enterica
atgatttcgggtatgactattgatgccggtaccagccttgcaccggcgtttatgctgacactgaacagccaggacattaccagcaattttagtgaccggctgatttctcttaccatgaccgacaaccggggttttgaggctgaccagctcgacattgagctagacgacaccgacggcaaagtcgagttacccatgcgcggggcggtgctgacgctgtggcttgggtggcagggttccgcgcttctgaataagggcgatttcacggtcgatgagattgagcaccggggtgcgcctgataccctgaccatccgggcgcgtagtgcagactttcgcggaacgctcaattcacgacgtgaagaatcatggcacgacaccaccctcggtgagttagtcagtaccatcgcaaagcgcaataaactgacggccagcgtcgcggattcactgaaaaaagtcccggtaccgcatatcgaccagtcacaggagtctgacgccgtatttctgacccggctggctgaccgcaacggggcgacagtatcagtcaaggcggggaaactgctgtttctgaaagccggtagtgcgatgacagccagcggtaaacccgtcccgcaaatgaccctgacacgcagcgatggcgaccgtcatcagtttgccattgccgaccgtggagcttataccggagtaacggcaaaatggttgcacaccaaagacccgaagccgcaaaagcaaaaagtgacgctgaaacgtaagccaaaagagaagcacctgcgcgcactggagcacccgaaagcaaagccggtcagcaaaaagacaaaggccaaaaaagaaccggaagcgcgcgagggtgagtatatggccggtgaggccgataacgtgctggcgctgacgacggtctacgcttctaaggcgcaggcgatgcgcgccgctcaggctaagtgggataagctgcagcgaggcgttgcggagttttcaattacgctggcgcttggcagggctgatttattccctgagacacctgtgcgcgtgtcgggctttaagcgcgtcatagacgagcagacatggttaatcagtaaggtgactcacagcctgaataatagcggcttcacgacgggcttagagcttgaggttaagctctctgacgtagagtataaagcggaagatgatgatgggcgattttga

SEQ ID NO: 373023 - DNA, 408 bp, Salmonella enterica
atgttccacttcaaaccgacaattgcagtagcggctatcctgctctcagtcagcacatacgccaatgctaacgacacaaaaacacttcaaaagcagttaaaaccttggcagccaatggaaatcacaacccgagaaaactcactaacggtggtgcttaccggcaaagaaatcacgtcagaagcctatagccaattaattatgtcaggtgtatgcacaccgatatggacgcatgatgcaccagcgtcataccttaaaaatacaaaagaaataagtgtgcttaacgaatacaaatcttttggctatacatttgaagacccattagcaacatgtaatgaaattgcaccactggcagacaaagccgcacagaccatgctgctatcgaaaacccatacctacacaggaaaatag

SEQ ID NO: 373024 - DNA, 222 bp, Salmonella enterica
gtgcgccgggctggtggtatagctcagcgtgccctgggcgtgcgcgccgtggctgcgcaccgcgctgagcgccgctttcatattgcgcgggtcgttcatggcgtcgaagacgcggaacacgtccatgccgtttttcaccgcgcgttcgacgaagcgttccaccacgtcatcggcgtaatggcgataaccgagcaggttctggccgcgcagcagcatctgtag

SEQ ID NO: 373025 - DNA, 2559 bp, Salmonella enterica
atgagagtgccgatgcgcaaaaggcaacaccgggtattttatttatcgcgctgcgctgtgtgtatcgcgctgggcagcacgttcgcacacgttgcatgggcgcgcgactatttcaatccggcatttattgaaaaccatgggcaggcgagtcgcacaagcgtcgatctgtcgacatttgataacgacaaaagccagctgcctggcacctattacgtcactatcaatatcaataaaacagaaatcggcgcgcgaaacgttgattttcaactcacaacgctcagtgacggtcaacaggcattacagggctgtttacggctccatgaactaaaagataacagcgtcaaaaccgacctttttccaaccctggagagtgaaaaaggctgcgtcgatctcagcgttatccccggcgccagccagcggtttgattttcagcaacagacattatcagtaagcatcccgcaactctacatcgccaacaacgcgcgcggctacgtgccgccggaaaagtggcaggaggggattaccgcgctgatgctgaactacagcttcagcggctataaagagtacggttccagtgaggattccgacgatgcggaatcgaagtatctcgctctccagccgggttttaacctcgggccgtggcgttttcgcaactacagtaactggagttcaaataacggcgagagcggtagctggaacagcgtttataactatttacagcgcgacattatcgcgctgaaaagccagttcaccgccggagacagcaatacgccatccgacgtgttcgacagcgtaccttttcgcggcctccagctcacctctgacgatcaaatgcagcccaacagccagcgtggttacgccccgacgattcgcggcatcgcccgctcaaacgcgcaggttatcgtgcggcaaaacggctatatcgcctatcagaccgccgtttcgccgggcgaatttgaaatcaacgatatgtttcccaccggcagcaacggcgactatgacgtgacggtaaaagaaaccgacggcagcgaacagcactttatcgtgccctactcttcgctgccgattctgcagcgcaccggacgggcaaaatacagcgtgaccgtgggtaaatatcgcgattataacaaccacacgctggacgacttcggccaggcgaccctgctgtacggcctgccgtggggcatcaccctgtacggcggcagccagattgccggcgataaataccagtccgtcgccttcggcgtcgggcaaaatatgcagatgctgggggccatttccctggacggcatctggtcgcacgccaaatttgacgatggccgcaaagaaatcgggcaatcctggcgcgtccgctacagcaagggcgtcgtcagtacgggcaccacgttttcgctggccggctatcgttacgccagcgaaaactacaattcgctgagcgaggtgatcaacccggacgacgatttttatgataactacggcaagcgccataatcgtttcgaagcttcggtcaaccagcaaattagcaatacgctcggttccttaacgctaagttgggtcaaagaagattactggcacagcgcgcagcagatggaatccctgagcgccagctacaacaatagctggggtccggtgagctatacgctgagctacagctataacaaaaacacctaccagtaccgttcggacaatgacgatgatgacaacgacgacgatcgttataaccagaacgatcggctgttcacgctgtcgctgcacgttccgtttacggtgttcgattccaggctatacgccagctatatgctgaacacgcgtaagcacgatgccacggtgaacagcaccacccttagcggcaccgcgctgcgtgacagaaacctgaactggtcgttacagcaaagccacagcacacaagacggtgattccggcggggtaaacgccagctataaaggcacttatgccaacctcaacgccggttacaatcagtcgccagatagccaacaagtcagctacggcatcagcggcggcattctggcgcacgaaaacggtattaccctgagccagccgattaccggcgcggcgattttaattaaagcgcccggcgccagcggcgtttcggttgaaaaccagaccggcgtcgccaccgacttccggggttatacggtgatccccaacgtcacgccgtattatcgctacgatatctcgctcgacagcagcacgtttgctgacaacgtggatattccgctcaacaaccagaccgtctacccgacgcgtaatgcggtggtgcgcgcggcgtatgacacgcataagggctatcgcgtgttgttaacgctgacgcgcagcaatggcgagcccgtgccctttggcgcgacggcaagcgtcgatgggcaggatgcgaacctggccagtatcgtcggcgataaaggccaggtcttcctcagcggcctgccggaagagggcctgctgctggtgaactggggaagcgcctcttgccgcgcggattaccgcctggatatcagcaaaaatatgaacggcatagtgatggcgaacgccgtctgccagtga

SEQ ID NO: 373026 - DNA, 1062 bp, Salmonella enterica
atgaagctattcccttatctggccgcactgttattgttgagcgcatccggcgtagcctatggtgccctggaatgtaaattttacaatggcgatacacgacagataatgtcgccaggcgttcaaccaatcattacctttcacccctcggtgcaaaccgccacgctgctggctagcggtattacgatggaattaacgccggaaatgcatagccactgtgcagtgggggatgatggagagaacatttaccagatgacggacaacaccttacttgaagggtatgtcgacggtaaggcgttgtttcgcaccaatatacccggcattacgtatgccattgggttataccccgcagggaaaggcattaccggatggtttcccgtcaatcctggtcaatattatatgaccgcttatgctgacgacaacgaaggctatttcgaacatgaaaaaaaatggtacgccgtgatggaaatctaccagatgcccggctttaatggcgtgccttcgggagtcggttttattagctcaatcggcggcccattggggcacattgttctcggagaccccataggttctgaatctgaccatcctcgcccgctaatcaccatttctgatatgatgtttaacattccattctccgaaccgacctgtattcttaccgcgcccaccaccgtgaatttaggtgattggtaccgaagcgacgtggagaaagatcagaccaccgaggtgccttttcagattaccggaacctgtaccgggacgattgcagtctcgttcgtggcgaaatcctcatataccaatgcggataagaacctgtttaccaactcgattaccagcaactcaaacgttaccgcggctggcggcgtcggcgtaaaaataagctcaccggcctattcgcaaattcatgccgacagttcgccagaagtcattgccgtgggcgagataatcgggaggccggtgacctcagtaaacgccaactttaaagcaaagctggtcaaaacagggacggaggccgtgacacccggtattttcggatcgtctgtcaccttccaggtaacctacgagtaa

SEQ ID NO: 373027 - DNA, 600 bp, Salmonella enterica
atgcaacagttactgtttcttttacgccagcccagtcttatgttgcttatgggtctgacgggcgggttttggtctggcatcagccaggcgggttccaatttggatatcaatctgaccgccagtattgttaacagcacctgcaaactcagtctggaaaatgggggggaagtctaccttcccaacgtcacgcgggcatggttttacaataacgacggcagcagtaaatatgcgcctaccgacgaggcgggcggcacgccttttaacgtgcgtctcgaagactgtgcagataacagtagcatcaagcagttgatgttcagctttacgccgcaatccggtttttggagcaaccaaaaccaggttttcaaaaatgatgccacaacaggcgcggcgcaaaacgtggggatcgtcattttctcggcagactataaaactaacgtcttaaacagcgatggcaattctaacgtagtttacgacgtcagcggaaaaagcagttcgctgtatttaacggattatcagttttacgcgcgctatcagaatacgggcgcagttgtcagcggcgttgtcaccagcaacgtgttggttgacgtcagctacgaataa

SEQ ID NO: 373028 - DNA, 558 bp, Salmonella enterica
atgaaatttacatcagctttaatcacattatccgtttctgccgtcttattctctggaatgggcagagccgccattaccggtaccgacagtgtacaaatgaccttcaagaccacagtgacaaccggtacctgtaaagctatcgtcgttaatggtgacggaaaaaatgtcagcaccattggctatggtgagacatataaatcggatcttaacaagaaagcgatgccactgagcattgtcttcagcaattgttccggcgtaaccatcgcagaagtagaagcaaaagcgggcaccggcggcacctgctccggtgataatttagacggcgattcttacgcggcaggcctgaataccgccttcgaaatttggggcggcgatgcagacacgggggtgaaactgtcttgtaaaacgccaccagccgcacaggaggtgaccattaccaacggtgcgggtacctacccaatgacgtcacgcattgtggtggcaaacggtaaaagcctgagcgacgtcaccgccggcgatgtcacggctccggtcacctttgttgtgacatacccttaa

SEQ ID NO: 373029 - DNA, 573 bp, Salmonella enterica
atgaaaagaaaccgcctcagtcttcccatcgcggcacttgccgtaatggcagcttctggaagtgcgcttgccgctaactccactaacctggatgttaacttcacggccacaattaaagaaaccacctgtgacatgaaactggtcggtggtacaggctccgacacggtacaggaattaatcattggtaatagtagtggtgaagttcgtattgatgatgtaagagcgggaacagcaacggcagattttaaattagtgattgttgaatgcccggcatcgcttcaatcgttaaagacatcaatcaacggaacgccatccgggttttcaacaaaaatattaacgaatggaataaaaggctcagccgactatataggggtgtcagtagcgcgcgcatccaaaccagatgaaccttttgttattaactccaccgccgattcagaacgtctggtctggagtgaggtagaaattaacagtaaagaggttccgctgatcgccatcatgaaagagaccaaggcaaattcggctaccacaggggctttctcagccgttgcgactttcgtatttagctacgagtaa

SEQ ID NO: 373030 - DNA, 2598 bp, Salmonella enterica
atgctatttcaacgctcattattatgtcttactattggcgctgcactccctttttccgtttctgctgccaattcagcagcagaaaaaaccgttgttgagtcggacgaagccgtagaatttaacgaacaatttttacttaatagcagcgctaatatcgatattagtcgctatgcatatggcaacccggtgcttgccggaacctatcgtgtgaaagtgaatcttaacaatgcgttgaaatctacctctgaaattacctttaatgaaaacggtacgccacgcgccagtgcatgtctgacgccgcttttactcacccaggcaggcgttgatcccgccgcaatgcgcgatgacgttgaggtcgacgacaacaccacgtgtctggatataaaaaaatactaccccggtgcgacggcgaattacgattccggcaaacaggccatggatctcaacttcccgcagatttatatcctgaagcgtcctgccgggtatgttgacccctcactgtgggaagatggcgttccggcggccatcgtctcttatgatatgaacgcctggcacagtgaaggcaatggcacaacgtccgataccgcttacgtggggctacgttacggtttaaatatgggaccatggcgtttgcgttcccgaggtagccttaactggaacaaagataccggtagcgaatacaacaatcaggacgtttatttacagcgagatatcaccgcgctgaaagcgcaaatggtgataggcgactcctatacccgtggcgatgcgtttgactccttcagcctgagcgggatacggatgtataacgatgaccgcatgttaccgatgggctccagcaactacgcgcctgttatccgcggcgtcgccaacagcaatgccaaagtcacggtgatgcaaagcggcaataaaatctacgaaaccaccgtaccgccgggggcgttcgagattaacgaccttagcaccacaggttatggtaacgatctgctggtcaccgtagaagaagcggacggcagcaaacgcagctttaccgttcccttttcgtcagtcacccaaatgttacgccccggcgcgacacgctgggatatcggcgtcggcgagctgaacgatgattctttgcatgataaaccgcaggtgggttacgcgcagttttactatggcctgaacaacacctttaccggctatatcggcgcgcaatataccgatatgaatttctatgctgggttattaggtctggcaatgaacaccggtattggcgcattcgcctttgatgtgacgcaatctcacgccagtattgatgatttaggcacgctcagcgggcaaagctaccggctgacctacagcaaaatgatcgaggcgaccaatacctcatttaacgtcgccgcttatcgtttttctactgaagactacctcagcctgaatgacgccgcgtctttgcaagacagcgttaaacatcagcaatatgcccagcaaagttatcgctcaggtgatgagttatatgccgattaccaacgtaccaaaaatcaggtgcaaatcagcatcaaccagcccttaaaccagggagaaacaacctggggctctgtgtatgtcagcggaacatggcaggactactggaatgatgcgggctccacggccaactatagcgtgggttacaacaacagttttgcctacggcagctatagcgtgtcattacaacgcgcctatgaccagaacggcagtaaagacgacagcgtctatttaagtttcagtattccgttgagtatgttctcccccgacggagaacgctctggcggtttctccaatatcaacatgggcctgcgttctgacatgaagggcggtactaacgtcaactccaccgccagcggtaataccaaagatagcgacatcagctactccgtgagcgccacctccagcagcggtaattacggcaacctgaatcaggtaagtggctttggctcccttaacagcagctatggcccattagggctttccgcctcgtttggcgacgacaatagccagcaatattccgccagttacagcggtggcatggtgctgcattctggcggcgtagcgttcgcgccgggcagcattggcgaaaccgacgccgtcgcactggtgaaagccagcggcgcacaaggcgcaggactgggctacagcagcagcgaaatcggcagttcgggctatggcattttaccgtatatgtcagcctaccgcgaaaaccgggtgtcgctggatatcagcacactggagaaggatgttgaaatcaaaagcaccagcacggttaccgtaccgcgtagcggcgccgtcgtgctggtgaattttgaaaccgatgaaggtcgctcactgattctggaattgctgcgtagcgataaaggctttattcctttaggcgcagatgtccttaataagaaaaatgaaactgtcggtaccgtaggccaggccggacaagcgtacgtgcgcggcgtagaaccgcaaggcgaacttcgcgtggtgtggggcagtggtaaagaaagcacctgtacggtgcgttaccaattagctgaaatcacggtaaaagcgggactaacgcccgtactgaacaatcaactttgtcacatgtaa

SEQ ID NO: 373031 - DNA, 753 bp, Salmonella enterica
atggtcaatacggttattacaaagggatttaaaaccacctgcttcgctgccgcggccttcacggcatttgccacattccaggtaaacgcagatatcgtcatatccggaacacgtattgtgtacccagcgtcatcaaaagacgtgattgtgaacctggataaccggggcaataaacctctactggtgcaaacctggctggatgacgggcgtgacggtgttgacccgcaggagctaaaactgccgtttgtcattacgcctccggtatctcgtatcgatccacaaaaagggcaatccttgcgtattacgtatatgggtagcgcattacctcaggatcgggaatcgctgttttggtttaacgtgctggaaattccgccaaaatcaaaagcgaaagaaggcgagagtttaaatcaacttcaactcgcctttcgcacgcggatcaaattatttttccgcccggatggcctgaaaggcacgcctggcgatgcggctgcaaacctgaaatggtcgcagaaaaaagaaggcaatacgctttcactgtttgcccaaaatgacagcgcgtacaacgtttctatttccaacgtaaaattaaaagtgggcggtaaagaatatactgtcgacagcaaatccgttttaccctttagcggggtcagcatgcccgtaaaaggtctttcgaataatattaacggtaccgttatctataacaccattaatgataatggcggcaccaacaaacgagaagccaaaatagactaa

SEQ ID NO: 373032 - DNA, 606 bp, Salmonella enterica
atgtttttcagaaaatatggcgtagccgcttttattgcaatgactttgagtgccgggtctgcaatggcagcagatccagatacgggtactattactttccacggtctggtttctaacaatacctgtaaaatctctcttgataataaaatagatcaagacggtaatgattttgacattacgctggataccgtttttgttaaaaacttcgctaccgcactgggtgataacagtactctgggcgaaaaacagttcactctgaatctgagcgaatgtgataacgcaacggtaaaagatgcctccgcgcagtttaattcctggggcggttccagctcaacatcaggtggtctgttagtaccaccggctaatctgcaaggagcagcagaaaacgttaacctggtgctggctaacaacggtaacggcgctaccgatctgatcaaaattgaccagactaacaacacgcagaaagccactatttccgctgatggcaccggtgacctgttctaccgcgtagcctacacccagggccagaagtggaatgcagacaccagcccggtaacggcaggaaccgtacaggcacaagttgccttcaccgttatttataactaa

SEQ ID NO: 373033 - DNA, 435 bp, Salmonella enterica
gtggattttgatgaactccaccggcgcgcccagcgcctccagacgcgcttcgatggcgtcaatgaccggccccgccgccccattgccggaattcaccaccagcttcagcggggtgagattgttaacactgatatagccgagcaggtggtcgatgtaggcgtcgcgcaggctgatttgtctgtagctgccgcgcgcggcctcgttcaccggcgggaagtcgcccgcttccgccagacgctgaacgtcgcgcagaccggtgtcgccgcttatcgggcgggcgccctcgcgcaccagcttcatgccgttgtagtccatcggattatggctggcggtcacttcaataccgccgtccacgccaaggtggaaggtggcgaagtaaatctcttcggtgccggacataccgatatccagcacgtcgacgcccgcgtcctgtaa

SEQ ID NO: 373034 - DNA, 966 bp, Salmonella enterica; identical to SEQ ID NO: 369831

SEQ ID NO: 373035 - DNA, 474 bp, Salmonella enterica
gtgtcctacgatcgcaagcagacaacctgcaaacccgaagatctgacgatcacgctaccgaatattgcgctttctgaattatataacacaggcaaggtcagcaacaaaaatgccgcggataatattcgactccagtgtgataatctttttggtaatgctaaacaaacatcgcgtaaaatgacggtttatctctccagcagtgatttaataccagatagctattctgtgttgcgtggtgctgtgaataatggcgtcggatttatactggagagcggtggaaaaacggtgaatatttcaaatacagcagagcagggtaatgcttcaacgttatggaaagtggatcaagtaggcacgccgctcaacagtgatatgataacaatccctattatcgccagttattatgtttatgaccgagacaatataaagccaggcgatctaaaagcgactgcgctgatctatgtgaaatacgattaa

SEQ ID NO: 373036 - DNA, 507 bp, Salmonella enterica
  misc_feature (400)..(409): n is a, c, g, or t
atgaaactctttctttttatcgtgatgttattgattttacctgaaacatacgcagcctgtacgggagaaattacttatcaggataatttaattattcgtgaggattttacgattaaccctaatcagtccgcaacttatagccataattttaacgatacaacttgttcagggacttataagataacgcgtatggatccttccgatatcatcgtgggattatacaatgatacagtaaaactgaagttaaaaatcgcttgggcagataataatactctcacaatgccgtttacaacgggctatacggtaacggttgaacccgcttcctctggggcgaatgtaaatatttctgccggtagtgggaacagtgtcctaatcaacggggtggtatcaataacaagcnnnnnnnnnnacaagcgcttcttctgcaactcagtttacggccagtttgcggtttttagggtgcctgctagcaggaagaggctggaatgcctgtgccgcagattataa

SEQ ID NO: 373037 - DNA, 2118 bp, Salmonella enterica
  misc_feature (1708)..(1717): n is a, c, g, or t
ttgagcgttccccaggcctatgtaaatgaggtcgaggcgggttatgtattgcctgaaaactgggatcgcggcatcaatgcattttatacttcttactatgccagccagtattacagtgactataagaattctggcagtagtgaaagtacttacgttcggttcaatagcggtttcaatctgttgggctggcaagcgcatgcggataccacatttaataaaaccgatggcagcagcggtgagtggaaaagcaacacattgtatctggagcgcggtatcgctgagctcctcggcacattacgcgccggggatcagtatacctcgtcagagatttttgattctgtgagatttaccggcgttcgcctgttccgcgatatgcaaatgttgccaaactcgaaacagaattttacgccgttggtgcaggggattgcacagactaacgctttggtaaccatcgaacagaacggattcgttgtttatcagaaagaggttcctcctggccccttttccattgcggatctgcaactcgcgggcggtggcgctgatcttgatgtcaccgtgcgtgaggcggatggttcgataaatacctggctggtgccttacgcttccgtaccgaacatgttgcagcctggcgtctctaagtatgatttttccgccggccgtagtcatattgaaggcgccgataatcaggccgattttacacaaatcagttatcagtatggccttaataacctgttgacgctttatggcggtacgatgctatcgaaccattataatgcgtttaccctcggcacggggtggaatacccggattggcgccatttcgcttgacgctacgcgagcgcacagtaaacaggataatggcgatgtatttgatggtcagagttatcagattgcttataataaatacctgacccaaacattaacccggtttggtctggctgcgtatcggtattcatcacaggattaccgcacatttaacgatcatgtctgggccaataataaaaataactatcgtcgcgataagaatgatgtatacgatattgctgattattatcaaaacgattttgggcgtaaaaatacgttttcagctaatgtgagccaatccttgccagaaggatggggcgcagtatcactgagtgcattatggcgtgattactggggacgtagcggcaccagtaaagattatcaaataagctattccaatacgttccagaaaattaattatacgttatccgccagtcagacttacgacgaggatcataatgaagataaacgttttaacctgtttatttcaattccctttgactggggggacggtattactaccccgcggcgtcatctgaatgtgtcgaactcgacgacctttgatgatgatggatttacctcaaacaatattggtttaaccggtacggcaggcagtcgcgatcaatttaattacggcgtgaatgttagtcatcagcgacaggatagtgagaccacagcggggacgaatttaacctggaatacgcccgttgcaacgcttaatggtagttacagccagtcgtccaattatactcagaccggcggaagtatttccggtggggttgtagcctggagtggcgggttgaatttatccagccggctttcagatacctttgcgattatgcaggctccgggacttgaaggagcctacgttaacggccaaaaatatcggaccaccaataaaaaannnnnnnnnnaaaaaggaacggtggtttatgacaaccttacgccatatcgcgaaaaccatcttatgcttgatgtgtcgcaaagtagcagtgaaacggaattacgcggtaaccgtaaagttgccgccccgtaccgaggggccgtcgtgctagtgaattttgataccgaccagcgtaaaccatggtttattaaagcgcagcgtcctgatggctcgcctcttatttttggttatgatgtagtagatcatcatggtcataatgtgggcattgttggacaaggtagtcagctatttattcgaacgaatgatattccgcccgaagtcagtgtaccagtagataaagagcaggggctttcatgttcaatcacctttggtaaaacggttgatgaaagtaaagtttatatttgtcggtag

SEQ ID NO: 373038 - DNA, 684 bp, Salmonella enterica
atgaaaatattatctgcagtattattatctgccataattttgcctgcgcatgctggtattgttatttatggtacgcgtgtgatttacccggcagagaagaaagaagtcgttgtacaattggtgaatcagggcgagcaagcttcgctggtacagtcctggattgatgacggtaacacttcattaccgccagaaaaaattcaggtgccatttatgctgacgccgccagtggcgcgcgttgccgctgagtctggtcagcagatcaaaatcaagaaaatgcctaatagcttaccggacaacaaagaaagtctgttttatctgaatgtgcttgatattccaccaaacagccaggaaaacgccggtaaaaatgtgcttaaattcgcaatgcagaatcgaataaaattaatatggcgccccagtcgaattgccgccgtaaccaaagacagttttcagaggattggtttatttcgcagtaataaaactgtcatcatgaaaaatgatactgcaaactggattaccgtgacggatgtaaaagcaggaaatactaagattaatgatcaaactatcatgctgccaccgctatcgacgcaaaatattaacatgaaatatgcgtcaacaagccagtatgaagtaacaattattgatgataatggtaactatattagtagcaaaatcaatgtaaaataa

SEQ ID NO: 373039 - DNA, 531 bp, Salmonella enterica
atgaaacgttcacttattgctgcttctgtattgtctgctgtatttatgagcgctggggcttttgctgttgatgagtatgattcaggcgttctgaatattaacggaaaggtggttggtactacctgtcaatttttgggtacgaacaccgctgaaattagactgaatgaaattggtgcggataaagtaattaatttaaccccgggtcagatttatgatgcagtaactagtcaaacccagatgccgttgaaaataaaatgccaaccggatgtagcgccgcgtattaccttctcttcaacgcaatttgacagccgcgatatcacatttaataacgggtctgccaaaggtgtcggttttgcggtttactacggaagtacggataatcagattgatccagagacgggggtgacactagctccaaatagcagcggtgaatacgacctgacttttttagcacgctatgcgcgtttagacggtgatgttgcttctggtgatgttagctcaacactgactttaacggttgttactgactaa

SEQ ID NO: 373040 - DNA, 531 bp, Salmonella enterica
atgcaggttctacgtcttatggcactgccactattcgcgctctctctatcggttagcataactggctgcgatcagaaaaacgatactctccagggaaagcaaaataacatgacagcgtttatcaagaagatagccgctagcaaagagtcagaggaaacacaacgctatgtaggtaatctcaacggtattgaaatcaagttaacctattactacaaaggggatatcgttttacgtcaaatatctgaacataaactactttataagaccctgaaagccaataataaagaagaagcacaaaaaatgctgagtcaagtcggcgaagcttatcagggtatgccgggtttgactgaacgaatcgactattatgatagctatgctacggaatatgtggatattgattttacccaggcaaaaataagcgacctctgtaaattgccaggatcatcaattgacaactgttccgcgtactatctgtcaatgattcgctcgcagaaactgttggaagagagcggatatcatagaatcaattag

SEQ ID NO: 373041 - DNA, 2367 bp, Salmonella enterica
atgccctttcatattggaagcggatgtcttcccgccaccatcagtaatcgccgcatttatcgtattgcctggtctgataccccccctgaaatgagttcctgggaaaaaatgaaggaatttttttgctcaacgcaccagactgaagcgctggagtgcatctggacgatttgtcacccgccggccggaacgacgcgggaggatgtggtcagcagatttgaactgctcaggacgctcgcgtatgccggatgggaggaaagcattcattccggccagcacggggaaaattacttctgtattctggatgaagacagtcaggagatattgtcagtcacccttgatgatgccgggaactataccgtaaattgccaggggtacagtgaaacacatcgcctcaccctggacacagcacagggtgaggagggcacaggacacgcggaaggggcatccgggacattcaggacatccttcctccctgccacaacggctccacagacgccagcagagtatgatgctgtctggtcagcgtggagaagggctgcacccgcagaagagtcacgcggccgtgcagcagtggtacagaaaatgcgtgcctgcctgaataatggcaatgcagtgcttaacgtgggagaatcaggtcttaccaccttgccagactgtttacccgcgcatattaccacactggttattcctgataataatctgaccagcctgccggcgctgccgccagaactgcggacgctggaggtctctggtaaccagctgactagcctgccggtgctgccgccaggactactggaactgtcgatctttagtaacccgctgacccacctgccggcgctgccgtcaggactatgtaagctgtggatctttggtaatcaactgaccagcctgccggtgttgccgccagggctacaggagctgtcggtatctgataaccaactggccagcctgccggcgctgccgtcagaattatgtaagctgtgggcctataataaccagctgaccagcctgccgacgttgccgtcagggctacaggagctgtcggtatctgataaccaactgaccagcctgccgacgctgccgtcagaattatataagctgtgggcctataataatcggctgaccagcctgccggcgttgccgtcaggactgaaggagctgattgtatctggtaaccggctgaccagtctgccggtgctgccgtcagaactgaaggagctgatggtatctggtaaccggctgaccagcctgccgatgctgccgtcaggactactgtcgctgtcggtctatcgtaaccagctgacccgcctgccggaaagtctcattcatctgtcttcagagacaaccgtaaatctggaagggaacccactgtctgaacgtactttgcaggcgctgcgggagatcaccagcgcgcctggctattcaggccccataatacaattcgatatggcgggagcctccgccccccgggaaactcgggcactgcacctggcggccgctgactggctggtgcctgcccgggagggggaaccggctcctgcagacagatggcatatgttcggacaggaagataacgccgacgccttcagcctcttcctggacagactgagtgagacggaaaacttcataaaggacgcggggtttaaggcacagatatcgtcctggctggcacaactggctgaagatgaggcgttgagagcaaacacctttgctatggcaacagaggcaacctcaagctgcgaggaccgggtcacattttttttgcaccagatgaagaacgtacagctggtacataatgcagaaaaagggcaatacgataacgatctcgcggcgctggttgccacggggcgtgagatgttccgtctgggaaaactggaacagattgcccgggaaaaggtcagaacgctggctctcgttgatgaaattgaggtctggctggcgtatcagaataagctgaagaaatcactcgggctgaccagcgtgacgtcagaaatgcgtttctttgacgtatccggcgtgacggttacagaccttcaggacgcggagcttcaggtgaaagccgctgaaaaaagcgagttcagggagtggatactgcagtgggggccgttacacagagtgctggagcgcaaagcgccggaacgcgttaacgcgcttcgtgaaaagcaaatatcggattatgaggaaacgtaccggatgctgtctgacacagagctgagaccgtctgggctggtcggtaataccgatgcagagcgcactatcggagcaagagcgatggagagcgcgaaaaagacatttttggatggcctgcgacctcttgtagaggagatgctggggagctatctgaacgttcagtggcgtcgtaactga

SEQ ID NO: 373042 - DNA, 459 bp, Salmonella enterica
atgacagcggaaaaaaataaaaagaacaaacagtttttaaatattaaaaatttcattccgtatgcaccggaaccagatgacacattattcgccgatgcggcgtatcttaaatcagaggatggtcaggactggtatgggtgccagcaattattttcagcagacacgctgaaaattacctacgacgataacgatgttattacgtgtattacgcgtgatgtttccgggctgtggcctgctggccagagcgttgcagagttgcctgatacggatgaaaaccgtcgcgctgatattcatgctgctggcagtttaaagacggtaaagtcgttcaaagggtttattcgccggaagagctgcgcaggcaggcagaatcgaaaattgaacgcccgggcgttgataccggatgatctggtcatcgtggaaagcgaccctgaaaaaatcgacactttagctgtaaaatga

SEQ ID NO: 373043 - DNA, 1176 bp, Salmonella enterica
atgaataagatcatcaaacgtttagagatcatcaaaagcgccatcgaacttgaggacgaagagattatccgtcagcagctcatctacctgaaaaatgagccgcaggatgccgtaatcagcgccattgcccaggcgattgaagctcgtcgattcagtgacgccatgcaagagatcgccgcctggctacaggctcaacgggcgctctcgacgtggcaagatccctctattgccgccagtaaactggagctgaaagcgcttgaagcccaacttcgcgatctgattgacaaacgaaatgcgcgggtacaaatcctcgacgatttcaacgacctctatcatctgcgcctcgggccgttgatgagccgtattctggagttgcgtaaacagctcgcggtgagtatgcagcgtaagcaagaagccgaaataaaacgccgggaaaaggattatcaatcctgcctgcaatttatttcccaggccgtggatcaactggcaacgctaaaacagcagtggacaggattgaatgccgcctcgcgcgaagcggtgggcatccgtcagcgaatccagcagcagacggaattaattaccgcgttgctggcggaaattcgcgagctggaagcggatttttcccatcaggacgacagcgcattccgccaggcgcaggaaaatgcggaacaggactatcaccagtaccgggagcagcagcaggaagcgcaattccgctacgcccgcgatcaacgtttgtcggcagacgaacgcagtgaattaaaacgtttgtggcgtcaggccagccgcctgtgtcacccggatgtggtcgccgatgaattgaaagaaaaagcgcaccagatgatggtacagcttaatcaggcgcggcagaatgccgatctggcggcaattcgcgcgttattgacgcagctgcaaagcggtctggaaccgatgatggcaagcgacaggctcaataacttggaacatctgcgccataaaatacgccagctccgcacgcaaatcgacgcgctgttgaaagagataacgcaactggaaacggaaaatgcctggcggctcgcctcttccgttgcggataaggaagcctatttctccgagcaggaacgggcgctaaccgaaattcgcaatacgctggaggcgcaggttcaacaggtggaacaggaacttctgtcagggtag

SEQ ID NO: 373044 - DNA, 1971 bp, Salmonella enterica
atgacccaaaagcgtaccctgctaaaatacggcatactctcgctggcgctggccgcgccattatctgcctgtgcgtttgactctcttacggtgattggcgatagccttagcgataccggaaataacggtcgctggacctgggatagtggtcaaaataagctctacgacgaacagttggccgaacgatatgggctggcattaagcccttccagcaatggcggttctaattatgccgctggcggcgcgacggcgaccccggaattaaacccgcaggataataccgcggatcaggtacggcagtggcttgccaaaacggggggaaaagccgaccacaacggtttgtatattcactgggtcggcggaaacgatctggcggcggccatcgcgcgacctgccatggcacagcaaatagccggtaatagcgccactagcgcggcggcgcaggtagggctgttactggatgccggcgccgggctggtcgtggtgccaaacgtaccggatattagtgcgacgccaatgcttctggaggcggtaatcaccgctgggctgggcgcagcggcgcccccggcgctaaaagcggcgttagatgcgctggcggagggagctacgcccgatttcgccagtcggcaacaggcgatccgcaaggcgctgctggcggcggctgcaacggtaagcagcaatccgtttattcagcaactgctcgttgaacaactgctggcgggctatgaaaaggcggcagggcaggcgtcagctctgaccgattattataatcagatggaagagaaggggctggagcaacacggcggcaatatagcccgtgccgatatcaacggcctctttaaggaaattcttgccaacccgcaggcgtttggtctgacaaataccgtaggtatggcctgcccgccgggcgtatccgcttcggcgtgctcctcggcaatgccaggatttaatgcgtcgcaggactatctgtttgccgatcatttacatcccggtccgcaggtccataccattattgcgcaatatattcagtcgatcattgccgcgccggtacaggcgacatacctgaaccaaagcattcagtcgatggcgcaaggcagtcgtaccacgcttgacagccgttatcagcagcttcgccagggggaaaaccctgtcggttcgctgggcatgttcggcggatacagcgggggatatcaacgttatgataataatgaggccgacgggaacggtaatcataataatctgacggttggcgtcgattatcagcttaacgagcaggttctgctgggagggctgatagccggttctctggataagcaacatactgacgataattatcgttatgatgcccgcggttttcaggccgccgtattcagccatttacgcgccggtcaggcgtggctggatagcgatttacactttctgtccgctaaattcagtaacattcagcgcagtataacgctcggtgcgctaagacgggtggaagagggcgaaaccaacggtcggctgtggggcgcgaggttaaccagcggttatgattttgtcatggtgccgtggttaacgaccggaccgatgctgcaatatgcatgggattacagccacgttaatggttatagcgagaagctcactaccagtacatcaatgcgttttggtgaccaaaacgcccattcgcaggtgggtagcgcgggttggcgtctggatcttcgccacagcatcattcactcctgggcgcagattaattatcgccgtcagtttggcgatgatacgtatgtggcgaacggcggccttaaatcgaccgcgctgacgtttagccgcgacggaaaaacgcaggataaaaactgggttgatatcgcgattggcgcagattttccgctgtcggcaacggtgtccgctttcgccgggctgtcgcaaacggcagggttaagcgatggcaatcaaacccgttataacgttgggtttagcgcccgattttga

SEQ ID NO: 373045 - DNA, 2730 bp, Salmonella enterica
atgaataaagagtccatatttcgtcagttggagctacggctagccggatgttcactaacagctgacgcgttaggcgcgtttagcgcaatggcgattgccgacagtctcaggcaaaaacgcagcattattagtcaccatcttaataacttgcatcgtgagcagcgggtggtcaaagtgaatagccgcccggtgctgttcctgcccgtcgaggcgctacgtcgtcaccaccggctggcggttcggcagggggattacgcgtccattcaggcgctgtgcgcggagcggcaggacagtctggagctgctcattggcgcacagggcagcttgcaggagtccctgcgtcagtgtaaggcggcgatcagttatcccggcgcgggcttgcctttgctgctgcgcggcccgacggggacaggaaaaagttttttggcgcgtcagctttggcagtacgccatcgagcagggcattttgcccccggaggcgccctttaccgtgtttaactgcgccgaatatgctaataacccggaattgctgacgtcaaaattatttggtcatgccaaaggtgcgtttaccggcgcagacagagcggtatccgggttaattgagaccagtaatggcggcgtattgtttatcgatgaagtgcaccgtcttccgccggaagggcaggaaaaactgttccattttatggataacggcacctggcgtcgcttaggcgaaagcagcgatgaacgcagcgccacggtacgtctgatattcgcctctaccgaagatctggaaaagcactttctggcgacatttattcgccggataccggtcattgtcaaaattctgcctatcgccgaacgcggacagtatgagcggctggcgtttattcaccatttttttcgtcgcgaggcgcagcgtcttcatcacgatttgtcgctggatagtgaaattatcagccaactgatgcaggagaccctggaagggaatgtcggcggcctggaaaatctcattcgtaatatttgcgccagcgcctggactttcggccagcgtgacgatggggtactggaagtaaaagccgggcaactgccggatcgtctgctgatggaggtgccctttaccgttccgcagacggcggaacgcatcatgatttatcgcgaaggtggcgtttttccgcgagtttccggtcagcatcaggaatatttacggttgacggaaaacatttgcggcctgtgcgaagagctggcgcaggagaatatttccgcacggacgtttgacaagctggtctatcaaaaccttacgttatatctcgatgccttaatgaataaagagagccctcgcgctcgtcaggacaagcggctgcgttttatcgaagatgtcgggaaagcgatcgctgcacattacgatctcgaactgaatgcggaattcgcttatctcaccggacgttatcttaccagcctgccgttaacgccggtggaggcgtcgccatcggttcgccatgtgatgctgcgctggctggaggaggcgccggggctggcgcagcgtgtggcgcaaaaactgctggacgtggtaaataataaatatgatttgttaatcgacacgctcgacagactggtcgtggcggccatcgtcagtaatgccattgacgccaccagcggcggtaaggtaaaagcgctgatcatcgcgcatggttattcgactgccagcagcattgcaggcgtggcgaaccgtctgattggcgaaaagatttatcatgcgatggatatgccgatggaggtcgcgtttagcgatgtcagccgggccattgtcgattatctccagcatacggatacccgcgcaggcgtcatggtgctgatcgatatgggatacaccaaagagatcgccgatgcgcttttgagcgtaattcatggcccgctggtggtggtcgataacgttacgacgcgtctggcgctgaacgtggccagcgagatcgcgctgcaaaaaaacatcgaacagatcgccgaagagatcgtcccgttaaatcagtcgcgctgggatgtcttctggcccgcgcagaaaaaagcacgcgcgctgctggtgacctgtattaccggcatcgggacggcgtttaaatttaaaaatttgatggaaaaaagtcagttgaccgactttgatattaatattatcgcctgtgaatatacccgtctgaaaaacagccggatggcggcctcgttgctgaatcagtatgaagtgattgcggttgtcggcaccattgacccgcagctggcgggcgttccctgggtggggattgaagagctgcttggcgagcaggggtatgcgcatttaagtcagttattaagcggttatcttaacgataaacaaattgcgttaattaataaaaatatggttcgcgaattttcgttgcataatgtggttaattcgttgaccattctcaatgccaataagacgatagggcatatcgaaacgattattgccgaatggcaaaatacgctgggcttcagctttaataataatttgattattagtttatatgttcatttgagctgtatgattgagcggctggtcatgcgcaatgaaattacccactataaaaacatgacggaatttaacgagcggcatggtgaatttatcgcgatggtaaatcattcgtttcagcggttgaaaattctttataacgtggcgctgccggtagcggaaattggctatattcacgatattttcgaattacggatagaggattttcgctggtag

SEQ ID NO: 373046 - DNA, 987 bp, Salmonella enterica
atgtctgttgctcatgaaaatgcccgccgtattattagcgatattttaggtaaacaaaacattgaacgcgtctggtttgtcggctgcggcggttcattaaccggcttctggccaggaaaatactttctggactgtgaagcgtcaaaactggctgtcggttatatcaccagtaatgaatttgtccacgccacaccaaaagcattaggaaaaaatagcgtcgttattctcgcctcgcagcagggcaatacggcggaaaccgtcgcagccgcccgcgtggcgcgtgaaaaaggagcggcgaccatcggtctggtttaccaacctgacacgccgttgtgcgaatacagcgactacatcattgaatatcagtgggcgcgttatccggaaacggtcgaccctgcacaacaaaaagccgcatacagcctgtggctggcgctggaaattctcgcccaaacagagggctatgcgcaatacgatgagttagtcagcgcgtttgggcgctttagcgacgttgttcacggcgcccaacggcaggtacaagaagatgctcagcgtttcgccgccgcatggaaggatgagaaggtggtctatatgatgggcagcggcccctctttcggcgccgcgcatcaggagtctatctgtattctgctggaaatgcagtggatcaactccgccagcatacatagcggagagtatttccacggaccgttcgaaatcaccgagccgggcacgccgtttatattgctgcaaagcagtggtcgcactcgcccgctggacgatcgcgcgattcgctttattgaacgctatcagggaaaactgcagttgatcgatgcggataaactcggcattcaggatctgcccaccgacgttggcgaatacttctgcggtctgttgcacaactgtgtgctggacgtttataacctcgctctggcgacagcccgtaaccacccactgaccacccgccggtatatgtggaaagttgaatattaa

SEQ ID NO: 373047 - DNA, 1062 bp, Salmonella enterica
atgcaagtagaagactatatgaacgagacgccccttcgcctgctggagatgctgacgcagacgcgggaagatctctggcgcgcggcgcaggcgctaacggaacgcggcgtcacccgcattattctgacaggctccggcacgtcataccacggcgcgctgaccgctcgcacgtttatgcagcgctggtgcgcattaccagtggatgtctgctggccgtttatgcttgacgacgagacgcttgcccgcagcggcaaggcgctggttgtcggcatctcccagggcggcggcagcctctcaacgctggcggcgatggagcgcgcccgcaatgttggtcatatcaccgcctcaatggctggcgtggcgcctgcgactatcgaccgggcggcggattatatccttaccgttccctgcggcgaagaaaccgctggcgcgaaaacaaaaggctatcactgcacggttctcaatttgatgctgctggcgctcgccgtcgccgggcagcaacagcggctggacggcgaacagcgccggtcactgctgctgcggatggaaaagacctttaaccacctgcccgcgctggttaccgcctcgcaggcgtgggcgcaaaccaatgcgctggcgctgcgcgatagcgcagatattcgtctgaccggcccggcaacgctgttcggtacggtgcaggagggtgcgctcaagatgctggagacgttgcgctgtccggtgtcgggctacgaattcgaggagtttattcacggtatttacaatgcctttaatgcgcaatccgcactcattatgctcgacccgcagcctgacgcgcgtcaggatcggctggcgcaaatactcggtgagtggacgccgtctatttaccgcatcggcccgcaggtagaaaataatggtctgaatctgaatttcccgtttgtcaatgatgaggactttgccgtctttgaatatatcattccgctacaaatgctatgtgcgatattacccccgcaaaaaggcattaatccggcgatacctaaagatccgcaattccatcaaaaaatgaaaagtaagcaagaaatttaa

SEQ ID NO: 373048 - DNA, 855 bp, Salmonella enterica
atgagtgaagtgacgcagaccctgatcgacgacgcacaggctcactcgcaaagcgaaagccgcatcaccgcccgcgatttacgcagcgttttctggcgctcctttacgttgcaaggatcgtggaactatgaacgccagcagcatatgggctatgccttcgctatgtcgccagcgctaaagcgtatctaccaggaccccgccgaactggggcgcgccttacagcgtcatctggtgctgttcaataccacgccgcatctgtcaacgtttgtctttggcctgtcgattgcgatggaggaggaaaatcaacgcaacccggactttaacgaagagtcgatcaatgccgttaaaaccagcctgatggggccgctggccgggatcggcgattccatcttctggggatcgctgaaagttatcgccgccgggatggggatctactttgcccagcagggcagcattctggggccgattctcgccctactggtctataacattccgcacatcctctgccgctggtacgccctcaaactgggctaccgggcggggaccacctggctgatgcgcctctggcaaagcgggctgatggacagggtgacttatatcgcgtcaatcgtcgggttgatggtcgtcggcgccatgaccgccagcatgatcgacattacaaccccgctgagctttaccgccgggcagactaccatgaaagtgcaggattttattgacaaaatcctcccttccctgctgccgctgctcttcacgctcggcatgtacaaacttatccgtaagggcgtgaacattaactggatcctgttaggcaccgtcgtgtttgggcttcttgccagcgcgctgggcctgctttga

SEQ ID NO: 373049 - DNA, 744 bp, Salmonella enterica
atgttgctcaccgcaacgctgctcggcctgattgccgcactgggcattcttgacgggcgtttactcggcgtgtcgatgattgaccgtccgctggtgatgtgcgccctcaccggtctggtctgcggcaatttacacgaaggcattctgatcggcgcgacgctggaactgatctttttaggtaatgtcgctatcggcgccgcggtaccgcctgatgtcgtcaccggttcggtactggcgaccgcgttttctattatgtccgggcgcgggcccgaagcggcgctgaccatcgcgattcctatctctatgctggcgcagaccctcggcgtcctggtgcgcgtggttaacgcccgctttggccacatggccgatcgttatgcggcgcagggtaatacccggatggttgccgttatgcacctgggaggcccaacgctgctctattttctaagcggttttctgccggtctttttcgccattttgctcggttctgccgccgtcacctggttcctcgacgccattcccgcctttattaccaatggcctggttgtcgccagtaagattttgccggcgctgggtttcgcgttgctgatcagcatgatgcttagcagcaaattaatgccttaccttgggctgggctttctgatcgccgcatataccaaactggacatcatcgccatcgcgctgtttgccgtggtgctggctttcattatcagccagtttcttaacacatcccaacaggagggctaa

SEQ ID NO: 373050 - DNA, 471 bp, Salmonella enterica
atgatcaaattagtgcgcattgattaccgcctgctgcacggccaggtggtcttcgcctggacccgggcgctggatatcgaccatatcatcgtcgctaacgccaacgccgccggcgacgcgtttgtctctatgtcattaagtctggcaaaacccgctggcgtgtcgctggacattatcacggtggaacaggcggcggaaaaactcaccagcggcaagctggatcacaaaaaagtgatggtggtgctgggaaataccgccgaaaccctcgccttcgtcgagaaagtgccagggattagcgttatcaactacggcggtatcgcgcaaaaagagggcgcgcagcagttcggcaaagccatatacctgaccgagcaggagattgccgatagccaggcgctaaaagccaaaggcatccgtctggaaatgcgccaggttccggctcattccgccgaattgcttaacgataaactctga

SEQ ID NO: 373051 - DNA, 450 bp, Salmonella enterica
gtgagacatgtttatgtagccagccatggcccttttgcccgcggacttattaacagtctatcgctgctgattggcgacgaacacggcgtgacaccggtttgcgcctacgatggcgatattgtcaccacggagcagcttgaacaaaccctcgaaaatctgatcgcgcaagccaacggcgaagaagtggtggtgtttaccgatctgctcggcggcagcatcaacaatagcgccgcgaaagtgctgatgcgtcaccgtcacgtttttgtggtggctggcgtcaacatgaccctgttgctggagtttttactctgtgaagaagaaagcacagacgcggccattacctacgccaccaatgcggcgcgtgaatccattgtctttatcaacacgctaataacacaaccatccgctgacctacagggagaatcccatgatcaaattagtgcgcattga

SEQ ID NO: 373052 - DNA, 1161 bp, Salmonella enterica
atgagaaataacccactgattccaaaaagcaaattgcccaatcttggtaccacgatttttacgcaaatgagcgcgctggcgcagaaacatcaggcaataaatttatcgcaaggcttccctgattttgatggtcctcgttatttgcacgagcggttggcttatcatgtcgcgcagggcgcgaatcaatatgcgccgatgacgggggcgcaggcgctgcgggaggccattgccgataaaacggcggaaatatatggttatcgacccgatgacgtcagtgatatcaccgtcacagcgggcgcgacagaagcgctgtatgcggcgattaccgcgctggtgcgggcaggggatgaggttatctgtttcgatcccagttacgacagctatgccccggccgtggcgctctccggcggagtgttaaaacgcatagcgcttacgccgccgcattttcgcgtcgactggcaggcgttttcggcgttgcttagcgagcgcacgcgactggtgatcctcaatacgccgcataatcccaccgctaccgtctggcgccaggcggatatcgaggcgctgtggcaggctatcggcgagcgggaaatttatgtgttaagcgatgaagtgtacgaacatatttgttttgccgccgaaggtcatgccagcgtactggcgcaccctcagttacgagagcgggcggttgccgtttcatcgtttggtaaaacctttcatatgacaggatggaagattggttactgcgttgcgcctgcggccattagcgccgaaatacgcaaagttcatcagtacctgacgttttgcgtcaatacgccggcgcaactggcgctggcggatatgctgcgcgccgcgccggaacactatcgcgcgttacccgatttttaccggaaaaaacgcgatgtgctggttaacgcgctggcgcaaagccgattaaaagtgctgccctgtgaaggtacctattttcttttaatcgattacagcgcagtgtcgacgctaaatgacgttgagttttgtcagtggctaaccgaagaagtcggtgtcgccgctattccgctctctgtcttttgcgccgcccctttcccgcatcagcttatacgtttatgtttcgctaaacaggaatcaacgctgctggccgccgcagagcgcctgtgtaaactgtag

SEQ ID NO: 373053 - DNA, 525 bp, Salmonella enterica
  misc_feature (457)..(466): n is a, c, g, or t
atgtcggtttataaagttccgctcgagcaaaatgttctggaagcggctcaagagcgtataatgtggaccctggaaaccttaccccgggtctgcgtctcattttctggtggtaaagattcaggacttatgttgcacctgacggcaacgttggcgcgcaaaatgaataaaaagatccatgttctcttcattgactgggaagcgcaattctcctgtaccatcgcctatattgaatcgttacgtgaatactacgcggacgttattgagcgtttttattgggtcgcattacccttaaccacacaaaattccctttcacaataccagccggagtggcagtgttggcaaccgggtaccgactgggtacgacaaccgccagaagatgcgattaccgatccggcctttttttccttttatcaacacggcatgacctttgaacagttcgttcgcgattttgccgacnnnnnnnnnnttttcagaaaaacgtcctgccgctatgctggtcggtattcgttccgacgaatcctataa

SEQ ID NO: 373054 - DNA, 1215 bp, Salmonella enterica
atgttgtctccgccccgccagtcaatgcggggcggtaaatttttgatatcgggggtcggaatgtatgctttaacccagggccggatctttaccggtcacgaaattcttgatgaccatgcgcttgttgtcgctaatggcctgattgaccgcgtttgtccgatggccgaactgccgccgggaatagaacaacgctcattgaatggggccattctctcccccggttttattgatgtgcagctaaacggctgcggcggcgtgcagtttaacgataccgcagaagccgtcagcgttgaaacgctggaaattatgcagaaagccaatgaaaaatcgggctgtactaactttctgccaacgcttatcactaccagcgacgaattgatgaaacagggcattcgcgtcatgcgcgaatacctggaaaaacatccgcaccaggcgctgggtctccacctggaaggcccctggcttaatctggtaaaaaaaggcacccataatcctgatttcgtgcgtaaaccagacgctgcgctggtcgatttcttatgcgataatgccgacgtcatcaccaaagtcacactcgcgccggaaatggtgcctgctgacgtaatcgctaaactggcgaatgcgggcattgtggtttccgcaggtcactccaacgcgacgttaaaagaggcgaaagcgggcttccgcgccgggattacctttgcgactcacctgtttaacgcgatgccgtacattacagggcgtgagccgggccttgctggcgctgttctggacgaagcggatatttattgcggcgttatcgccgatggtctgcatgtcgactacgccaacattcgcaatgccaaacgccttaaaggcgacaaactttgtctggtgacagacgccaccgcaccggcgggggccaatattgagcagttcattttcgcaggtaaaacaatatactaccgcaatggactgtgtgtggatgaaaacggtacgttgagcggttcgtccttaaccatgattgaaggcgtacgcaacctggtcgcgcattgcggcatcgcgctggatgaagtgctgcgcatggcaacgctctatccggctcgcgctatcggcgttgataaacatctcggtagcattgcgccgggtaaagtcgccaacctgaccgcgttcacccacgattttaaaattatcaagaccatcgttaatggtgacgaggtcgttgacttgagtaagtga

SEQ ID NO: 373055 - DNA, 1305 bp, Salmonella enterica
atggcacaacacacacctgcaacatcgcgcgccggcacgttcggcgcaatactgcgcgtgacaagcggcaattttcttgaacagtttgattttttcttgttcggattttacgccacctatatcgccagaacgttttttccggcggaaagcgaatttgcctcattaatgttgacctttgccgtctttggctccggttttttaatgcgccccgtcggagcgattgtgcttggcgcctatattgacagaatcggacgccgtaaagggctgatggtgacgctggcgattatgggctgcggtacgttgctcatcgccctcgtccccggctaccaaacgatcggcctggcagcgcctgcgttggtgctgttgggccggttattacaaggattttctgcgggcgttgagttaggcggcgtctcagtctatctgtccgaaatcgcaacgccaggcaataaagggttttataccagctggcaatctgccagtcagcaggtcgcgatcgttgtcgccgcgttgattggttatagcctgaatatcacgctgggacacgacgcgatatcggagtggggctggcggattccgttctttatcggctgtatgatcattccgctgatttttgttttacgtcgttcattacaagaaacagaagcgtttttacaacgcaagcatcgccccgacaccagggaaatttttgcaactatcgccaaaaactggcgcattattacggccggaacgctgctggtggcgatgaccaccacaacgttttattttatcaccgtttatacgccgacctatggcagaaccgtgcttaatctcagcgcgcgggacagtttgatcgtcaccatgttagtgggggtgtccaattttatctggttacccattggcggcgcgatttccgaccggattggccgtcgcgccgtgttaatgggcattacgttgctggcgctgatcaccacctggcccgtcatgcagtggctgaccgccgcgcccgactttacccgcatgacgctggtactgctgtggttctctttcttttttggcatgtataacggcgcaatggtcgcggcgttaaccgaagtgatgccagtctatgtgcgtaccgttggtttctcgctggcctttagcctggcgacggcgatttttggcggcctgacgccggccatctctaccgcgctggtaaagttaaccggcgataaaagctcgcccggctggtggctgatgtgcgcagcgttatgtggacttgccgcgacggcgatgctgtttgtacgtctgagtcgcggctatatcgcagcagaaaataaagcctga

SEQ ID NO: 373056 - DNA, 1140 bp, Salmonella enterica
atgaaacagcttgaaaaattaatcattgaggccaccgtgcttaccgaaccggaagccgaggtcgaacgcgtcatgcaagtgtgtaacgcgtgtcgctactgcgaaggtttttgcgcggtatttccggcgatgacccagcggctcgaattcggtaaagccgatattcattatctggcgaatttatgtcataactgcggcgcctgcctgcacgcatgccagtatgcgccgccccatgaatttgccattaacgtgccgaaagcgatggcgcaagcccgcctggagacgtatcaacagtatgcccagcccgccgcttttggcgcgttataccgccgggcggggatcaccgtcgcgctggcgctgatagtcggtctgacgctctttttattactggcgatggcgctgaaagggtcgctgattcatccgccgctggccggtgacttctatcaaatttttccgcatagcctgctggcatggatgtttggctcagtttttgtgctggcaatcggtttgcttatggcgggcgtaattcgcttctggcgtgagatctcgccgggcgtaccgcgttcggcagagattgcggaagcgtcgcacaatgcgttaacgctgaaatatctcgacggcggtcacggcaaaggctgtaacgaagcggacgatgcgttcacgctgctgcgccgtcgctttcatcactttaccttctacggttttatgctctgttttgccgccacggtcgtggcgacgggctatcactacgtcgccggttgggaagcgccctacccgttctttagcctgccggtcatgctcggcacgctgggcggtatcggtctgcttatcggcccggccgggctactgtggctcaatctgcggcggtcgccgttacatggcgatgcgcgccagaaacccatggatcgcggctttattctgctgctgttcttaaccagccttaccgggctggcgctgctggcaggcagagacaccagcggaatgggcatactgctggcgctccatttaggcgtggtgatggcgctctttctcacccttccctacggaaaattcgcccacggatttttccgctgcgcggccttactcaaatgggcagttgagaagcgacgcggaaaacatgcgggggatacaggcaactga

SEQ ID NO: 373057 - DNA, 744 bp, Salmonella enterica
  misc_feature (674)..(683): n is a, c, g, or t
atgaatttgctcaatctcaagaatacgctgcaaacatctttagtaatcaggctaacttttttatttttattaacaacaataattatttggctgctatctgtgcttaccgcagcttatatatcaatggttcagaaacggcagcatataatagaggatttatccgttctatccgagatgaatattgtactaagcaatcaacggtttgaagaggctgaacgtgacgctaaaaatttaatgtatcaatgctcattagcgactgagattcatcataacgatattttccatgaggtgagccggcatctatctgtcggtccttcaaattgcacgccgacgctaaacggagagaagcaccgtctctttctgcagtcctctgatatcgatgaaaaaagctttcgtcgcgatagttttattcttaatcataaaaatgagatttcgttattatctactgataacccttcagattattcaactctacagcctttaacgcgaaaaagctttcctttatacccaacccatgccgggttttactggagtgaaccagaatacataaacggcaaaggatggcacgcttccgttgcggttgccgatcagcaaggcgtattttttggggtgacggttaaacttcccgatctcattactaagagccacctgccattagatgatagtattcgagnnnnnnnnnngatcaaaacaaccacttattgccgttttcatacatcccgcaaaaaatacgtacacagttag

SEQ ID NO: 373058 - DNA, 159 bp, Salmonella enterica
atgaccatttgttggaaagcccctgcggttaagggggttgaagtgataatcattatcactaacatgctgttatatcctggtgatttagaacgcgaggtaactctatggaattgcattcagacacgtttaacccggaggacttcccctggcaagggctga

SEQ ID NO: 373059 - DNA, 3057 bp, Salmonella enterica
atgattccacaaatttctcaggcacccggcgtcgttcagctggtgctcaattttttgcaggcgctggagcagcaagggtttacgggcgatacggcaaccagctatgccgaccgtctgacaatgtcgaccgataacagtatctaccagcttcttcccgatgctgttgtgtttccccgttctacggcagatgtcgcgcttcttgcccgtctggcggcggagccgcgctttacgtcgctgatatttacccctcgaggcggcggtactggcacgaatggccaggcgctaaaccagggcattattgttgatatgtcccgctatatgaaccgcattattgaaattaatcctgaagagggatgggtgcgggtagaggcgggagtgataaaagatcagcttaatcaagcgttaaagccgtatggctatttttttgcgccggaactttccaccagtaatcgcgccacgcttggcggtatgattaataccgatgcctccggtcagggttcgctggtctatggaaaaacgtcagatcacgtcttaggcatacgggccgtattgttggggggcgatatccttgacacgcaatcgatgcccgtagagcttgcccggacgctgggtgaaaacacgacgacgccaggccgcatctatcagaccgtctatcagtcctgcctggaaaaccgccaacttatcctcgatagctttccaaagctcaatcgcttcctgacaggctacgatttacgccacgtctttaacgatgacatgacccgcttcgatctcacccgcatcttaacggggtcggaagggacgctggcgtttattactgaagcccggctggatattaccccgatacccaaagtccgccgtctggtgaatgtaaaatacgactcctttgattccgcgctgcgtaacgccccttttatggttgatgcgcgcgccttatccgtcgagacggtcgattccaaagtccttaacctcgcgcgggaagatattgtctggcactccgttagcgaattgattaccgatgtgccggataaagagatgcttggcctgaatatcgtggaattcgcgggtgacgatgaagcgcttattgacggacaggtcgaggcgctgtgccaccggctggatggcctgatggcgcgagcggaagcgggcgtgatcggctggcaactttgtaccgatttgacgggtattgagcgtatttacgcgatgcgtaaaaaagcggtagggctgctgggtaatgcgaaaggcgctgccaaaccgattcctttcgcggaagatacctgcgtgccgcctgaacatctggccgattacatcgccgaatttcgcgctctgctggatggtcatggcttaagttacggcatgttcggccacgtggatgccggggtgctgcatgtgcgtccggcgctggatatgtgcgatccgcagcaggaactgttgatgaaacagatctccgatgaggtcgtcgcgctgaccgccagatacggtgggctgttgtggggcgagcatggaaaaggttttcgtgcggaatacagcccggcctttttcggcgaagttctgtatggcgagctgcgcaaaataaaagcggcttttgatccgcataatcgacttaacccgggtaaaatctgtccgccgcaagggatagaggcgccgatgatgaaggtggatgcggtaaaacgcggcacctgggatcggcaaatcccgctggcagtgcggcagacctggcgcggcgctatggagtgtaatggtaacggcctgtgctttaatttcgatgcgaaaagcccaatgtgcccgtcgatgaaaattagccttaaccggatccactcgccgaaagggcgggcgacgctggtgcgggaatggctccgtctattggccgatcgcggcgtcgatccgttgaagctggaaaaggagttgccagaaaaacgcgccagcttacgcacgctgattgcccgcacccggaatagttggcacaaacgcaaaggcgagtatgacttttcccatgaagttaaagaggccatgtccggctgtctggcgtgtaaagcctgtacgacccagtgtccgattaaaatcgatgttccggagtttcgttcacgtttcttacagctttaccatacgcgttatctgcgcccggtacgcgatcatctggtggcgacggtcgagacctacgcgccgctgatggcgcgtgcgccaaagacctttaacttttttattaaccaaccggtggttcgtaatctggcgaaaaaacatatcggtatggtggatttacctctgctttctgccccttcattgcaacagcaactggtgggccatccgtctgccaatatgacgcttgagcaactggaacgcatgagcgccgagcaaaaagcgaaaacggtactggtggttcaggatccgtttaccagctactacgacgcccgggtcgtggcggactttatccgcctggcggaaaaactgggcaggaggccggtattgttaccgttctcgccgaatggtaaggcgcagcatattaaaggttttcttaatcgctttgcgaaaacggcgaaaaaaacctctgagttccttaatcggatcgccgagttggggatgccgatggtgggtgtcgatccggcactggtgctgtgttatcgcgacgaatacaaactggcgctgggcgaacagcgcggcgattttcatgtgttgctggtgcatgaatggctggcgcaggaaataaatgcaagactgtccgtcgaggtgagcggcgaaccgtggtacttttttggtcattgtacggaagtcacggctttacccggcgcgcctgcgcagtgggccgccatctttgcccattttggcgcgaagctggaaaatgtcagcgtaggctgctgcggtatggcgggcacttatggacatgaactcaccaatcataaaaattcgctgggaatttatgagctatcctggcatcaggcgatgcaacgtttaccgcgaaaccgttgcctggcaaccggttattcctgccgaagccaggttaaacgcattgaaggtacgggcgtgcgtcacccgttgcaggcattactggagattataggttga

SEQ ID NO: 373060 - DNA, 1344 bp, Salmonella enterica
atgacggcgcatgaagttaattttgacgggctggtggggcttacgcaccattatgccgggctatccttcggcaatgaggcatcgacccgccaccgttttcaggtgtcgaatcctcgtctggcggtaaaacaggggctgctaaagatgaaagctctggcggatgccggctttccccaggcggtgatcccgccgcatgagcgaccttttattccggcgttgcgtcagctcggcttcacgggtagcgatgagcagattctggataaggttgcgcgtcaggcgccacgctggctttccagcgtgagttccgcgtcgccaatgtgggttgcgaatgcggcgacggtttgcccatcggcagacgcgctggacgggaaagtccacctgacggtggcgaatttaaacaataaatttcatcgcgctcttgaggcgcctgtgaccgaagcgctgctacgcgccatatttcgcgatgaaagtcagttttcagtgcatagcgcgttaccgcaggtcgcattattgggagatgaaggcgcggcgaatcataaccgtcttggcggcgagtatggttcggcaggcgtgcagctttttgtctatgggcgcgaagaggagaatgaaatacgacccgctcgttatccggcgcgccagagccgcgaagccagcgaggccgtggcgcgtcttaatcaggtgaatccgcaacaggttatcttcgctcagcagaacccggaggtcatcgatcaaggcgtattccataatgatgtcatcgccgtttcgaatcgacaggtattgttttgtcacgaagcggcgtttgcccggcagaaagtgctcattaatcagttgcgtacgcgcgttgacggttttatggcgatagaggtgcccgccggagaggtttctgtatcagatgctgtggcgacctacctgtttaatagtcagttgttaagccgtgacgacggctcaatgctgttagtgttgccgcgggaatgtcaggatcatgtcggcgtctggcgctatctgaataagctggtggcggaggataaccccatcagcgcgatgcaggtgtttgatttgcgagaaagtatggctaacggcggcgggccggcctgtctgcgattacgcgtggtgttaacagaagaagaacgacgggcggtgaatccagcggtaatgatgaatgacgctctgtttacggcccttaacgcgtgggcggatcgttattatcgcgatcgcctgaccgccgccgatctggccgatccgttattattgcgagaaggccgggaggcgctggatgtgttaacgcgtctgctggatttggggtcggtttatcctttccagcaaacgggggcggctgatggataa

SEQ ID NO: 373061 - DNA, 849 bp, Salmonella enterica
gtgaaaaacgtaacgttttgcgggcaggtgacgcttcctgccatcggacagggaacatggtatatgggcgagcgcgcggatcaacgtcagcgcgaggtttcggcgctgcgcgcggggctggatttggggttacgccttattgatacggcggaaatgtatgccgacggcggggcggaaaaggtcgtgggcgaggcgctggcagggcgacgcgatgaggcatttctggtgtcaaaagtgtacccgtggaacgctggcggccagaagatagttgccgcctgtgaggaaagcctgcgtcgtctgaaaacagattatctcgatctctatctattgcactgggccggaaacttttcattcgaagagaccgttgaaggtatggagcggctaatcgcgcaggggaaaattcgccgttggggagtctctaatcttgattatgacgatatgcaggcgctgtggcgcatccccgggggacagcaatgcgcgacaaatcaggtgctctatcatctggcgtcacgcggtattgagtatgatttattgccgtggtgtcaacaacagcgaatgccagtgatggcctatagcccgctggcgcaggctggccggttacgtagcggtttactgaatcatccggtggtgaatgaaattgcgcaagcgcataacgcaacggcggcgcaaatcttactgacgtgggtgattgcgcatccgggcgtgatggcgatcccgaaagccggaagtacagaacacgtgaagcaaaatgcggcggcgcttgagatcgccttgtcagcaaacgaacttgccttactggacaacgcctggcctgcgccaaaggggaaaaccgcgttggatatggtgtga

SEQ ID NO: 373062 - DNA, 1935 bp, Salmonella enterica
atgaatatattcgatcactatcgccagcgttacgaagctgccaaggacgaagagttcacactgcaggattttcttaccatttgtcggcaagatcgcagtgcttatgccaacgcggcagagcggctattaatggctatcggcgagcctaatatggtcgacactgcccaggaaccccgactttcccgactcttctccaaccgggttattgctcgctatcctgcgtttgaagagttttacggcatggaagacgcgattgaacagattgtctcttatctgaaacatgcggcgcaagggctggaagagaagaagcaaattctctatttgctgggacctgtggggggtggcaaatcatcgctcgctgaacggctgaaatcgctaatgcagcgcgtgccaatttatgttttaagcgccaacggcgagcgtagtccggtcaacgatcatccgttatgcctgtttaatccgcaggaagacgcgcagattctggaaaaagagtacggtattccgcgccgctatctcggtacgattatgtccccgtgggcggccaaacgcctgcatgagtttggcggcgatattactaaattccgcgtggtgaaagtctggccctccattctggagcagattgccatcgccaaaacggaacccggcgatgaaaacaaccaggatatttcggcgctggtcggcaaggtggatattcgtaaactcgaacatcacgcccagaacgatccggatgcgtatggttactctggcgcgctgtgccgcgctaaccaggggatcatggagttcgtcgagatgtttaaagcgcctattaaggtgctgcaccccttgctgaccgcaactcaggaaggtaactacaatggcacggaaggtatttccgccctgccctttaatggcatcatacttgcccactcaaacgaatctgaatgggtgactttccgtaacaataaaaataacgaagcgttcctcgaccgtgtctatattgtgaaggtgccttattgcctgcgaatctccgaagagatcaaaatctacgagaaactacttaatcatagcgagctggctcatgcgccctgcgcgccgggcacattggaaacgctttcgcgtttctcgattctttcccgcctgaaagagccggaaaattccagtatttactcgaaaatgcgcgtttatgacggtgaaagcctgaaagataccgaccccaaagctaaatcgtaccaggagtatcgcgactatgcgggtgtggacgaagggatgaacggtctctccacccgattcgcctttaagatcctctcccgcgtattcaacttcgaccatgcggaagtggcggcaaacccggtacatctgttctacgttctggaacaacaaatcgagcgcgagcagttcccgcaggagcaggctgagcgttatctggagttcctgaaaggctacctgatcccgaaatacgccgaatttatcggcaaggagatccagacggcctatctcgaatcttattctgagtacgggcagaacatttttgatcgctacgtgacttatgcggatttctggattcaggatcaggagtatcgcgacccggataccggtcaactgttcgatcgcgagtcgctgaacgccgaactggaaaaaattgaaaaaccagcgggtatcagtaacccgaaagatttccgtaatgagatagtaaactttgtcctgcgcgccagagccaacaatagcggccgtaatccaaactggaccagttacgagaagctgcgcacggtgattgagaaaaaaatgttctccaatactgaagagctgttgccggtcatttcttttaacgccaaaacgtcgactgacgagcagaaaaagcatgacgactttgtcgatcggatgatggaaaaagggtatacccgtaaacaggttcgtttgctgtgcgagtggtacctgcgcgtgcgtaaatcgtcgtga

SEQ ID NO: 373063 - DNA, 216 bp, Salmonella enterica
atgaaaaagttgaaagaaatggctgctatctcgctttttacattattggcggtgggtttttccgcatcggctatggcagacgaccaggcgcctgaaagagttccagcagctaaagttaagcccgttggtgaacatgtacactggtgtactctctttggtccaggtgatatggagttgctgccgttgccagacaggggatggccgtggtgttcttaa

SEQ ID NO: 373064 - DNA, 789 bp, Salmonella enterica
atgacgctgcccataccgccctcgattcaatgccaaacggaagcggcgtgtcgcctgattactcgtgtcacaggcgatacgttgcgtgctattcatttatatggttccgctgtcgcgggcggtctgaagccaaacagcgacattgatctactggtgacaatatgccagccgctgacggaggcccaacgcgcaacgctgatgcatgaattgctggcgctttcatcgccgccgggggcgtcggcagaaaaacgcgctctggaggtcactgtcgtgctttattcgcagctggttccctggtgttttccaccttccagggaaatgcaatttggcgagtggctaagagaggacatttgtcaggggatttatgaaccagcgcagcaggactgggacattgtgttactgataacccaaattctggaaaccagtataccgctaaagggcgaacgcgcggaacggctgttcacgccagcccctgtggcgcagttgctgaaggccttgcgttatcccctcgacctttggcaatccacggcagatgtgcagggagatgagtatcatatcgttttaaccctggcgcgtatctggtacaccctttctaccgggagatttacctctaaggatgcggcggctgactggctgttacctcagttgccagaagattatgctgctacgttgcgtgcggcgcagcgtgaatatttaggtctggagcagcaggactggcatattttgctgcctgcggtcgtacgctttgtggattttgccaaagcgcacatccccacgcagttcacataa

SEQ ID NO: 373065 - DNA, 531 bp, Salmonella enterica
atggcacatttctcaagactgcaaataacgcttcactggttaacactgctcctgacaggcatcgcatatgctgctattgagttacgggggtgggcgccaaaaggctccagcgtttacctgtttatgaaagacacgcactatgatatgggcgttctggtctgggcgctgatgtttttacggttatatcttaaacacaaatacccggatccggtcattacgcctcctcctcctcactggcagcacgtagccgctaaattaatgcatatcgcgctttatctcacttttctcgccttaccgctgctgggcgtcgcgatgatggcatcaggcgggaaaagctggagcttttttggttttactgtaccggtatttttgacgccagatagcgccctaaaatcggatataaagcgtattcatgaaatgctggccaatatcggctatttcctgattgctatgcatgcagcagcggcgttgtttcaccattacatacaaaaagacgatacattttcaaggatgttacccggtaaatcatga

SEQ ID NO: 373066 - DNA, 534 bp, Salmonella enterica
gtgaaaggtctggtagagattggctttgatggctacgctgtcggcggtttggctgtcggtgagccgaaagcagatatgcaccgcattctggagcacgtttgcccgcagatcccggctgacaaaccgcgttacctgatgggcgtgggcaaaccggaagatctggtggaaggggtgcgtcgcggtattgatatgtttgactgtgtcatgccaacgcgaaatgcccgtaacggtcatctgtttgtgaccgacggcgtggtgaagattcgtaatgcaaagcataaaagcgacaccagcccgcttgacgccgagtgcgattgctacacctgtcgcaattattcacgcgcttacttgcatcatctcgaccgttgcaacgaaatattaggtgcgcgtctcaataccattcataacttgcgttactaccagcgtttgatggcgggtttacgcaaggctattgaagagggtaaattagagagcttcgtaaccgagttttaccaacgtcaggggcgacccgttccacctttgaacgttgattaa

SEQ ID NO: 373067 - DNA, 1818 bp, Salmonella enterica
atgttgaatgcctggcacttaccggttgccccatttgtgaagcaacataaagataaattaaccattacgctgtggctgagcggagaaaatccgccgtctcgcgtgacgttgcgctcagaattcgataatgaagaaatctcactggcgatgcgcaaacagcgccgccagccgcagccgggcgtgacggcgtggcgagcgacgctcaatatcgcgttagggcaaccccgtcgccgttacagctttaaattgctttggcacgaccgccagctttggtttacgccgcagggacttaaccgcttcccaccggcgcgtctggaacaatttgccgttgatgttccggatagcggcccgcagtgggtcgccgatcaaattttttatcagatcttcccggatcgttttgcccgcagccagtctcgtgaagctgggcaggataaggtgtattaccaccatgctgccggtcacgacatcgtgcgtaaagagtgggatgaaccgctcaccccccaggcgggcggttccaccttttacggcggctgtctgaatggcatttgtgagaagctgccgtatctgaaaaaactgggcgtcacagcgctatatctgaatccggtatttaccgcgccgagcgtccataagtacgatacggaagattatcgccatgtcgatccgcaatttggcggcgatcgggcgctgctacgcctgcggcgtgaaacccaggcgcagggcatgaggctggtgctggatggcgtgtttaatcatagtggcgactcgcatgcgtggtttgacaggcataaccgcagcactggcggcgcgtgccatcacccggactcgccgtggcgcgactggtactccttttcaccacaaggcgtggcgctggactggctgggttatccgagcctgccgaaactcgattatcaatcagaaacgctggtcgatgagatctatcgcggtgaggacagtatcgttcgtcactggctaaaggcaccgtggaatatggacggctggcggctggatgtcgtacatatgctgggcgaggcgggcggggcgcgtcataatttgcagcacgtcgccggtattacccgggcggcaaaagaggcgcagcccgaagcctatattgtgggggaacatttcggcgatgcgcggcagtggctacaggccgatgcggaagatgccgccatgaattatcgcggcttcaccttcccgctatggggatttctcgccaatactgatatcgcttacgaaccacagcatattgatgcccggacctgtatcgcgtggatggataactaccgcgccgggctgtcacatcagcaacaactgcgcatgtttaatcaactcgacagccatgatactgcgcgctttaaaactctgctgggtaaagacgcggcgcgcctgccgctggcggtggtctggctgtttacctggcccggcgtgccatgtatttattacggcgatgaagtcggcgtggacggcgcaaatgaccccatgtgccgcaaaccgttcccatgggatgaacgcaagcaggacggcaacttgctggcgctgtaccagcgtatggcgaaactgcgccagagcagtctggcgctgcgtcgtggcggatgccaggcgctgtatgccgaaggtgacgtagtggtattcgtgcgagtttatcagcagcagcgggcgctggtggcgattaaccggggcgaggcctgtgaagtggcgctggaagcgttgccgttgctgaacgtggccggatggcaatgtaaaacgggaagcggtgacatccgtgagggaagacttagtttacccgcgatttccgcgacggtatggatgaatcgttga

SEQ ID NO: 373068 - DNA, 1035 bp, Salmonella enterica
  misc_feature (960)..(969): n is a, c, g, or t
atgaaaaaagttattttttctttggcgctgggtacgttcggactggggatggccgagtttggcattatgggcgtgctgacggagctggcactcgatgtcgggataacgattcccgccgccgggcatatgatctcgttttacgccttcggcgtcgtgctgggcgctcctgtaatggcgctcttttccagccgcttttcgcttaaacatatactgctgtttctggtcatactgtgcgtgatgggcaatgccatatttaccttttcctcgtcatatctgatgctcgccgtcggcagactggtttccggctttccgcacggcgccttttttggcgtcggcgccattgtcctgtcaaagattatccgccccgggaaagtcaccgccgccgtcgcgggtatggtttcagggatgacggtggcgaatctggtgggcattccgttcggcacttacctgagccaggaatttagctggcgctacacctttttattgatcgcggttttcaacatcgccgtgctcaccgcaattttcttctgggtgccggatatccgtgacaaagcccaaggcagcctgcgcgaacagtttcacttcttgcgtagccccgcgccgtggctcattttcgccgccacgatgttcggcaatgcgggcgtttttgcctggttcagctatatcaagccatttatgatgtacatctccggtttttcggagacgagcatgacgtttattatgatgctggtcgggctggggatggtgttaggcaatctgttaagcggcaaactctccggcagatatactccgctgcgcatcgcggtagtgactgacctcgttatcgtgctctctctcatggcgctctttttcttcagcggatacaaaacggcatcgctgactttcgcgtttatctgctgcgctggtctgtttgcgctctctgcgccgctgcaaatactgctgctgcaaaacgccaaaggnnnnnnnnnngtataccagcaacgacgacatggcggaaaacgagagcagggcggcgggagggcaaatcgcctttaa

SEQ ID NO: 373069 - DNA, 801 bp, Salmonella enterica
atgttggcttccacaccaccgacttcaactggggtatttaaccgggcgcttagctcgctggcgatagcctgcatctgtaagcggtacgtctggcatcagcgtcgtcatcagataaaccggcgtcagcggttccaccttgtctgtgataacgtcttccgggaagcattcagtgacgcaaaacaacgctatggtgcgccacgcctgacggatgagcttcgtgctcagggttaccagttcaacgtgaaaaccgtggcggccagcctgcgtcggcaggggctgcgggcgaaagcctcgcgccggttccgtccggtcagttaccgcaaacatggtctgccagtctcagagaatctgctgaagcaggacttttacgccagcggcccgaatcagaagtgggtgggtgacatcacgtatcttcgcactggtgaaggctggctttatctggccgtggttatcgatctgtggtcgcggtcagtcattggctggtcgatgtcttcgcggatgacagcacagcttgcctgcgatgcgttacagatggcgctgtggcggcgtaaatgtccggaaaatgtcatcgtgcatacagacagaggcggtcagtactgttcaacggattatcagagcttactgaaacgccataatctgcggggaagtatgagcgccagaggttgttgttacgacaatgcctgtgcggaaagcttcttccatacgctgaaggtggaatgtatccacggagaggactttgtcagccgggaaataatgcggacagcagtgtttaattatattgagtgtgattacaatcggtag

SEQ ID NO: 373070 - DNA, 954 bp, Salmonella enterica
atgaaattttcttcgcgaattaattctttccgctcaagacctgaattatttaatgcagataataagatggatacatgtgatcttattacaagaatgggcaatgtagatggattgacgcatatagagctaaactatcctgagcattttattggacaggataaaaaaatcattaaacaatgtattacagataacggattgaaagttagcggcattgcactacgttacaataaagattttattgatggtgaatttactaacccagattcggttcttcgcgataaagcgattgagacaacgttggaagctgctgaagtttgtaagttcctggggggcactactgtaacattatggtttggctatgacggttatgattacccatttcaacaagactattttcgagcgtatgaattgctggtaaatgccttacgtaaggtgacaagtgctcatccagatcttcagtttagttttgaatacaagccttatgaaccacggaccttttcttatattagtgatgtttcctcaaccctaatgttaattgatgatgtcggtaacgataacttggggattacacttgatttctgccatatgataatgaaaaaggaaaacccagcattttcattattccagtcagcacgtaaaaatagacttgtaggcttccatttaaatgatggatatggtcatttcgatgatggtttaatgttaggttcagtccatctgttacagactcttgaatatatttactatgctaaacgcgttaatttcaatggattgatttattttgatactttccctagccgcgaggatccagttgcagaatgtgcgctgaatattcgaatgtataaagcactttcagactttatagatcaactcagtattcctgagatagaagcgatgatcaaaagccaggatgcactaaaagtacagggtatgttgttaagcatgatagccaaataa

SEQ ID NO: 373071 - DNA, 1236 bp, Salmonella enterica
atgtttgaaaaattaggtctgccaaaaaatctattatggggctacattggcctgacaatatttatgataggcgatggcgttgaacaagcatggatttcgatttggcttgttgaaaagggtttgtctgttgcccaggcatcttatttaataacggcttatggtattactgttactctggccgcatgggttacgggcgtactggttcaaacgttaggacctcgtaaagtgatgttctgtgggcttgttgcctttataataggtagtatcggttttatcggcattggcctgaagaatatggatttggtctggatgctgcccttctatgctattcgtgggatcgggtatcctctgttcgcttattcatttctgatttggattaattacagcacgcctgtcgcgcgtcgatccaccgcagttggctggttctggtttactttctcattaggacttagcgttattggccctttcttctcctcaatagcattacctgtactaggtgaaattcatgttctgtgggttgggttactgtttgttcttattggttcaatattgggtatttgggtcaaccgtgatgttgtgccggcatccgagattcacccttttagtgcaggcgaattattaaaaggtatcaccatcttacaacgtccgattattgcgatagggcttgtagttaaatcagtcaatggtattgcccaatacggactggcaacatttttacctttataccttattagttatggctatagtaaaacagagtggctacatatgtggtcatctgtttttctggtagctatttttgcgaatctcttttttggtttttttggtgataaattcggctggcgaaaaacaatcatgtgggttgggggatttggctatgccgtggtcctcttacttgtatgggctgtgccgcaactactgggacataatttttacgtgatggcattcgtgctctgcctatgtggtgtgacgatggcaggctacgtgcctctttcggccttgtttcccatgctggcccctgatagtaaaggcgcggcaatgtcggttcttaatctgggcgctgggcttggcgcctttattgcccccgcaattaccgctttattctattcttctcttggggctggcggtgtgctgggtatttatgcgggtctgtatgtgctcagcggtgtacttactccgttccttaagactccggaagagttgcggcaacaggttgcgttgcaaaatgagagagcttaa

SEQ ID NO: 373072 - DNA, 879 bp, Salmonella enterica
atgtttcgacacgtaaaacaacttcaatatactgtgcgagtgagcgaacctaatcctggattagcgaacctgctgctggaacagtttggcggcccgcagggcgaactggcggccgcctgccgctacttcacgcaaggtttaagcgatgatgatgccggtcgtagagagatgttaatggacatcgccaccgaggagctgagtcatctggaaattatcggctcactggtaggaatgcttaataaaggcgctaaaggcgagctggcggaaggcaccgaaagcgaagcggaactttatcgctcgctgacgcagaatggtaatgacagccatatcacctctctgctgtatggcggcggcccggcgttgacgaactccggcggcgtaccgtggaccgcggcttatattgatactatcggcgaagtcacagccgatctacgctcaaacatcgcggcagaggcgcgagcgaagatcatttatgaacgcctgattaatctgaccgacgatcccggcgtaaaagacacgctcagtttcttaatgacccgtgaagtcgcgcaccagctctcttttgaaaaggcgctgtattcgattcgtaacaacttcccgccgggtaaattaccgccggtagaacagtataccgacgtgtactacaacatgtcgcaaggcgacgatccgcgaggtagctggaatagcgatgagaacttcaactatgtcgcagaaccgatgcctgctgttgatggcggcgatggcctggcgacagtgaaattgccgcgcgagcagatggcgctgctcaaagcgatggcagaaagaacgaaatcggatcccaccgttgatcctctcactggcgcagaactaggctgcggcgaaccgaaagaagacaagtga

SEQ ID NO: 373073 - DNA, 507 bp, Salmonella enterica
atgaattatactgaacattatcatgactggcttcgtgacgcccatgccatggaaaaacaggcagaatcgatgcttgaatctatggccagccgtattgaaaattatcctgatataaaagccagaattgaacaacatattagtgaaaccaaacatcaaattaccatgctcgaagaagtgttggaccgtaatggcatttcccgttcggtgttgaaagactccatgagtaaaatggcagcaatggggcaatctatcggtggcatgttcccttccgatgaaattgtcaaaggttcaattagcggttatgttttcgagcagttcgaaattgcttgttatacctccctgctggcggcggcaaaaaaagctggcgacactgcctcaattccgacgattgaagccattctgaaagaagaaatgcaaatggctgactggctgatcaaacatattccgcagacaacggaacaatttttactgcgatctgaagcagatggcgttgaagccaaaaaataa

SEQ ID NO: 373074 - DNA, 789 bp, Salmonella enterica
gtgcaggagatgcatattcgacatcaggatcttacgacggcagaggtgcgttccagtcatctgcaccgtttgcatcgtgttacgcttttttccgccgctatctgccatattacgcagggcagtaaagtcatcattcaggatgatagccgccttgtcgccgggccgggcgagttgattattattccggtgaacacgccgctggagattattaatcagcctgcgcagaacggttttcgctccgacctgttgttactttcaccggagattattgctcgttttaaaacgatgtatgttcaggattatccaccggcaaatatgacatcgctgtgtaccccgatgagccgtagcctgacatttatgtgggagaacgtgttggatgctgtgcgccagggcttacctgccgggctacaggaacatcaggcgatggggttactgttagcgcttttgcatgatggcgcggcgggaccgctgcttattgaacggcgttacaccctcacggagcaggtgcggcaactgattatgctctcacctgctaagctatggacagcccaggagatagcccgccgtcttgctatgggaacatcgacgctgcgtcggcgtttgcagcgcgaatcgcagagttatcggcaaattattgaagaggtacgcatgtcctgcgcgctttctcaactgcaatcgacgacgctgccgatcggcgaaatagcgctacggtgcggctacctgtcggggtcgcgatttacggccagattccgccaacattatgggtgtctgcctagtcaggtacgttaa

SEQ ID NO: 373075 - DNA, 1233 bp, Salmonella enterica
atgtcattgccgtacctttctctttcccaggcccggtgtcttcaccttgctgcgcaggggctattgaaaaagccgcgccgtaacgcgatgtctggcgatgttcttgccgccatctcacgcatggcgttgctgcaaattgataccatcaatgttgtcgcacgtagcccctatctggtgctgtttagccgtctcggttcgtacccgcaggcctggctggatgaggcgctgcgacgcggtgagttaatggaatactgggcgcatgaggcctgtttcttaccacgccgcgactttaaacttatccgccatcgtatgctgtcgccggaaaaaatgggctggaaatatcgcgcggcatggatgcatgagcacgcggaagaaatagaacagctagtgcggcatattcaggagcacggtccggtgcgttctgccgattttgaacatgcgcagaaaggcgtcagcggctggtgggaatggaaaccacataaacgccaccttgagggtttatttaccgccggaaaagtcatggttgttgagcggcgtaattttcaacgcgtatatgatttaacgccccgtgtgatgccgcactgggatgatgaacgcgatggactgtcacagccgcaggcggaaagcctgatgctggataatagcgcgcgcagtctggggattttccgtgaacagtggctggcggattactaccgcctgaaacgtcctgacctgaagggatggcgggagagccgggcggaacagcagcagattattccggtcgaggtggaaacgttggggcggatgtggcttcatgccgatcttctttcgcagctggaaccggcgctgaataacgccttaaaggcgacccatagcgcagtgctgtcgcctttcgatcctgtggtatgggatcgcaagcgggcagcgcagctcttcggatttaactatcggctggaatgttatacgcccgcggcgaagcgccagtacggttattttgtgctgccgctattataccagggccgtttagtcgggcgaatggatgccaaaatgcaccgtaaaacgggggtgcttgaggttatctcgctgtatctggaggacgatattcgccctggcgttagtctgcaaaaaggaatctggcaggccattagcgcgtttgctgcctggcaacgggcatcgcgcgtgacgctgggacaatgtccgccaggcctgtttagcgccatgcgtcatggctgggaaatagaccctgcaccataa

SEQ ID NO: 373076 - DNA, 759 bp, Salmonella enterica
atgctggatgtcggtcaggggctggcgatagcgatcgtcaggggcgataaagtaatactctacgataccggtcgggcatggccggagggcgacagcgggcaacaggttattattccctggttgcgctggcataatctgacgccggagggcgttattttgagtcatgagcatctggatcatcggggcgggctgcgttcgctacagcaggtctggccgtcaatgtggattcgcagcccgttaggctggcagggacatttgccctgttttcgcggcgagcagtggcaatggcaggggctaacgtttcaggcgcactggccgttacgcgaaagtgccgatcgaggaaataaccgttcttgtgtggtcaaagtggatgacggtgtacatagcatcctgctcacgggcgatatcgaagcgggcgctgaacaaaaaatgctaagtcgttactggcgacatcttgcggcgacgtttatccaggtgccgcatcatggtagtaatacgtcgtcgtcgctaccatttattcagcgcgtacatggtgaagcggcgctggcgtccgcatcgcgctataacgcatggcggctgccgtcccgcaaggtaaaacagcgctaccgacagcaggcgtatcagtggtttgatacaccccaccaggggcaaatttcgctgctgttttctccgcagggctggcgcatacaaggcttacgggatcaaattttacctcgctggtatcatcagtggtttggcgtgtccgaggataacgggtag

SEQ ID NO: 373077 - DNA, 861 bp, Salmonella enterica; identical to SEQ ID NO: 370586

SEQ ID NO: 373078 - DNA, 2277 bp, Salmonella enterica
atgctcaatcaagaactggaactcagtttaaacatggctttcgccagagcgcgcgagcaccgtcatgagtttatgaccgtcgagcatctgttgctggcgctgctcagcaacccatcggctcgcgaagcgctggaagcatgctccgtggatctggtggcgctccgtcaggaactcgaagccttcattgaacaaaccacacccgtactgcctgccagtgaagaagagcgtgatacgcagccgacgttaagtttccagcgtgtcctgcaacgtgccgtcttccacgttcagtcttccgggcgtagtgaagtgactggcgcgaatgtgctggtggctatctttagcgaacaggaatcacaggcggcttatctgctgcgtaagcatgaagtgagccgtctggatatcgtgaactttatttctcacgggacgcgaaaagacgaaccgagccaatcttccgatctcggcaatcagccaactggcgacgaacaagctggcggggaggaacgtatggaaaacttcacgacgaatcttaaccaacttgctcgcgtgggcggcatcgatccgctgattggtcgtgaaaaagaactggaacgcgcgatccaggtcttgtgtcgtcgccgtaaaaataacccgttgctggtaggggaatccggtgttggcaaaacggcgattgccgaagggctggcctggcgtatcgtgcagggcgatgtgccggaagtgatggccgattgcaccatttactctctggatatcggttcgctgctggcgggcaccaaataccgtggcgattttgaaaaacggtttaaggcgttgctgaaacagcttgagcaggataccaacagcatcctgtttatcgatgaaatccataccattatcggcgctggcgcggcgtcgggcggacaggtggatgcggcaaatctgattaaaccgctgctttccagcggcaagatccgggtgatcggctcaacgacctatcaggaattcagcaatatttttgagaaagaccgcgcattagcacgccgtttccagaaaattgatattaccgagccttcggtggaagagacggtgcaaattatcaacggcttgaaacctaagtacgaagcgcaccacgacgtgcgttataccgcgaaagcggtgcgtgcggcggtcgagctggcggtaaaatatatcaatgaccgccatctgccggataaagccattgacgtgattgacgaagcgggcgctcgggcgcgtctgatgccggtgagcaaacgtaagaaaacggtcaacgtggcggatattgagtccgtagtggcgcgaattgcgcgaattcctgaaaagagcgtctcgcaaagcgatcgcgatacgctgaagaacctgggcgatcgtctgaaaatgctggtcttcggccaggataacgcgattgaggcgctgaccgaagctattaagatgagtcgtgcgggtctgggccatgagcataaacctgtcggctcattcttgttcgccgggccaactggcgtagggaaaactgaagttacggtacagctttcaaaagcgctgggtattgagctgttgcgcttcgatatgtctgaatatatggagcgtcatacggtgagccgtttgatcggcgcacctccgggatatgtcggtttcgaccagggcgggctgctgacggatgcggtgattaagcatcctcatgcggtgctgttgctggatgagatcgaaaaagcgcacccggatgtctttaacctgctgctgcaggtgatggataacggtacgctgaccgataacaacggccgtaaggcggatttccgcaacgtggtgctggtgatgaccaccaacgccggcgtgcgagaaaccgaacgtaaatctattggtcttattcatcaggacaacagtaccgatgcgatgggcgagatcaagaaagtgtttacgccggagttccgtaaccgtctcgacaacattatttggttcgatcatctgtctggcgaggtgattcatcaggttgtcgataagtttatcgtcgagttgcaggctcagttggatcagaaaggcgtctccctggaagtcagtcaggaagcgcgcgactggctggcggaaaagggctatgaccgggcgatgggcgcacgaccaatggcacgtgtgattcaggataacctgaaaaaaccgctggccaatgagttgctgtttggatcgctggttgacggcggacaggtcaccgtcgcgctggataaagagaaaaatgcgttgacgtatggcttccagagtgcgcaaaagcacaagccggaagccgcgcattaa

SEQ ID NO: 373079 - DNA, 1119 bp, Salmonella enterica
atgcgtgctaagggaaagaaatttaaaaagcgttatctggtcattattttaattcttttagtgggggggatggctggctggcgaatgataaatgccccgctgccaacttatcagacattaatcgtgcggccaggcgatcttgaacagagtgtactggcgactggaaaactggacgcgttgcgtaaagtggatgtcggcgcgcaggtgagcggccagttgaaaacgctgctggtctccattggcgataacgttaaaaaagatcagctactcggcgtgattgacccagatcaggcggagaaccagataaaagaggtcgaggccaccctgatggagctgaacgcggagcgtcagcaggcagccgctgagttaaagctggcgcgggttacgctggcgcgccagcagcagttagctaagactcaggcggtatcgcaacaggatctggatactgcggcgacggagttggcggttaaacaggcgcgtattggcaccatagatgcccagatcaaacgtaatcgggcctcgttggacaccgcgaaaaccaacctggaatatacccgtattgttgcccccatggcgggggaagtgacgcaaatcactaccctgcaaggacaaacggtgattgcagctcagcaggcgcccaatattctgacgctggcggatatgagcaccatgctggtaaaagcgcaggtctcggaagcggacgtgatccatcttcgggcggggcagaaagcatggttcaccattgcaggcgatccgcaaacgcgctatgaaggcgttttaaaagatattctgccgacgccggaaaagatcaacgacgctattttttattacgcccggtttgaagtgccgaatcccaaaagaatcttgcgtcttgatatgaccgcacaggtttatattcaactcatggatgtcaaaaatgtgttgattattcctctcgccgcgcttggcgaaccggtgggcggcaatcgttataaagtggcgctgttgcgtaacggcgaaaaacgtgagcgcgaagtggtcattggcgagcgtaacgatacagacgtggaagtggttaaaggtctggaagcgggcgatgaggtgatcatcggcgaaagcaggccaggagcgacgccatga

SEQ ID NO: 373080 - DNA, 2124 bp, Salmonella enterica
atgtctggaacagatgctgaattaggcttttctgtagatacatcacaaataaccgccgcttctggtagtttagatgatttagctaaatcagctaaaggtgctactgatgccgcaagtaaactagcagaccaaatgagtaagcctattaatatgcacgctggaggttattattctggcctgctctctaaaacaaaagaccagttagctagagcggaggctgaaattgcagaaagcgctaaaaaaactggaggtaactggttcactaattttattagtggaattaaagaaaaccacggcgcattaagagagcttggcgtaatgtctcatgaggctatgtcgggacgatgggctaatttgcgtggttctgcgagtatatttatgggcgctgccggattgggcggtcttgctggcactggaatcattatgggtgtaaccggattaattgaagggattgaagaattaacagaatcaatgcaggaagccgcgcaagcacaaagggatttacaacaatcatcaatattatccggtaatgctaatgcattattttcagggaaagttgatgatattgttaacggtctacaaactattaaatatgcttcaagggaagctaaagaagagtttatttccaatgcgcttaatgctgggctaacacctgattttttgaaaaagaatggttctcttcttcttcaatatcaacaggaattcggtgataagcaaactgaagcgatggagaaaatacttgcagaaacacaaactgatgcaaccaaaggatatgccgcactatataaaatgggtgacggtcttcttgataaggtaaataaagatattgaatctggaaattataaaaccgctggttctgatattatggctgggttattgcaggggatgcaaaatgaagtaaccgaatcacaggggaaacagggtgagctaaaacaatcaacatggtgggatgatgctttatcttatatgggtatgggtgctatgggctattcatctgctggggttcaggttcaacagaatatattaaatgggatgagacaacgaaaagattttattattaaaaaaactgatgaataccataaggatgttgctaattcaataaattcatcgaaatcaaaagatttaagcgatacaaaagaataccatgattttaacgctttctatcatacatcctttagtcatcacggtttaactgctgctcaaagggccgcaaataaagccgccgcagatgccgcaagatacgcccaacaattaagtgattacagtactagagttaatgagcaatttaaatcaatggatttatccataaataaaagatgggcaaataaaaatcagccgtttagtgatttatcttctgatgcttatgattttgagcagacgcaagaacaaataaacgagcaatttgataaaatgattgataatgtcaaaatactggcagaacatcagcataaatccatttcgtctcctgaatttgtaaaacaaattgctgatataaataaaatgcgtggagaagcattagaggataatttaaaaggatataatgaatatgaggataatctacattctgtattagctggcgttaaaaaaggaatgaaaagttatcaggaaacatctgataaagttgctttgcaagttgcgcaagtatgggataaatccttagattatatgactgattcattaactgacttttttacaactggggaaactggatggaaaaattatttaaaagatattttgactatgattgaaaaagttatggtgcgtgatgttattgtcgcaccatttagtaaatggatggggggaatgcttggcgttagtagttcaggcggagtttcagccactgaatcagcaatggattataattcactcccagtaccaagcgttccaaatctaagcgccacgaaaacatcaggtgtcggttcttcttctgtttccggcattcaggtttacgtgtataatcagggagggaatactaatggtaatgtacaatcaagtacaaaacagggtcaggatttaggtaaagcccttcaacgcgccgcgcaaaactggattaaacagcaaaacgttcaatcaaacaggcaaggcggcacaaataaagcaatgaatagctggagtgtaaaataa

SEQ ID NO: 373081 - DNA, 789 bp, Salmonella enterica
ttggggggtatttattcggggggagagggcgatgagtgggggattaagccagacattcaggaagcacaaaaatggtatggtcaggcggctgagcagggggacagcgatgcacagattgcgttaggtaaaatctattattctggcgcaacagggcgcactgattacgctaaagcgctggcattatttacgcaggttgaaaatgatggtactaattcgcgctcaacgatgccgttgagttggatgtattataacggtttaggtactgcacctgattgtgataaagcctggtcgtattacaagaaagcatctcgatatgtaggtaagaaggttgaggaaaaaatatttttaagtaaatgcgcagcggatattcagagtcgaaaaaacaacgcggatgctttacccaaagtaaccctaaaaaaagagagtattttctctcgcgggataacggctaaaccgaaagaatgcgcactaatttttcagattggcacagataaaatccgtaacatggcgaatttgcatattacgcttgagctgaaaaatgatgatggaatggcaactgaggaaacgttaatgattccgccattcggtttgaatacactggggatagatatgcaaaatcatgatgttgatcctctcgttaccccatacgatctcccgctgtatacgcaagatttttgtcacgggatcggcgatatccattttacgctgaaatccgctacggcaacgattaacggtaagaatgtcgatttactgaaagctgacagtgtgcgctttttagataaagaataa

SEQ ID NO: 373082 - DNA, 1497 bp, Salmonella enterica
atggcgataataaagtcgataaaattttggctggcagaaatcgtgctgctggtcgtggtgttgccgatattagcaataatactcagtatctttaacattatttttaatattgctggcgatatctatgggcttatcgccacgctgatggccaccattcttgtgggttgtgcgactggtggtattcgcggtcgctttatcgatgaacgagagcgttttattcctggttttttacctgccttattactgattttctattctcttaccgtttggctgataatgattatcgtcgctgacggcgacttcgaaagtcgcgtgttttatcacgggatacagtggttcggactctattctgccttgatcaaatcggctttaatgacggaattttatgagatatcatcgtcaagggtgatcattgccccggtgattccatttgtcggcttcctgtcgtataccatcatgcgttttatcaccgtccggcagaataataagttggaaaacgtcaccggatggcgaagtattgttctgctcattgccgcaatgacaattgccattagcggattattggcctggcaaagttatgatcgtcgcgagcgacgagtggttaacgatccggccagggaaataacggaatcttttgagcctggcgcatatgacccgtttacccccgataataaactgacggcgctgaacgcatcacctgggctattgctggaaaacgactggccgcgactgaatggcgcaacggcagtttatccggtgtacgcctcggcagcgcaggcgctgtatcacaatctggatgtagacagcgtgtggaaatatgttcgctgcgatcggacacctggtgcctgggagaagttaattcatggtgaagcggatatcatttttgtcgctgagccttccgccgagcaaaaagccagcgcgagggcgcagggcgttgatttacacttctatcccattgcccgcgaggcttttgtttttgtcacgcataaggataatccgctgactcaactgagtgaaaaacagattcgcgatatctattccgggcatgtgaacaactggctggaagtcggcggcaacgatgcgcgtatttacccctatcagcggccaaagggatcgggtagccagacgattatgctggctgcggtgatgggcgaggataaacttcgcaagccgctggaaacagaatccgttcacgatatgatcggattgctgcgtaatgtggcaaattaccagaacagcgccaatgctctggggtataccttccgctattatgctacgcagcttcaccatagccctgatttgcgcttgctggcggtgaatggcatcgagccaaccatcgaaaatattcgcaatggaaaatatccttacactattgatgtatatatggtttccgctggaaaaccctcgcggcaatcgcaaaaatttatcgattggtttttgagcgagcaagggcaaaggttgattgctgacgttggatacgttcctctggcgcgctaa

SEQ ID NO: 373083 - DNA, 597 bp, Salmonella enterica
atgaaaaaacattattctgtccaatatgaaaccggggatatcgtctttacctgtataggtgccgcgcttttcggccagatatccaccgcttcacagtgctggagcaaccatgttgggattattattggtcataatggtgatgactatctggtggcggaaagtcgcgtccccctctcaaccgtcaccacgctgtcactgtttatacaacgttcagccggacaacgttacgcggttcgtcgcctgtgcggcggcctgacggtcgaacagaaactcgccatcatggaacaggttcccgcccggctgaataagttttatcacacggggtttaaatatgagtcatcgcgccagttctgctcgaaatttgtgtttgatatctataaagaagcattgtgtattccggtaggcgatattgagacattcgaagaattacttcacagcaatcctgatgcaaaactcaccttctggaagttctggtttttaggttcaatcccgtgggatcgtaagacggtgacgccagccagcctgtggcatcatcccaacctggatgtaatctatcagagtcactctcaggggcatcttcccggagaagcggcataa

SEQ ID NO: 373084 - DNA, 255 bp, Salmonella enterica
atgcacaagcgcaagccgctaaatctgctgccactgctgctggcctgtctgccactgttagccagctgcgtaccgaagcaaaaaaacttgccacccgcctggacgccgcaaagcacaccgcaaatcttgccgctgccgtcagaagcaaaacaaccaacgccgacgccagaatgcttgccaacatgctcggagatattgcagaagaagctaaacattatgctggaatcgctgacgagcgctaccgggcaggaatga

SEQ ID NO: 373085 - DNA, 369 bp, Salmonella enterica
atgaaaatcgcgctgccactttcgctcaaccttccttccatgggtttacgcctcagtacggtgattgagcgttgccgcctggtaagccgtagcgaataccttatcagcgctggcatacgcaaaaacagcccgaacgggagtattcatcctaatagcctgactaaaaaatttgttgcggcacgaaaattgaccggaataaatttcagtgaaaacccaccgccgtttcacgagatccgcagcttatccggacgactgtataaagacgcttacggcgaagggtttgctcagaaactcctgggacatacttcagagaacaccacgaaactctatctcgatgaacgcgataataaagcttacgtgatgctctga

SEQ ID NO: 373086 - DNA, 231 bp, Salmonella enterica
atggctatacatgacgccgggatgttcaccgtgaaaaaaaccaaccgcctcaaaatcctgcaggatgtcatcgaccgcaatttacgtcccggtcaggctgctgagatgctcagcattacgccacgccattgcagccggctgctgaaacgttatcgccaactcggaccacttggcatgaacaaccatagtcgtggccgcgttggtaaccgtctgttgccaacttcactttaa

SEQ ID NO: 373087 - DNA, 249 bp, Salmonella enterica
atggcatttcaaattttaacgactactgcagcaagcattacagaactgaaacgtgatccaatgggaactttcaatgccggagatggcgctccagttgccattcttaaccgcaatgaaccggctttctactgtgtgcctccggcactttatgctcatcttatggatattcttgaggatgaagaactcggtcgtattatcgatgagcgtgcgaatgaacgcgtcattgaggtcaacattgatgacttataa

SEQ ID NO: 373088 - DNA, 2043 bp, Salmonella enterica
atgtcgacgaatcctttgttagaccagagtatgttgccttatcaggcaccgcgttttgatcggatcaaagattgccactatcgtcctgcttttgatgagggcgtgcggcaaaaacgcgtggaaatcgaggccatcgtcaatcatccggcggcccctgactttacgaatacgcttctggcgctggagcaaagcggggcgcttctgtcacgcgtcaccagcgtttttttcgcgatgacggccgcacacactaacgatgaactccagcggttggatgaggccttttctgccgagctggcggcgctctccaacgatatttatctgaatagcgcgttattcgctcgcgtggatgccgtctggcaacagcgtcactcactggggctggatgatgagtcgctacggttggtcgatgttatccatcagcgttttgtgttggcaggcgcgcagcttgccgaagaggataaagcgcgactgaaagtattgaataccgaatcagcgaccttaatgagtcagtttaatcagcgtctgctggcggcaagtaaagcgggcgggctggcggtagatgacgcgcattgcctggcaggattaagcccggaagaaatgaccgtcgctgctgaagcggcgcgtgaaaaaggcctggaggagcgttggttcattccgctccttaatacgacgcaacagcctgcgcttgctacgctgcgcgatcgccagacccgcgaaaatttattcgcagcgtcatggactcgggcggaaaaaggagatgcccacgatacccgcgctatcgttcagcgtttggtagagattcgtcgctgtcaggcaaaactgctgggtttccccaattatgccgcatggaaaatggccgatcagatggcgaaaacgccgcaagccgcactgagctttatgcgtggcattgtgccgccagcacgtcagcgtgtactcaatgaacaggcggaaattcagaacgtcattgatggtgagcagggcggctacaccgttcaggcctgggactggatgttctatgccgaacaggtacggcgggaaaaatatgcgttagatgaagcgcaactgaagccctattttgccttaaatacggtgttgcaagagggggttttctggaccgccaaccagctattcggcatcaccttcgtcgagcgttttgacattccggtgtatcaccctgatgttcgggtgtgggagattttcgactccgatggtgtcggcatggcgttattttatggcgacttcttcacgcgggactcgaaaagcggcggcgcgtggatggggaattttgtcgagcaatccacactcaatgaaacccggcccgttatatacaatgtatgtaactatcagaaaccggttgatgggcagcctgcattactgctttgggacgacgttattacgctcttccatgagtttggtcatacgttacatggtttgtttgccgtccagcgctatgccacgctttcaggtaccaatacgccccgcgactttgtcgagtttccctcccagattaatgagcattgggcgagccatccacgtgtgttcgaacgctacgcgcgtcatgtcgacagcggtgaaaaaatgcctgctgatttacaggaaagaatgcgcaaggcgagtttatttaataaaggttacgatatgactgaattgctcggcgccgcattgctggatatgcgctggcatatgctggagaagagcgtagcagagcagtctgtcgctgagttcgagcagcaggcgctggccgccgagcatcttgatttaccggcggtgccgccccgctatcgcagcagttattttgcccatatcttcggcggcggctacgcagcgggatactacgcctacctgtggacgcaaatgttagcggatgacggttatcaatggtttgtagagcagggcggcctgacgcgtgaaaacgggcagcgttttcgtgatgctatcctttcccgggggaatagtactgatttagaaacgctttattcagcctggcgtggacatgaaccgcatattgaccccatgttgcaatatcgtgggctcgatcgctaa

SEQ ID NO: 373089 - DNA, 864 bp, Salmonella enterica
  misc_feature (814)..(823): n is a, c, g, or t
atgcaaaacaggcttttatcggcaaaggcgacgcttcctgattacgatcgcgcggcgctggcggcgcggatggtccatctcggttttggcgcgtttcatcgcgcgcatcagggggtttatacagatattctggctgcggagcagcatagcgactggggctattatgaggttaatcttattggcggcgaacagcagattgccgatctaaagcagcaggataacctctataccgtggcggagatgtcggcggaagcctggacggcgcgtgtggtgggcgtcgtcaaagcggcgttgcatgttcaggttgatggtctggaacgtgtgctggcggcgatgtgcgaaccgcaaatagcgattgtgtctctgaccattaccgagaaagggtattgtcattcgccagccacgggccaacttctgctggaacatcccatgattgccgccgacctgcaaaatccgcatcaaccgctaacggcaccgggtattattgtcgaagcgttagcgcgtcgtaaagccgcaggcttaccggcatttaccgtgatgtcctgcgacaacatgccggaaaatgggcatgtgacgcgtcaggttgtgacggcttacgcccgggaggtggatgcggaactggcgatatggatcgagcaaaacgtgacatttccgtcaaccatggttgatcggattgtccctgcggtcacgccggagacgctggataaaatcgaacaactgaccggcgtgcgcgatccggcgggcgttgcctgtgaaccgtttcgccagtgggtgatagaagatacgtttgtggcggggcgtccgctgtgggaannnnnnnnnnaacgcgggcgcgacgttggtcgccgacgtggttccgtttga

SEQ ID NO: 373090 - DNA, 1020 bp, Salmonella enterica
atgaaaagcatcgtaatcgaaaaaccgaatacattaactatcgaaacgcgcgcgcttccgcagcctgcgccgggcgaagttcgtattaaagtgaaactggcgggtatctgcggttccgacagtcatatttatcggggacataatccctttgcaaaatatccccgtgtcataggccatgaatttttcggtgtcatcgacgcggtaggcgacaacgtcaatcgcgaccggataggagaacgggtatccgtcgatccggtgatcagttgcgggcattgttacccttgttcagtcggtaaaaccaatgtgtgtacctcgctggtggtgctgggcgtgcatcgtgacggcggtttcagcgagtatgcggtggcgccggcccgtaatgctcatcgcataccggacaacatcgcagatcatcatgccgtcatggttgagccgtttaccattgcggcaaatgtgacgggacaagtgaatccgaccgagcaggacgtggcgcttatctatggcgcaggcccgatgggactgacgaccgtacaggcgctgaagggggtttatcaggttaaaacggtcatagtcgttgatcgcattgaagagcgtttagcgatggcgaagcagagcggcgctgactggaccctcaataatggtcaacattcactggcggaatttctacagcagaaggcgctaaagccgaccttgattgtcgatgccgcctgtcatcccgctatcctgcaagaggcgattacccttgcatcgcctgcggcacgcattgtcctgatgggattttccagcgacccgtgtgagattgtacagcagggtattaccggaaaagagctggctatttattcatcgcgtcttaatgccaataaattcccggtcgtgattgactggctgaataaagggcttattgatccggataagctgataacgcatacatttgattatcaacatgtcaccgacgcgattgagcttttcgagaaagaccagcgtcaatgctgcaaagtcttactcacgtttgcgaaataa

SEQ ID NO: 373091 - DNA, 327 bp, Salmonella enterica
atggaagaagttaactctgaattcacaatcgttgttgagtctgatctggataaatatgagttaattgattttttatcccaagggattccagacataataaaagtgaacttattatatttaagatacgaaaatacaatgattacaatagaaagaaattatgactgtaatcctaagttgataaatgagaatgatggttggctgtattataaatatgaattaacggtattttccatggagaatacctcgtatgaatatcagtatgaattagcgaataaaattatgaatgctctacgtgaggcgggatatctggcagaatcaatttggtaa

SEQ ID NO: 373092 - DNA, 1134 bp, Salmonella enterica
atgagcgcgggaagcccaaaattcaccgttagtcgcattgcggcactatcactggtttcactatggctggcaggttgtaccagttcgtcaaaccctccggcgccggtcacgtctgtggacagtggttcgtcatcaaataccaattccgggatgttgatcacaccgccgccaaaaatgggcgcgacgacgcaacaaacgccgcaacaagcgccgcaaattcaacccgttcagcgtcctgtaacgcagcccatgcaaactcaaccggtcacggaacaacccgtgcagatggaaaatgggcgaattgtatacaatcgccagtatgggaatattccgaaaggtagctatacgggtggcagtacttacaccgtgaaaaagggtgatacgcttttttacatcgcctggattaccgggaacgatttccgcgatctggcccagagaaacagtatttctgccccgtatagcctgaatgtagggcaaactttgcaagttggtaacgcatccggtacgccaattactggcggaaatgcgatcacccaggcggatgcagcacagcaaggagttgtgaccaggtctgcacaaaattccaccgttgcagttgcgtctcaaccaacaattacgtattctgagggctcaggtgaacaaagtgctaacaaaatgttgccaaacaacaagcctgctgggacggttgtcacagcgcctgtaacggcaccaacggtaagcacgaccgaaccaaatgcaagcagtacgtcaaccagcgcgccgatttccgcatggcgctggccgacggatggcaaagtgatcgaaaactttggcgcttccgaagggggcaataaagggatcgacattgcaggcagtaagggacaggctatcgtcgcaaccgctgatgggcgcgtcgtatatgccggtaacgcactgcgtggttacggtaatcttattatcatcaaacataacgatgattacctgagtgcctacgcccataatgatacgatgctggtccgggaacaacaggaagttaaggcggggcaaaaaatcgctactatgggtagcaccggcaccagctctacacgcttgcattttgaaattcgttacaaggggaaatccgtaaacccgctgcgttatttaccgcagcgataa

SEQ ID NO: 373093 - DNA, 468 bp, Salmonella enterica
ttgtcggcggcgcgtagcgcgttgtttaatcaaattgttcaccagcggctgaagaaaccagactttaatcaagttgttgacggcgatgcgctacaattagcggggcgtggaagctggttcgtcgcgacatctgaagaactgcctgaattgcagcgccgggtagacgaaaaagagctgatgattacagcgtcgttgccgggcagcggagagtggggaacacagcgtgcggcgctggcgtttgagcaagatgccattgcccaggaaacggtgttgcaatcgctgttgctgcgcgaaaaagtagaggcgtcgcgcagagcgatgctgctttatccgcaacaattaagctggaactggtgggatgacgttaccgtcgagttacgtttctggctgcccgcaggcagttttgccaccagcgtagtaagggaactgatcaacacaatgggtgattatgcgcatattgctgagtaa

SEQ ID NO: 373094 - DNA, 324 bp, Salmonella enterica
  misc_feature (182)..(191): n is a, c, g, or t
atgttcgtaccgctcaacccgatcccgttaaaagatcgaacctcgatgatcttcctccagtacggtcagattgacgtactggatggggcattcgtgctgatcgataaaacaggaatccgcacgcatattcccgtcggttcggtcgcttgtatcatgctggaaccgggaacgcgggtttcccnnnnnnnnnngctgtgcgtctggcatcgacggtgggaacgctgttggtgtgggtgggcgaggcgggagtgcgggtttattcctccggacaacccggcggcgcacgagccgataagttgctttatcaggcaaagctggcgttag

SEQ ID NO: 373095 - DNA, 1560 bp, Salmonella enterica
atggacaatttttcgcttttaacaacgccctggctccccgtccgtttcaaagacggttccacgggcaaactggctcctgtcaatctggcagatgaaaacgtggtggatatcgccgcaacgcgagcagatttgcagggagcggcctggcagtttctgttgggattgctgcaatgcagtatcgcgccgaaaagatacaaaaactgggaggatatctggtttgatggattgcatgccgatgcgctccataaggcattagcaccgttagaacacgcttttcagtttggcgcggaaacgccgtcttttatgcaggattttgaagaattacccgacaataaaataactatagcttcgctattaccggaaacaccaggtattcaaactactgagttaaatacagatcattttatcaaacgtggcgtaatggaatgtttttgcccgcattgtgccgcgttggcgttgttttcaatgcagcttaacgctccttccggcggacaaggctaccgcactgggctgcgcggcggcgggccgctgactacattgattgaattgcaggaatatcagggagagcggcaaacgccgctctggcgcaagctgtggctcaacgtgatgccgcaggatgctgcggatctgcctttgcctgtcgtctatgatgcggctgtatttccctggcttgccgcaacacgtaccagcgagccaccagctcatactattacaacagatgagcaggtaaataaattacaagcatactgggggatgccacgccgtatccgtctggatttcgcgacaatacgtcagggagtgtgcaatatctgcggtaataatagcgatgagctgctaatccagatgttggtcaagaattatggcgttaattatgaccgctggcggcacccattaacaccacatcgcctgcaaataaagaatagtaagggatttgaacctgttataacccaaccaggtggacttctttggcgagattggctgggactaagtcaagaaaacccgacggaaaagaataccgaatatccggcacaggtgattaaagtgtttaatgcccgagagctcaggaatatcaaagtaggcttgtggggatttggtgccgatttcaaaaaaatgaaaatccgctgttggtatgagcaccactttccgttgctgatgacggaaggtctgatccctgatttacgtaaagcaacacaaactgctacccgactcctcagcctgctgcgcagtgcgctaaaagaagcgtggttcgccaatgcgaagggcgcccgcggtgatttcagttttatcgacattgatttctggaacctgacgcaggggcgctttctcaatctgatccacgatctggaaaacggccacaagccggacgaaaggctgaataaatggcaaagagaactttggctgtttacccgttgttacttcgatgatcacgtctttaccaacccctacgagagcagcgatctggagcgcatcatgaaggcgcgcaaaaaatattttacctcatcggcggaaaagcaaagcgcgaaagccgccaaagcaaagaagcaggaggctgctgaatga

SEQ ID NO: 373096 - DNA, 2334 bp, Salmonella enterica
atgaaaatgaacgtaacagaaacggtaaaacaggcgtgcggccactggccgcgcattctccctgcgctaggtgtgaaggtgattaaaaaccgccatcagtcctgcccggtgtgcggtggctctgaccgctttcgctttgacgataaagaggggcgcggcacgtggttctgtaaccagtgcggcgcgggtgacggactgaaactggtcgagaaggtgttcggtgtatcagcctctgaggccgccgggaaggtgaacgccgtgaccggcaatctgccgccggttgccccggaagtgattgcggccgcagaagcagaaacggaggctgaccgcaaagcggcggccgcgctggccgtcaggctcatggagaaaacccgaccggccagcggcaacgcctacctcacccacaagggattccccggtcatgagtgtgtcatgctgacggccacacacaaaaccggcggcgtgacgttccgcgccggtgatatggttgtcccgctgtatgacaatgccggggcgctggttaacgttcagcttatcaattctgacggtctcaaacgcaccctgaaaggcggagcggtaaaaggtacatgccatatcatcggggggcagaaacaggcaggaaaacgtctgtggattgcggagggctatgcgaccgcgctcaccgtgcatcacctgaccggggaaactgtcatggtggcgctgtcccccgtgaacctactttctctggcgagccttgcccgtcagaaacacccggcctgtcagattgtcctcgccgccgaccgtgaccttaacggcaacggccagagtaaagccgctgcggccgcagacgcctgcgagggcattgtcgccctgccgccggtgttcggtgactggaatgatgcgtttatgcagaaaggtgaagaggccacgcggaaagccatttatgacgccatccggcctccggctgacagccctttcactaccatgagcgaagcggaatttaccgccatgagcaccagtgaaaaggcaatgcgggtgcatgaacattacggcgaagcgctggccgtggatgcgaacggccagctcctgtcccgatatgaggccggaatatggaaaatcattcccccgtcggattttgcccgcgacgtggccgggttgtttcagcgtctgcgcgccccgttctcgtcggggaaaattgcctcagtggttgagaccctgaaactgattattccgcagcaggacgcaccggcgcgccgtctgattggttttcgtaacggggtactcgataccgccaccggcactttcagcccgcatcataaatcgcactggctgcgcacgctatgtgatgttgatttcaccccaccggtggagggcgaaacgctggaaacccacgcccctcatttctggcgctggcttgaccgcgctgccagtggcaaaccggaaaaacgcgatgtgattctggccgcgctgtttatggtgctggcgaaccgttacgactggcagctctttctcgaagtgaccgggccgggtggcagcggaaaaagtattctggccgaaattgcgaccatgcttgccggggaagataacgccacgtcggctaccatcgaaacgctggaatcaccccgcgaacgcgctgcgctgattggcttctctctgatacgactgcctgatcaggagaaatggagcggtgacggggcaggactcaaggccatcaccggcggggatgcggtctccgttgacccgaaatacaaggatgcgtactccacccatatcccggcggtgattctggccgtgaacaacaacccgatgcgcttcaccgaccgcagcggcggtgtttcccgtcgccgggtgattctgcatttcccggaacagattgccccggatgaacgcgacccgcagctcaagaacaaaatcgcccgtgagctggccgtgattgtgcgccagctcatgcagaagttcagcgacccgatgaccgcccgcgcactgctccagtcgcagcaaaactccgacgaggcgctcagtattaaacgcgaagccgacccaacctttgatttttgtggttaccttgaagcgctgccggagcctgaggggatgtatatcggcaatgccagcattattccgcgtcagccgcgcctgtatctgtatcatgcctatctggcgtatatggaagcccacggctacaaaaatacactcagcctcaccatgttcggcaaggggctgtcagccatgctgaaagagtacgggctaaattatgagaagcgccgaaaaaatcagggcatacaaaccaatctcacgctaagagaggaaagcaacgccgactggctgccgaaatgtgatgaccccataacgaaataa

SEQ ID NO: 373097 - DNA, 738 bp, Salmonella enterica; identical to SEQ ID NO: 372953

SEQ ID NO: 373098 - DNA, 1098 bp, Salmonella enterica
atggataaatacttcagaatacgaccacagtggagcttagtagaagcatttgaagaaacaaataaacactatcaaccagggagcatggtaacaggtgccgcacgtaacgttcaaatagagaattggggggtcttaatcggtagaactagagcattagctgaaataaaatacgccattaattcatttggttcaaaaagtaaactatgcaagcacatacaaatatcaacaaaatactttaatatgcttgaggatttctttcaagaattgccagatgataaaaaacccggaaaaatatatcaaggaatgactatatcaggatattttcttttaaagaaaattggtggcggtggcaatgctgtagtttgggaagcaagggatccaaaaggcaaagtacgcgctttgaaaatcctaaaaaaacctaacaccacttcagtacatcgctttaatgacgaaattttaacactgaaaaaaattgaaagcttgaatgataacaaaattaatgtaatcaatattacagacaattatcaaccagatgaaaaggatgtttttccatggtatgcaatgccaaaagcagtctcattagacaaatacattgaaaagcactcaccatctccattgactatattaaaaggaatgctggaaatatgcataactattgaactacttcacaaacaaaaaatatttcacagggacatcaaacctgacaacattcttatttacaaaaataaatggcatctatgtgattttggcattgctactttcccgaacaaacaaagaattacaaaagaaggtgagaaattaggctccttgcactttcatgccccagaaatgctaatgacttcggagcaaagttcgggagagagtgcggacatttatagctttgctaaaacactatgggtacttttgagtgggcacaaatatccgattgcaggagaattgcgtatggaccgaagtgaggctttgttatcaacttattgtcaaatgaaaaatattcattatctagatttagctatatctgaatgcacacgctttaacccaagtgaaaggccaaaaatgaaatcggtgaggcaccacattgaaaaggtattagcggagtaa

SEQ ID NO: 373099 - DNA, 1488 bp, Salmonella enterica
atgaaagaaatagtaaaacaagatggctttaatgaatctgaaaaatatttagcagatttatgcagcaagactttcttaagcttatggagttaccctaatgtttatactgacgagggtaaaaaaagtgataatagtgatgggaaagaattatgtgatttattagttgtattcaatcagcatgtcattatattttctgataaagatattggttttaaagatactgggaacatcgaagttgattgggggagatgggttaaacgggcagttttgaagtctgcgaaccaattgtacggagcagaaaactggatcagggaaagatcaaacagaatatatctcgaccctaaatgcaagcacaaattcccactaaacttccctagcacggaagttattaaaatacatagaatcgctgtagctaagaatgcaaccaagcgattttcctcgatagttcaaggttcaggaagcctgataataaatccattaataaccggagatgaacacctaaaaaatccatttatgattggtatacctgtaccaaacaaaccatacattcatatttttgatgatgtcgcgttagatgttatattaaatgaactagatacaatatcagactttattgattacttagaaaaaaaagaagaattcataacttctgggaaattaatctccgctgctggagaagaagatttacttggtcattacttaatgagtgcaaaaaaagacctcgcccctggattttatattgaacatgatcacaaggcagtaattttagaggggcaatatgagtctttaataaaactaccgcaatatcacctaggtaaagcatacgatagaatatcttatttctgggatgacttcattgagcatttttccagacatgcattaggagggactttactatatgagaacaaacatccattatcagatgcaactttaggcctacaagtaatggcatcagagaagagagtagcccgtcgagttttatcaagctcgattttagaaaaaataacaaaaacgccacctcaaaaaaaagctgttcgtgtcatggtttcgccaaccaatcctaatcatggatacgtttggcttatattacccattccacctcaagctcaatcatatgaagattataggcattacagaaagaagtatctttatatttattgcacatccgtaaaattattatatccagatttaaatatcatcattggggtagccactgaaccgcgtgatggtggaggtggagaggatatgatctatcttgatactaatggttgggaagcgagtgattttgagcaagcggagcaagatcgaaaaacttatggggtactactacctgaaaatgttcagcaattctctggtgttgagtatcaatatcccataaatgatgacaagaaattaaactcagaaaaaaaatcacgaaccgctataattgctaagaaaaaaaagaaaagtcaaaagaaagctagaaaactaaatcgcaaacggaaatag

SEQ ID NO: 373100 - DNA, 1098 bp, Salmonella enterica
ttgcttatcaatcccgatggctcgaagggctggcgttttcgtttccgctttgccgggaaagcgcggttaatgtcatttggcagctacgaccttgtgagcctcgcagaagcacgtgagaaacgcgatacagctcgtaagcaggtagcaaacggcatagacccagtagaagaacgtaaagcccaaaagctggcacagcaactctcaacagaaaactcattcgaggctatatgtcgggagtggcacactaacaaagctgaccgctggacagtggcctatcgcgaagaaatcattaagacatttgagcaagatgtgttcccgttcattggtaaacgtcctattagtgaaatcaaacctttagaactgcttgaagtattgcgacgaatagaaaaacgtggagctctagagaaaactagaaaagtgcgccaaagatgcggcgaggtttatcgctacgcaatcataactggccgcgctgaatacaatcctgcgcctgatttagccatcgctctggctgttcctaagcaaaaacattatccatttctatctgccgaagaattgcctcattttattcgggatctcgaagcgtatactggtagcatcatcaccaaaaatgctacgaagatagtcatgctgactggtgtaagaacgcaggagatgcgctttgctacgtgggaagaagtagacctcgaaaaaggtatatgggagataccagcggaacgtatgaaaatgcgtaggccacacatagttcctttatctactcaggtagttgacctttttaaacagctcaaacctattaccggccattacccttacatctttattggcaggaacaaccgcagcaaaccgatctcgaaagaaagcgtatcgcaagtgattgagttacttggttacaaaggacgtgctacaggtcacgggtttagacacactatgtcgacaatcctacatgaacaagggtttgatagtgcatggattgagatgcagctagcacatgtagataagaatagtattcgcggaacttataatcatgctcaatatctagagagcagaagaaagatgttgcaatggtattccgataacgtaataaatggattacaagaatga

SEQ ID NO: 373101 - DNA, 948 bp, Salmonella enterica
atggctatgtatcaaaatatgctggtggtcatcgatcccaatcaggacgaccaacccgcattacggcgagcagtttatttgcatcaacggattggcggcaaaattaaagctttcctgcctatttacgatttctcgtatgagatgaccaccctgctttctcctgacgaacgcaccgcaatgcgtcagggcgtaataagccaacgcacagcctggatacgtgagcaggcgaaatattatcttgaagccggtgtccccattgaaattaaagtggtctggcacaatcgtccctttgaggccatcatccaggaggttatcgccggcagtcacgatctggtgttgaaaatggcgcatcagcacgatcgactggaagcggtcatttttacccctaccgactggcatttgctgcgtaaatgcccaagccccgtgtggatggtcaaggatcagccgtggccagagggcggcaaagccctggtcgccgtgaacctggcaagcgaagagccctatcacaatgctctcaacgaaaagctggtaaaagagaccttacaattggcggagcaggttaatcataccgaagtgcacctggtcggcgcctaccccgttacgccaatcaatatcgccattgagctgccggaatttgatcccagcgtgtataacgacgccatcagaggccagcatttactggcgatgaaagcgctgcgccagaaattcagcatcgatgaaaaagttacgcatgtagaaaaaggtttgccggaagaagttatcccggatcttgccgaacatctccaggcggggatcgttgtgcttggcaccgttggacgtaccggactctcggccgcgtttttggggaacacggccgaacaggtcattgaccatctgcgctgcgacctgttagtcattaagcctgatgagtatcaaacaccggttgaactggacgacgaggacgattaa

SEQ ID NO: 373102 - DNA, 852 bp, Salmonella enterica
atgaaaaaagccataataatctcagtattagagcaaatagaaaaaaatcttgaagagaggattgatattgaaaagctggttgttataacaggttattcgcgaaggagtttgcaggatttttttaaagaaaagtgtggcgtctctatcggaaaatatatcagacaacgcaagttgagcagaagcgccactctgctaaagctgacctctcagtcggtcacagatatcgcgttcagaatggggtttgattcagtgcagtcctatagtcgagagttcaaaaaaacatttggcgtcaatcccaataactatcgcaaggctgatttctgggatctcagaaacctacggcctccctactggcttgactgtgatgagcattatcagttcgaaatttgtcagcttacgtcaaaagaaattttcggatttcaaacatctcatcagatcgcaacaaatgaccttcctaaaaaagcgtcgcctataaaatggaaaatcattcatgagacgctcagaacgtggggcgaaaatgtgtattgtctctcgtcttttaagccggataataccaaagaccaggtcatcgccgtaagcagtttttttggtatggaacataattccgtcgatggaggaaaaatacccatgtcgagggtaataaaatgtggtaaatatgcaaaattccatttcgttggtcataaggaacaatatcaacaattttccaatacaatatatatgtgtatattgccaaaactgaatcttatcaggagagaaggagaagatattgaatacttccatttggcatccgtccaaaagcaacagagtaatgaatccattgtcgatctttattattacatccctgtactgtaa

SEQ ID NO: 373103 - DNA, 1596 bp, Salmonella enterica
atggctgatattctgctgctcgataacatcgactcgtttacctggaacctggcagatcagctacggaccaacggtcataacgtggtgatttaccgtaaccatattccggcgcagacgcttatcgatcgcctggcgacaatgaaaaatccggtgctaatgctctcccccggtccgggcgttcccagcgaggcaggctgtatgccggagctgttgacccgactacgcggcaagttaccgatcatcggcatttgtctggggcatcaggcgattgtcgaagcttacggcggttatgtcggtcaggcgggagaaatcctgcatggcaaagcctccagcattgaacatgacggtcaggcgatgttcgccggtctggcgaatccgctaccggtcgcgcgttatcattcgctggtcggcagtaatgttcctgccgggctaaccattaacgcccatttcaacggcatggtgatggcggtacgtcatgatgcggatcgcgtttgcggttttcaatttcatcctgagtccatcctgacgacacagggcgcgcgtctactggagcaaacattagcctgggcgcagcaaaagctggagccgaccaacaccctacagccgattctggagaaactctatcaggcgcaaacactgacgcaacaagagagccatcagttgttttcggcggtcgtccgcggcgaacttaagcctgaacagctcgccgccgcgctggtgagcatgaaaattcgcggcgagcatcccaatgaaattgccggcgccgccactgcgttgctggaaaatgccgccccgttcccgcgcccggactacctgtttgcggatatcgttggtaccggcggcgatggcagtaacagtatcaatatctctaccgccagcgcctttgtcgcggcggcctgtggactgaaagtggcgaaacacggcaaccgcagcgtatccagcaaatcggggtcatccgatctgttggcggcgttcggtattaatctggatatgaacgccgataaatcacgtcaggcgttagatgaactgggcgtctgtttcctgttcgcgccgaaatatcacaccggattccgtcacgcgatgccggttcgccaacagttaaaaacgcgaaccctgttcaacgtactcggcccgctgatcaacccggcgcatccgccgctggcgttgattggcgtctatagcccggaactggtgctgccgattgcggaaaccttacgagtattgggctatcagcgcgcggcggtggtacatagcggcggcatggatgaggtttcgctccatgcgccgacgattgtcgcggagctgcatgacggcgaaattaaaagctatcaacttacggcggaggattttggcctgacgccttaccatcaggatcagttggctggcggcacgccggaagaaaaccgtgacattctgacgcggttattacaaggtaaaggcgatgccgcgcatgaggccgccgtcgccgccaacgtggcgatgctgatgcgtctgcatggtcaggaagatctcaaagccaacgcgcaaaccgtgcttgatgttctgcgcaacggcaccgcatatgacagagtcaccgcactggcggcaagagggtaa

SEQ ID NO: 373104 - DNA, 456 bp, Salmonella enterica
atgaaaaacaaattgttatttatgatgttgacaatactgggtgcgcctgggattgcaaccgcgacaaattatgatctggctcgttcagagtataattttgcggtaaatgaattaagcaagtcttcatttaatcaggcggccattattggtcaagtcggcacggataatagtgccagagtacgccaggaaggatcaaaactattgtccgttatttcacaagaaggaggaaataatcgggcgaaagtcgaccaggcagggaattataactttgcgtatattgagcaaacgggcaatgccaacgatgccagtatatcgcaaagcgcttacggtaatagtgcggctattatccagaaaggttctggaaataaggccaatattacccagtacggtacgcagaaaacagcagttgtagtgcagaaacagtcgcatatggctattcgcgtcacccaacgctaa

SEQ ID NO: 373105 - DNA, 321 bp, Salmonella enterica
atgtccgtaatcaagaaaaatatccctgccataggcctgtgtatctgcgctttttttatccattctgcggtagggcaacaaacggtacagggcggcgttatccattttcgcggcgcgattgttgagccactgtgcgatatttctactcacgccgaaaatattgatttaacctgcctgcgcgaaggtaaaaagcaaatgcaccggattgaccttcggcaggcatctggattaccgcaggatattcagtccattgcgacggtacggctgcattatctcgatgcgcaaaaaagcctggcggtgatgaatattgagtaccgttaa

SEQ ID NO: 373106 - DNA, 1209 bp, Salmonella enterica
atgtcgcgcgtctcgcaggcgaggaacctgggtaaatattttcttctcatcgataacatgttggtggtgctgggttttttcgtcgtcttcccgctcatctctattcgctttgtcgatcaaatggggtgggctgccgtaatggtagggatcgcgctcggcctgcgccagtttattcaacaaggtctgggcatttttggcggcgccatcgccgatcgctttggcgcgaaaccgatgattgtcaccggtatgctgatgcgcgccgcaggctttgccaccatgggtatcgcgcatgagccctggctcttgtggttttcctgctttctttccggtctcggcggtacgctttttgacccgccgcgttcagcgctggtggtcaaattaattcgtccggagcaacggggccgcttcttctctctgttgatgatgcaggacagcgcgggcgcggtgattggcgcgctgctgggaagctggttgctacaatacgattttcgcctggtctgcgcgacgggcgctattttgttcatattatgcgcccttttcaacgcatggctgcttccggcctggaagctatcaacggtcagaacgccggtgcgtgaaggaatgcgccgcgtcatgagcgataaaaggtttgtcacctacgtgctgacgctggcgggctactatatgctggcggtacaggtcatgttaatgctgccgattatggtaaacgatatcgccggttcgcctgctgccgtgaaatggatgtacgctatagaggcgtgtctctcgctgacgttgctctatccgattgcccgctggagcgaaaagcgttttcggctggagcatcggctgatggccggcttgctcgtcatgtcgctgagcatgctccccatcgggatggtgggcaatttacagcagctttttacgcttatttgcgctttctacatcggctcggttatcgccgaaccggcgcgcgaaacgctcagcgcgtcgctcgcagacgcgagggcgcggggaagctatatgggctttagccgtctgggattagccattggcggcgcgattggttatatcggcggcggctggttgtttgatatggggaaagcgcttgcgcagcctgaactaccgtggatgatgcttggtattatcggctttatcacctttttggctttaggctggcaatttagtcataaacgcacgccgcgccggatgctggaacccggcgcctga

SEQ ID NO: 373107 - DNA, 924 bp, Salmonella enterica
gtgagaacattacggattggcattgtcgggttaggcggtattgcgcagaaggcctggctgccggtattaaccaacaccgccggatggacgttacagggcgcctggtctccttcgcgggataaagccttacgtatttgcgaaagctggcgcataccgtatgtggattcgctggcgaatttagcgtccggctgcgatgcggtctttgtccactccagtaccgcaagccattatgccgtggtcagcgaacttctcaatgccggcgtccatgtctgcgtggataaaccgctggcggaaaatctacgtgatgccgaacggctggtggcgctggcggcgcaaaaaaaattgacgctgatggttggctttaatcgccgtttcgcgccgctgtaccgcgaactgaagacgcgcctcggcactgcggcgtcactacgtatggataaacatcgtaccgatagcgtcgggccgcacgacttacgttttactttgctcgatgactatctgcatgtcgtggataccgctctgtggctggcgggcggcgaggcgcgccttgccagcggcacgttgctcaccagcgagtccggcgaaatgtgctatgcggaacatcatttttccgccgacaaactacaaattaccaccagtatgcaccggcgcgccggaagtcagcgtgaatcggtccaggccgtcaccgacggcgggctatatgacgtgacggatatgcgtgaatggcgcgaagagcgcgggcagggtattctcatcaaacccattcctagttggcaaacgacgcttgaacagcgtggttttgtcggatgcgcgcggcatttcattgactgcgtacaaaatcagacggttccggaaacggcgggggagcaggcgattttggcccagcgcgtcgtggaggcgctgtggcgggacgccatcagcgaataa

SEQ ID NO: 373108 - DNA, 654 bp, Salmonella enterica
  misc_feature (615)..(624): n is a, c, g, or t
atgcaggagttttacgccagggtctggaatacaaaagaaatgaatttattgaaatcgctggctgccgtcagctcgatgactatgttttcacgcgtgttgggctttgcccgtgatgcgattgtcgccagaatttttggcgcagggatggcgaccgacgccttttttgtggcgtttaaactccctaatttactacgccggatctttgccgaaggcgctttttctcaggcctttgtgcctatcctggcggaatataagagcaagcagggtgaagaagcgacgcggatctttgtcgcttacgtttccggcctgttgacgctggcattggccgtcgtgacggtggccggtatgctggccgccccgtgggtgattatggtaaccgcgccgggttttgccgatactgcggataaattcgcgctgacgacgcaactgctgcggattacgtttccctatattctgctgatctcgctggcttcactggttggcgccattctcaacacctggaatcgcttctctattcccgcttttgcgccgacatttcttaatatcagcatgatcggttttgcattattcgccgcgccatactttaatccgccggtgctggcgttagcctgggcnnnnnnnnnntgcaactggtgtatcaacttccgtatttga

SEQ ID NO: 373109 - DNA, 1125 bp, Salmonella enterica
atgctcaaacctatctgccatagtggaagtataaaggttccggaatatctggaaacagataaggaaaaaaatgccggacgtactccactgtcttcagacattcagcaagttagaaatgttgttgaagatgttccgccatttccagaaagcagaacggcgagaggttctgtaagcgcagcgtacaggctttcttttgacgaagtgttttgcggtctcagcaatgaagagcgtaaaaaggtgtatggtcgcctttttggaaaacaagtacttgcgcatattcattccaggtgtcagcgcgacgctgacataataagagaaaaagcgctcaggcggataagtcgtgagtgtggtaccgaaatagattgcactctcttgctaaataagatggtggatattttacaaaatgcccggctgacaataaattttaatgcggcaaaaattgactttgtctctctcttaaaaaataaagaatatctgaactcttatgcattaggttgcagaccaggagatttacctgcttataatgtcggacgtgattcagttgaaactaaagcatttgaactggagaggcttgcagattcaccttatgccccatatggtcagacaggcggtttttccgtagcatatactcccaacagtagaacttttagccctacaagcagaccaatttatgctgcactggactttctgaacggtgaaaatggaggtgccagcgcctatgggaaatcattttttgaattaaatgataatgtaaaaacaaattgtacattatcaccttttgatatctacggccacagatttggcctggatacgagtaaattatctacattttggcatatggagaacctgattgcatcctgtcaaaatgatttttttggttataattgctttaagagtttggttaaaatggctaagggcgaaaaatttttagctcattctaattatggtaaaggctatgaagggaattatatagaggctcatattcatggtgatgtatgtttattcagagatataaaacacgtttatttgtctttgcaagaaaactcttactcgaaaagtcaactatatgattatgcaaaacaaataaaccaggcgcttaatagagactgcataatattatattga

SEQ ID NO: 373110 - DNA, 516 bp, Salmonella enterica; identical to SEQ ID NO: 370871

SEQ ID NO: 373111 - DNA, 180 bp, Salmonella enterica
atgacttatatacctgtgtacatcaagttgcaggtgcgttcgcttcagttaccgacggaagtcaggcttctgcggattcgctgcgtttgtaccttcctgcaactcgaagtattcagggtagagatagatttattcgatgttggattcgataaaccacaggaatttatcgaggtcgcgtga

SEQ ID NO: 373112 - DNA, 747 bp, Salmonella enterica
atgaagtctctattaaaagtttcactggctgcacttaccctggcttttgcggtgtcttcgcacgccgcggataagaaactcgttgtggcaaccgatacggcgttcgttccgtttgaatttaaacagggcgacaaatacgtcggttttgatgttgatctgtgggacgctatcgcgaaagaactgaagctggactacaccctgaaaccgatggatttcagcggcattattccggcattacaaaccaaaaatatcgatctggcgctggcgggtattacgattacggacgagcgtaaaaaagcgatcgacttttccgatggctattacaaaagcggtctgctcgtgatggtgaaagccaacaataacgacattaaaagcgttaaagacctcgatggcaaagtcgttgccgtgaagagcggaaccgggtcggtggattacgcgaaagcgaatatcaaaaccaaagacctgcgtcagttcccgaacattgataacgcgtacatggaattaggcaccaaccgcgcagacgctgttctgcacgatacgccgaacatcctgtactttatcaaaaccgcaggcaacggccagttcaaggcggtaggcgaatcgctggaagcacagcaatacggagttgccttcccgaaaggcagcgatgaactgcgcgagaaagtcaacggcgcgctgaaaacgctgcgtgagaatggcacctataacgaaatctacaaaaaatggttcggtacagaacctaaataa

SEQ ID NO: 373113 - DNA, 2223 bp, Salmonella enterica
atgcggtggaccctgttcatccttttttgtctactgggcgcacctgcccatgcggtcgccatacccggcgtgaccacggggacatcaaccagccagcaagcagcgccagagcccagtcctgaacaaaaaaaagcggcctatgcggccctggctgacgtactggagaacgaggcttcacgtaacgaattgatagcgcaactccgcgaagcctcaaccacgccgccgaccgagccagcgccagcgcttgcgccgcctgcggccaaagatgagaaaacggtactggagaacgtcaccaccgttacccgtcagtacggcgatgctttcgctacccgtttcgcccagctttatcgcaacatcaccgatgcgccgcccaagccgtttaactcgcaaaccttcaccaacgcgttaacccactttttatttctggccgtcgcggtatttggtttttatagcgtgatacggctttgcgccctgccgttatatcgaaaaatgggcctgtgggcgcgcaagaaaaaccgtgaacgcagcaactggttacagctcccggcgatgatcgtcggcgcgtttattatcgacctgctgctactggcgctcaccttatttatcggtcagatgctcagtgataatttccatgcgggaagtcgaactatcgcttttcagcaaagcctgttcctgaatgccttcgcgctgatagagttctttaaagcgattctgcggcttattttttgccctaatgtaccggaattacgcccattcgcgattcaggatgcgacagcgcgttactggaatcgccgtatgagttcccttagcagtttgattggctacgggctaattgttgccgttccgattatttccaaccaggtgaatgttcaggttggcgcgatggctaatgtggcgatcatgctctgcatcaccatctgggcgctgtacctgatctttaaaaacaaagcggagattacgcaacatttattaagcctggcggaacgatcattagccttttttagcctgtttatccgcgcctttgcgctggtgtggcactggctggccagcgcttactttatcgtgctgtttttcttctcgttattcgacccaggcaatagcctgaagtttatgatgggcgcgactgtgcgcagtctggcgattattggcatcgcggcgtttatctccggtatgtttacccgctggatagcgaaaaccatcaccctgtcgccccatacgcagcgcaattacccggaattacaaaagcggcttaacggctggctctcctcggcgctaaaagtcgcacgctttttgaccgtctgcgtcgccgttatgctgttgctcaacgcctggggattattcgatttctggcactggctacattatggcgcgggggaaaagatggtcgatatcctcatccgtatcgcgttaatcttattcttctccgccgtgggatggacgattctcgccagtctgattgagaatcgcctggcctctgatattcatggccgcccgctacccagcgcccgcacgcgcacgctgctgacgctgttccgcaatgcgctggcagtgattatcagtaccataaccatcatgatcgtgttatcggaaatcggcgtcaatatcgcgccattgctggctggcgcgggcgcgttaggtctggctatctctttcggttcgcaaaccctggtgaaagatattatcaccggcgtctttattcagtttgaaaacgggatgaataccggcgacttagtcaccataggcccgctgacggggacggtcgaaagaatgtcgattcgttccgtcggcgtgcggcaggataccggggcataccatattatcccgtggtcctcgatcaccactttcgccaactttgtgcgcggtatcggctctgttgtcgccaactatgacgtggatcgccatgaggatgcggataaagcgaatcaggcgctgaaagacgcggtaacggcgctgatggagacggaggatattcgcgggctgattatcggcgaacccacgttcgccggtattgtcggtttaacaaacacggcgtttactttacgcgtatcgttcaccaccctaccgctcaagcagtggacggtgcgttttgcccttgatagccaggtgaaaaagcattttgatctggccaatgtgcgcgcgccggtgcaaacgtatcaggttctgcccgcccccaccggcggcccgtcgcctgattcgctgccgccgcgcgaaccgacgatttag

SEQ ID NO: 373114 - DNA, 927 bp, Salmonella enterica
atgtccgcccagaaaccggggttacacccgcgcaaccgccatcaacaccgttatgatctcgccgcactgtgtcagaccacgccggaattgacgtcctttcttatccgcacgcccgccggtgaacagagcgttgattttgctaatccgcaagcggtaaaagcgctcaataaggcgttgctggcgcatttttatgccgtcacacactgggacattccgccagggtttttatgtccgccggtgcctggtcgtgcggattatatccatcatctggcggatctgcttggcgaaacgacagggagtattccggcgcaggcaactattctggacgtgggcgtgggcgccaattgtatttatccgcttatcggcgtccatgaatatggctggcgatttaccggtagtgaagtcagcgacgcagcgatgtccagcgcgcaggctatcattcaggctaatacggggttaagccgcgccattcgtctgcgtcggcaaaaagatccggcggccatttttaccggtatcattcataaaaatgaattttatgacgcaacgctttgtaacccgccttttcacgactccgccgccgcagcccgcgcgggcagcgagcgtaagcgccgcaatttggggcagaataaagatgatgcgctgaactttggcggtcaacagcaggagctatggtgcgaaggcggcgaagtcgcctttattaaaaaaatgattgctgaaagccaaaccttccgccgtcaggtgttgtggtttacgacgttggtgtcgcgcggcgagaatttaccgccgctttaccgggcgttgacggaggctggcgcggtgaaagtggtgaaaaaagagatggcccaggggcaaaagcaaagccgctttattgcctggacctttatggatgacgaccagcgtcgccgttttatcacccgcaaacgctaa

SEQ ID NO: 373115 - DNA, 1731 bp, Salmonella enterica
atgaaatttaaattcgccacattactcacagccgccacggttttttactcttatcagagcgttgcacaaagtcagcaatcgcctgatgtctggtcagttgtcgaacagaaactgcaaaatgccgtccctttaaatgaaaacaccacttttaaatcgcaggcagcctggtttgaattacacagggaactgtttatgtacggcccgatgagccgtgcggatgcattactgaaaaagctggacacacaatcgaatgatgcgaagttttcgctaaaccatgaggcctcgtggatcgctgaaaataatagcccggatgccgcgatggttttcctgtccaaaattggtctcgataaaccgtcgagcattaccgcctacgagagctacgttgatggctgggttaatcgcaaacagcctgaaaaagccttagcccttcttagcaaaaatgccgacgcgaggaatttttatttagccacggttttaaaatcctggcactcagagcctgataaaaccgccgctatttataatgaaaattacgctgataaaattgttgttccttatactcagctaaaaatgctgcttattattgcgaagcagtaccatgccaagggcgacaccgcaaaggcgttggtttacgcagatagcgcgctgaaaatgtttgatacggctattgctcaacaaccgagtgctgaagcctaccgttatcaggagtatctcgacctgatggagatctattacgccacggggaataaagagaaggcgatggcgttgtctgcgagattgcgcaaagcaaccggcaataaaggaagctatttccagtattcattaccgggattgctctctttttataagaaaaacgagctgacacagaattatcaggagacgctttcaacctatgtgacgcaggtcgataaaatattcaattttgccccttcgccgcgcattgaaatggagctgattgatttattaagcaagcttgatgatgttgcgctgatgaataagcgtatcgatttgctgatgagcgcgccggaatatacctgctacgacgacaggtattgctacgagtacaaaatcaaagcgctgaagaatctctttcagcataagcagaatgctgtggcggaaaagcatatcgcaaccctctccgccgaggcgcaaaccctgacgttcgccgaatgggaagatgcaacaaatgaaatgggtgaagtactcaaagcaattggtcatcctgaggcagcgcaaaaattagccgtcagcgccgaggcgatttacctcagccaagcaaaagcctggcctgatgaagatatgtcgcgttcctttcaaagacttgcagagctttacggctatggcaacgacacggtgaatgccaaacgggtgttacaccagcacgttccctctctcgaagaggaggcgatgatcgaccactacatgaatgcaaaacagtggagtcaggcaagggaattgatgattaacgcagatagggtcgataataaaaacctgatgctgttacgccagatttgttctgaaaacacgcccgagtgtcaggaacatattacctttacgctgaaaaaattaaccacgcaggcgtcgattacccgccaggacgacaccggtaatcagcagctttatcagattgggaatatttttcacagattgggtatcataccgggagcggaacagcaggcgctgattcaggcgttgtataacaaggccgcagagcctaaaaaagccacgccttaa

SEQ ID NO: 373116 - DNA, 564 bp, Salmonella enterica
  misc_feature (4)..(13): n is a, c, g, or t
ttgnnnnnnnnnnacgttattgcgggtaactttattgccttttccgtggcggcgcttatcaacctgccgggtaacgcccttggttcggcgtcgactattatcaccggtaagcgtcttggtaccgggcaaattggtcaggcagagcgtcaactgcgccatgtattctggatgtcgactatcgtacttacggcaattgcctgggggacggcgccgtttgcgggtctgtttgcctcattttatacccaggagcaggacgtaaaagaggtagtgaaagttctgctctggcttaatgctgcctttatgccaatttgggcggccgcgtgggtgttgccgtcgggttttaaaggcgcgcgcgatgtgcgatttgcgatgtgggtatcgatgctggggatgtggggctgtcgcgttgtggcagggtatacgcttggtattgtgctgggtatgggggttgtaggggtttggctggggatgtttcttgactgggccgtgcgtggcgcactgttttactggcgtctgataagcgggcgctggctgtggagatacccgcgcgtaaagagggagtaa

SEQ ID NO: 373117 - DNA, 690 bp, Salmonella enterica
atgaaaaaattattaatagcgacctctgtcataataggattatcaacttcagcgcaagcggttgaatccactgctgtattaaaactgactggcgttttaaccaacggcgcatgtataccagagttaagtgatggtggcgttgtagatttcggtactaaagccgttagcgatctgctgccaactcagacgaatcaactgggatacaaagatataacactcacgattcagtgccttgcaccggcaaaagttggctgggtcgctaccgacaatcatggcgattcggcgacaacgctgactatcgataacgcaacatttggcggtcagaacaatagaataccaaactatcagctaggtctgggtacaacagcagatggtatcaagattggtgcatacggcctctccatagacgcgaataattcgaccgccgatggagttaagacgaagatggtaacgacaaatgattcgaatcctggtgtctgggctttagcaataaacgaatacgttgcgcttacaaatacatttccaacccgcaatacatatagtgtcggcgatgaaaatggccccgttgcttttaccaccgcaacatttcctatacgcgtagctgccgctatacagggaacggacacactggctattaccgataacaccacgcttgatggtcaggcgacctttacactcgtatatctgtaa

SEQ ID NO: 373118 - DNA, 690 bp, Salmonella enterica
atgaaaaaaattttgcttattactgcaattgcagcttcctttgctacaaccagcgtgaatgctgacaccactgccgtattaaaagtcaccggtcaactggttgttggtggttgtaccccagaactcagcggcggtggcgtggttgattacggtactatccgcctcgccacactttccgcaaccgatgtaaaccaactgggtactaaagatgtctctctgagtatctcttgtccgtctgcaaccaaagcagcatggactattaccgatgaccgtgcggacacccacccaggcgcatccgttatctccatagccaatggcgatatgactaatagtatagtatctgataccacaatgtcctacggcgttggcaaaacaaccgaaggtgtaaaaatcggcgcgttctctatttataccgataccgcgaacgttaccgctgatggtgtaaaatctgacgctatctcaggaaccgttgatagcccagtctggcagaagtcttccaccgggattatcaaaaacggcaatatggaaatgtttaccgttgctacaaaaggcaccaccgaaccggttccgtataccctcgccattttcccgctgaaaacctcactggctattcagaatactgcaacgctggccattactgatgatactgatctggatggtcaggcaaccatcacgcttaaatatctctga

SEQ ID NO: 373119 - DNA, 708 bp, Salmonella enterica
atgccagcagtgactaaacttccattattattactcagcgtcccctttgttttttcaacactcttttcacaggctaacgctgccggcatggtaccggaaactacgctactggtgattgaagaatccacacacagcggcgtaatgaatgttaaaaacacagacagtaatccggctttgttatataccaccgtcgttgatttacctgacgacaatggtgtgaaactggatgtcactcaaccagttgttcgcgttgaagcaggccagcagcagcaactacgctttattatggaaagtacggaaccgctcaccgtcgagcactataagcgcgtcacgtttgaaggtattcctccgaaatctaccaataagggaatgaaaataggttttaatctacgccaggatttgccggtattaattcgtcctaaaaatctaccggtcgttactgatgcctggaaattattaacctggtccagaaacggacaaacaatcaacgtcaaaaatccgtctccctacgttgtacgtttagcccaaaatattaccttcttaccttccgggggcgaaggcacgattaaaaaaacctatattctgcccggcgaaacattgaacgtcagtataaaaacgccccttgctgctgatacatccgtacgtttttaccctgccagccgttacggcattgaagtccccagctttacctcaccgctggtgccgtga

SEQ ID NO: 373120 - DNA, 2409 bp, Salmonella enterica
gtgaagtatttaaaactgccgctatacatcaaaactgcgctttattgctcactggcgaccacggcgttttcggctctggcggaggagctgaattttgacatgggtattctcacctccagaggcattagccccaacgtcgcacaatatttttcccgtgcgccgcgttttctaccaggcagccacaccgtcatggtaaagatcaatggcgtaaatagagggtcgttggtcgcgagtttcgacacagaaggccagctttgcgtggatgacgatttcctcagcgccagcgggctcataccgcttaatatcagcgccaaagaaacctgtcatagcctacaagaagattatccctcagcgattattaccccactgccaaacagtgaatcgctggagctttttgttccggcgcaggctctggataataacttactctcgctaaacaacgtgattaaaggcggcaccgccgggttatttaactataacctgtacgccagtcgcagcgagtcatccggtagcgatagccgaaactatgcccaggcaaaccttgaagctggcttaaacttcgcggaatggacgctgcgcagccgctacatgctgacgaataatgatggagaataccgtaccgatagtctatatacctatgcggagcacgtatttcaggcacaaaaaatgcgtgcgcaagttgggcagatcaacgccaactccagtctattcagtggcgcgccgatcaacggcgtacagcttatccctgaacaagggctggcacaggatacacaaggcgtaaccattaacggtattgcccgaacccaccaggctcgcgttgaagttcgtcagtccggacagattatttataccgcaccagtgaacgctggggcatttacccttgaaaatgtccccatcatacgcagcaataccgaccttaacgtcagcgtcgttgaaaccgatggctcaacgacaaccttcacggtgccggcagtatcctttaatttacgcgaactcacgcccgcaggcttaacaatgtccatagggcgcatacgtgataccaccagcgactattcgcttccctggatctataacatcagcgatggttggaaactgagtgaaaactggctggcgcaggcgtctggcgtactggcacaagactatcaagcggcaggagggatgctgcaatggcttccaaccaacaaatggacgttttccggctcaatgctgggcagtaaagcgtcctttggcgaatctctgcagggtgcgaaaagtgaactacgcgccagcatggcgctgcccggggaaattagacttgacgtcagtaccgcccgctacagcgacggatatcgtgagttaacggatgcgctcaataaagatgcttacgaatatcaaagtagctccagtgctaatattgcctggaaccataatctgttaggtaccttctctctgggttattacacttatcaggctacggataatgacaacgactctcgcagcataatggcttcctggggcaaaacgtttaaatatgcctcaattaccgctaactggcagcacgctgttaatcaggatgatgagaatcataacgacagtaatgatgatgatatgttttacatcaacatcagcattccactcggtgagcagcgcgtcggcgcttatatgcgtaatcaaggtgataaaacaacctacgggctacaaaataatggttcgctgagtaaagatacccattactatatttctgcggatcgtgatgcaaaaaaccagcaaaatagcttcaacggtaatctcaatagcaatcttcattacactcaactcagcgtgggcggcggcactgatggcgataattaccgcaactataacgcaaccttcagcggaggcatcgctgcacacgaacatggcataacgttctcgccttatacaatcaaaaatacctttgctatcgcacgcctgagtgaaccagaaagcggcattgaaatcgccacgccacaggggcgaatctggactgaccactgggggcaagccgtcattccggggctaactgaatggcggaaatcccgcgtagaggttaatgcgaatacgctaccaaagagtatggaactggcaaacggtattaagaatattaccgtcgcgcacagcgcttttcgggtactggatttcaacgtgctgaatacacgccgtgtgatgctggcagtaaagcgtccggatggctcatggctacctaaaggcaccagcattgtagatgaaaaaaataactatttggtcagcgctgtcgacagcggacgcgtatttatcaccgatgttggggataatcctgcgttatatgccgctgatgatgatatgaatcgtctgtgtcgcatccactacacgctgcagaaaacccaggataaagaggcattttacgaaacggcaaagggagtctgtcaatga

SEQ ID NO: 373121 - DNA, 573 bp, Salmonella enterica
atgaaatccaacagcaaatggttggggattgctatatgttgtatcttcaccgcactactccccccatcagcccgggccgacgatgactgccaaataacgttttcttcgccaaacgtcagctttggctggcttaagcaagatgatatcgtcaattctcagcaaggctggaatcaaatgtcttcacaggaggttcacgttagtgtgagttgcccagaaagccagaatattgctctttttgtgcaagcctcagcgggggaaaagggacgattttattttggaaataacggtggtctcgccgtacgtgttagtcagatgatagtagatggtaaaagttatcctattgccagcacccttgatagagtgagctttgctcccaatgacagtgccctggatagtctgttgctacataataacaacggtatcatcgcgatggataataaccagcaggtcagtgggaaaatgatgaacgtcacgctgacattaacacctgtcttgaacgataatcaatttacgcatgctaccgatacggtcatgctagaaagcaatttacagtgggaagtgctgacgaaataa

SEQ ID NO: 373122 - DNA, 1323 bp, Salmonella enterica
gtgtttctcgcacaagaaattattcgtaaaaagcgtgatggtcatgcgttgagtgacgaagaaattcgtttctttatcaatggtattcgtgacaatactatctctgaagggcagattgccgccctggcgatgaccatcttcttccacgatatgaccatgccggagcgtgtttcgctgaccatggcgatgcgggattccggtactgtccttgactggaaaagcctgaatctcaatggcccgattgtcgataagcattcgaccggcggcgtaggggacgtgacgtctctgatgttggggccaatggtagcggcctgcggcggttatgtgccgatgatctccggtcgcggcctcggacataccggcggtacgctcgacaaactggaagcgatcccgggcttcgatatcttcccggacgacaaccgtttccgcgaaattattcaagacgtgggtgtggcgattattgggcaaaccagctcgcttgcaccggcggacaaacgtttttacgccacccgcgatattaccgcgacggtggactctattccgctgatcaccggctccatcctcgccaagaaactggccgaagggctggatgcgctggtaatggacgtcaaagtcggcagcggcgcgtttatgccaacctatgaactttctgaagcccttgctgaagcgattgtcggcgtggcaaacggcgcgggagttcgcactacggcgttgttaaccgatatgaaccaggtgctggcttcaagcgccggtaacgcggtggaagtgcgtgaagccgtgcagttcctgaccggtgaataccgcaatccgcgcttgtttgacgtcactatggcgctatgcgtggagatgctgatctccggccagctggcgaaagacgacgccgaagcgcgtgccaaactgcaggcggtgctggataacggtaaagcggcagaagtctttggtcgtatggtggccgcgcagaaagggccgagcgatttcgttgagaactacgataaatacctgccgaccgccatgttgagcaaagcggtatatgctgatactgaagggtttatcagcgcaatggatacgcgtgcgctggggatggcggtcgtctcgatgggcggcggccgtcgtcaggcgtctgacaccattgattacagcgttggctttaccgacatggcccgtctgggcgacagcatcgacgggcagcgcccgctggcggtgattcatgccaaagacgaagccagttggcaggaagcggcgaaggccgtcaaagcggcaattatccttgacgataaagcgccagcaagcacaccttcggtctatcgtcgaattactgaatag

SEQ ID NO: 373123 - DNA, 192 bp, Salmonella enterica
atgggtaattgtcgttatttatcggtgatatacacggaatcgggcgccaacatgaaaataacgtatgagaaaaggtcgcttaaagcgaggtgttgttgttttacgttaacagtcggacaatttatcaccttactgaatacgtgtcatcaaccgttaagtaaaactcatctctttagctttctccctggctga

SEQ ID NO: 373124 - DNA, 1662 bp, Salmonella enterica
atgttaaagcgaattaaaattgttaccagcttactgctggtattggcgctatttggccttttacaactgacatccggcgggctgttcttcaactcgctgaagaatgacaaagaaaacttcaccgtattgcaaaccattcgtcagcagcagtctgccctgaatgcaacctgggtggagctgttgcaaacgcgtaataccctgaatcgcgcgggtatccgctggatgatggaccagagcaatattggcagcggcgcaactgtcgctgaactgatgcagggggcgaccaatacgctgaagctgaccgaaaaaaactgggcgcagtatgaggcgttaccgcgcgatccacgtcagagtgaagcggctttccttgagatcaaacgaacctatgatatctaccacggcgcgttggcggagcttattcagcttcttggcgcgggtaagattaacgagttttttgatcaaccgactcaaagctatcaggacgcttttgagaagcagtacatggcctatatgcagcaaaacgatcgtctgtacgatattgctgttgaggataacaacagttcctacaaccaggcgatgtgggtactggtcagtgtgctgattgccgttctggtggtcattatcgccgtctggttcggcatcaaactgtcgcttatcgccccgatgaatcgtctgattgaaagcattcgtcatatcgccagcggcgatctggtgaagcgtatcgacgtggaaggctccaacgaaatggggcagttggctgaaaacctgcgtcatatgcaaagtgaactgatgcgtaccgttggcgatgtacgtaacggcgcgaatgcgatctatagcggcgccagcgagattgcgatgggcaacaacgatctctcttcccgtactgagcagcaggcagcgtctctggaagagaccgccgccagtatggaacaactgaccgccaccgtgaaacagaacgccgaaaacgcccgtcaggccagtcacctggcgctgagtgcgtcagagacagcgcaaaaaggcggcaaagtggtggataacgtcgtacaaacaatgcgcgatatcgcctccagttcgcagaaaatcgccgatattatcagcgtaatcgacggtattgctttccagaccaatattctggcgctgaatgcggcggtagaagcggcgcgcgcaggcgagcagggacgcgggttcgcggtggtggccggtgaagtccgtaatctggcccagcgtagcgcgcaggcggcacgagagatcaagagtctgattgaggattccgtgagccgtgttgatgtggggtcgacgctggtcgaaagcgccggtgaaaccatggatgagatcgtcaatgcagtgacccgcgtgaccgatatcatgggcgagattgcctcggcgtccgacgagcaaagccgtggtatcgaccaggtgggcctggcggtagcggagatggatcgcgtaacgcagcagaacgcctcgctggtggaagagtccgccgccgcggctgcggcgctggaagagcaagccagccgtctgacccaggccgtcgcggtgttccgtattcaccagcaacagcagcgtgcgcgtgaagtggctgcggtaaaaaccccggcagccgtgtcgtcaccaaaggccgcagtggccgacggcagcgataattgggaaacattttaa

SEQ ID NO: 373125 - DNA, 327 bp, Salmonella enterica
gtgatattatatttggtgatgagaataaagcggctatttagtcgctttattggtttctgggggcaggttaatttatggcggcgtcagcattataagaaggaaagggttcgaatgatgcagaccctattcatctgcccgggcaacgttgaccaccgtataaagctgctcctcatcgatttaactggtaatgaactgccacacaatccagcagccaaaggcgatcagaatgccgccggcggcgcgttcaattttccagacaagattacccaagcgacgttgactttgcggcagggcgataagcgttatcagcagcagatcccagagtaa

SEQ ID NO: 373126 - DNA, 726 bp, Salmonella enterica
atgatacgggatctgattgttcagacgccgtaccgccccggggagcgcttgccgccggaaagagagatcgctgagaggctcaatgtgacgcgtaccgtcgtgcgtgaagcgctgatcatgctggaaattaaaggtctggttgaagtccgccgcggcgccgggatctacgtgctcgacagcgcggataataacgagatggaaggcgctgacgtcaatcactgtaatgacgccgggccgtttgaactgttacaggcgcgtcagttgctggaaagcaatatcgctgaatttgccgctctgcaagccacccgcgaagacatcattaaaatgcgccaggcgttacaactggaagagcgagagctcgcctccagcgcgccgggcggctcagaaagcggcgatatgcagtttcatctggccattgccgaagcgacccataacagtatgttggtagagctcttccgtcagtcctggcaatggcgtgaaaataatccgatgtggctccagcttcatagccatctgggcgatacgctttaccgtaaggagtggctggtcgatcataagcagatcctcgcggcgttaattaagaaagacgcccgcgcagcgaagctggcgatgtggcagcacctggaaaacgtgaagcagcgtctgctggagttttccaatgttgatgacatctactttgatggctatctgtttgagtcatggccgctggacaacgttgatgcctga

SEQ ID NO: 373127 - DNA, 135 bp, Salmonella enterica
atgcaagaagatgcgttgattgagttgccgtccggtgagcgtattgctatatcgaatcaatgggggttagggactatagaactgcttattgattttgttcgtcaggataattttgtagttgaaaaagtgggttga

SEQ ID NO: 373128 - DNA, 996 bp, Salmonella enterica
atgcaaataacagtaaaacgacggctgacgaaggtcgctttagcggtggcagttgctggatactgcactattccttcggcaatagcagccaatgaaggcaatctgaagaatgaaagcatcggcggctggcaggtcagcggcagcaccggcaccattcagggtacggtaccgagaatcaagctgcccggcacggcggatagcgatgtcgttggcgcgaacgtgaaggttgacattgaccgttccgggcgtaaggacggctataccgataccaccgataatggcgttaaccagttgcacattggcgataagctgacagtgagctgggatattaacgatacggaaggcgactacgatacggacaatgcgctgaccacgaaaaccgtacagtggatgtgttataccgatcaaagtaaatcgggcggtaaagtcttgcagggcaacggccttaccaccaacggcgatggttcagccacttacactatccaggccagcgatgctgactgctacatcggtctgaaactgacgccgatgaccaaaacgggtgatccgaatatcggcgcgttggttgatctggctgacctgtcttccggcgctggcggtggtgccgacgatgacgctattccgactggcccggttgttgacgattctatcgaagtggcgatttacgacagtgcagcaccgacggtcaacctgcttaaagacagcagtatcaaactgcaaaccggtcatacctatgtcgcccggttgtggaaagacgctgatggcaacggtaagtacgatacgggcgaaacggaagttaccgaacagtacgactacaagtgggtcttcaccggcctcagccagcagttgggaacggctggcggcgactccaacattcagaacagcaatttggttatcccggttaccaatgccgaagccaaagacttgctcttcccgagcgctggcgacgacggtgttcagggttatggtttgtccatcaagtacaaacgcaagtaa

SEQ ID NO: 373129 - DNA, 636 bp, Salmonella enterica
ttggtcagccacgagcgtcgtgtcgtcttttttgatttggatggaacgttacatcaacaggatatgttcggcagttttctgcgttatttgctgcgccgtcagccgctaaatgcgctgctcgtactgccgctgttgcccattatcggtatcggtttactggtaaaagggcgtgcggcccgctggccgatgagtctgttgctgtggggctgtacttttggccatagcgaaacgcgtttgcaggcgcatcaggcggattttgtccgttggtttcgcgctaacgtcacggcgtttccggtcgtacaggagcgtctgaccacctatctattgagctctgacgcggatatctggcttattaccggttctccgcaatcattggtagagcaagtctattttgatacgccgtggttgccgcgtgttaacctcatcgccagccagatggcgcgacggtatggcggctgggtattaaccgtgcgctgtctgggccatgaaaaagtcgcgcaactggaacgtaaaatcggtacgccgttgcgtctttatagcggctacagcgacagcaaacaggataacccgctgctttatttttgccagcatcgctggcgggtgacgccgcacggcgagttgcagcagctcgaatag

SEQ ID NO: 373130 - DNA, 1437 bp, Salmonella enterica
atggcaaggaaaacactacgcgcacgccgtttcttcagccttatatttccttttttcttcattacctctgtttacgctgagcaaacgcctgaatccgcaaaaaccgttactgttgaagcgaaaaatgaaatgttcgcgcctcaacaccccgaccaatatcagtcatggaaagcgacgtcagaacagtctgcccgtgaagatgcgctggcggaagaccctcgtctggtgatcctgtgggcgggctatcccttctcccgtgattacaacaaaccacgcggccacgcgtatgcggtaactgacgtgcgcgaaacactgcgtaccggcgcgccaaaaacggcggaagacggcccgctgccgatggcctgctggagctgtaaaagccccgatgtcgcgcgccttatccaacaagaaggcgaagacggctacttccatggcaaatgggcgcgcggcggcccggaaattgtcaacgatttgggctgtgccgactgtcataacaccgcgtcggacgatttcgcccaagggaagccagcgttaacgttgtcgcgcccctatgccgaacgggcgatggaggctatcggcaaaccgtttgataaagcgggacgatttgatcagcaatcgatggtctgcggtcagtgccacgtggagtactactttgacggtaaaaacaaagccgttaaatttccgtgggacgaaggcatgaaggtcgaaaatatggagcaatactacgacactatcgccttctctgactggactaactctctgtcgaaaaccccgatgctcaaagcgcagcacccggaatatgaaacctggagcgcgggcattcacggtaagaacaacgtgacctgtatcgactgccacatgccgaaagtacagaacgccgaaggcaagctctacaccgaccataaaatcggcaacccgttcgacaatttcgcgcaaacctgcgccaactgccatacccaggacaaagcgtccctgcaaaaagtggtcgccgagcgtaaacaggcgattcatgacctgaaaatcaaggttgaagatcagctggtacatgcgcacttcgaagcgaaagccgcatgggatgcgggggcgacagacgcggaaatgaaaccgattctgaacgatattcgccacgcgcagtggcgttgggatctggcgattgcgtcacacggtattcatatgcatgccccggaagaaggtctacggatgttaggcagtgcgatggataaagccgcggatgcccgtactaaactggcgcgactgctggcgaccaaaggcattacccatgaaattccgctgccggatatttcgacgaaagagaaggcgcagaaagcgattggtttgaatatgcaacaaatcaacgcggagaagcaggacttcctgaaaacggtcgtaccgcagtgggaagatcaggcgcgtaaaaacggtctgttaagccaataa

SEQ ID NO: 373131 - DNA, 744 bp, Salmonella enterica
atgaaaggaaaatttttgtgtggtttattggtttcgctattaattagcggatgcggtgacgataacacccctacagagaaagtcttgaaagaacaatttagtaatcaatttcatgggcgtcttatccttgattcaattgatatcaaggaaacatcggttgatggaaataagagaacatatgctgctgatggcttactttctactggctacgatctgtatacgccagttgcctcgttaactgattatattgttgttcaaaaatcgtgggataaaggcaaagatattaaattctcagcaactttgaacagtcttggtaataaagatactggatggaaaacaatattttcttcattacaaatgtcagaaacaccaaaaggcaatccaattcctaatgttgaagctgacggtaaatatatcatcatggatggagcaggttttgatgataaaataaatgcaattaaagatgaatatgccaggaagaaatcaaaactaaacgaattaaataatgatatcgcaaaagttaaaactaatatattagttattaataaagaaatcgatgagtattgggggaaaggggaagatggaaaaacacaaagccgttattttgttcagcgtgatttgaataaagagctggaactctttaataaagaaaatgctccttattattttgagaagaagtacaatgctgaagttttcgacccagcaatgaaggctcgccgggaaaaattaaagaattacaggtga

SEQ ID NO: 373132 - DNA, 930 bp, Salmonella enterica
atgacgatgcagcaaagtgatatggaaagatataatccattattaatgttaaaagaagtcatggcgcagacgccttatcgccataaacgctggggagagcgtaagtttcgctataaatttttattacgttgccttattaaccccgtaacgacaattaaatacttcaatgaattatgccatctgtctcagcccagaacgctgattattcatcgtccactgttgccggcaaaaatccagcggccctatttgtataccgggcttagcatacgttgccgggcaaaagctattctggaacactaccagttcgttcagtcctttccggaaagtaaaattaaaaagatcctcctgtccgaggaacaaatcttactcgctcacctggaaggaaaaaacgacgctctggtagatatctactgcggtccctgtggctatgacagagaaggtgagctgacattaacgctgtgtttcaatgatacgccgttggcacgtttatcattttcctttatccgccatgaagggaagcaaatagcgctggttgccgggttacaagggcccagtaaacatgtcggcccacaagtcatacgtaacgccaccaaagattgttacggtctctttcctaaacggatgctgtatgaagcttttgcaacattgatgcaggcctgtaatgtcgacgagatttatgcggtaagtgaaaacaaccatgtttatcgtcaactccggtacttattccagaagaaaaaaacttttgtggccagctatagtgaattctgggagtcgctaaacggcgttaagaaaggtgccttatatcatctgccatcacaggtgatgcgtaaagcgcctgaaagtatccccagcaaaaaacgcgcagagtatcggaaacgctatcatattctggatacaataatacaagaggttaacagcctctcccggtag

SEQ ID NO: 373133 - DNA, 1014 bp, Salmonella enterica
atgaataatcatactaaacgacggggaatagcattaaccgtttttcttgtcggtgttaacatcctggcctggatttgggcgttctgtgtttttcatcaccatgccgtcatgctaagcgcagccatactggcgtatagctttgggctgcgtcatgcggttgatgccgatcatatcgcagccatcgataccgtcacccgtaaactgatgcagcagggtaaaacgcctttaggcgtgggggcgtttttttcattgggtcattcgaccattgtcgttctggcatgtctggcgattgttgtgacgtcgatggcatttcgcgatcgtattgatgttttgcatcaatatggttcgttgattggtacggctgtttccgctttttttctgctggcgatggccctgcttaacctgtttattttgttcaacgtctggcggcaatttcgctcggttacccgcggcgagtcagtgagggcgcatgacgaggccatacctggcgggctgatgacgcgtatatttcagcgtacgtttcgtttggtcacttccagttggcatatgtattttgtcggttttctgtttggtctgggatttgataccgcaaccgaggttgggttgctgggcatttccgcttcagcagctaaccaggggctatctctctggtcaatgatgatttttcctgtgctgtttaccgccgggatggcgctggtagattccctggataactttgtcatggtcggcgcttacggttgggctttctcgcatccattacgtaagctttattataatatgaccattaccgccgcatccgtcattgtcgcgctggcgattggcggacttgaggcgctggggttgattgatgatgcgttacagttaagcggaacattttggcagaccgtcagcacgcttaacgatcatatggggaatgtgggcttctgggtagtgggtgcttttgtgctattctggctgctctcgttgttgaattatcgctggcgcggctatgataaaatcaccctcaatacctga

SEQ ID NO: 373134 - DNA, 888 bp, Salmonella enterica
atggtattgccttcaatgaataaatcagttgaggccattagcaataatcaccttcaacagccgaacaaatttccattgataaatggattagctgacgtaagagactattatgtcgcaaactgcttattgtttaaacttaataaaggcagtttgcgaattgaaaacgaatttggggagttcatcgaacgatctgcgccgtgtttatttttattggaaaaagatcaaacaatcacgcttagtatgagcgaaatagaagggcatattgatttttcttcactggaagtttcctatgacttaatgcaaaaattctacaaagttttttacagtacaagaaactataatgatcgagagctatcattaaaaacgaaaccaaagtatttttttcatgcggacttgttgccagggatgagtgatacttttgactctattttgcatggtgtggcatgtccacgggtttgtagtaatgtgagtattgatgatcatgattattcatatttctcattgatgtatcttatatcggcatttgtacgtaagcccggtgggtttgatttccttgagcgagcaataaaaattacgacaaaagagaaagtttataacattattatcagcgatctcacccgcaaatggtcacaggctgaggtggcaggaaagctgtttatgagcgtatcaagtctgaagcgaaaactggccgctgaagaggtgagttttagcaaaatatacctggatgctcgtatgaatcaggctataaaattattacgtatgggggctggaaatatttcacaagtcgcgacgatgtgtggctatgatacgccttcttattttatcgctatttttaaacggcattttaagattacaccgcttagctttatgcgtacaatgaaccattga

SEQ ID NO: 373135 - DNA, 168 bp, Salmonella enterica
atgggccaagtaatccgtagccaacacataagcaacttgaagtatgaagggtatagagacccgatgatatttatcgggtctgatattcgtttcatcgtaaaaggttggtgtcattcgccaaccttttttgttagggaaaatctggaaagccgtaaagaattgtcatag

SEQ ID NO: 373136 - DNA, 1167 bp, Salmonella enterica
atgccagctctcacacaacattccacatcgatcacgctgtttcgcatcagcgccgcgatgtttctcaactatctgactattggcatcccgttagtcatgctgccgctgtacgttcagcagcagttgcatctgagcgatctgttgatcggtatcgcggtaggcagccagtttatcgccaccttgcttacccggggcgccgcgggtcgaaaagccgacacgtcaggcggacgtcggacggttatcaccggtcagttctactgcgccgcatcaggtctgctgatgctggtcagtctaatcgctcacccggttccgctgctcgcatgggccatactgattgttggtcgtgtgctgctgggcatcggtgaaagtttcattttgaccggtaatttaacctgggggatgtggctggcgggctcgacccacgcgggtcaggttatttcctggaacggcatggcgacctacggtgcgctggctatcggcgcgccgctggggctgtcgctttacgccagggccggcctggcgcttccggcgctcctcgtcgtgctgttgccgatcatcgccagcggagtcatctatggcattccggggaatatcccaacagcccgtccccgcgtgccagtgctacgggtagtcggcctggtgtggcggcccggaacagggcttgtgctccagggcattggttttgccaccctaagcgcgtttaccgccctctggttcaacgagcgtcactgggataacaccggttttgcgatgacgctgtttggcattgcgtttatcgctgtccgctttttctgcgccaaatttcccgaccgttacggcggcgccacggtcgcaaccttttcactactggtagaggggaccggactggcggtaatgtgggccgctccgtcagcaggcgctgcgctgattggcgcggcgattaccggctgcggctgttcgctgatgttcccatcgctgggcgtagaggttgtgcgcagagtgccaccggagattcgtggtacggccctcggcgtctggtcagcgtttcaggatctggcctacggatttaccggaccaatagcgggcctgctgacgccgtttatcggctatcagcaggtctttcttctggccgcggcctgcgcgctgctgggcgcggcggttgtccatctcctgctgcggcaacattaa

SEQ ID NO: 373137 - DNA, 1437 bp, Salmonella enterica
atgtctcagagaagtaagtacaattcggcctatgtgtacgtcctgtgttgtattgcggcgctggctggattgatgtttggttattcaacggcggtgattaccggagtggtattgcctttacagcagtattaccaactgacgccaaccgagaccggatgggccgtttccagtatcgtgattggttgtatcatcggcgcgctggtcggtggaaaaattgccgataaactggggcgtaaacctgcgcttctgatcattgcgatcatttttatcgcttcttccttaggggcggcgatgagtgaatcgttcatgatcttctccctttcccgcattgtgtgtggttttgcggttgggatggccggaacggcatccaccatgtatatgtctgaactggcgcctgctgaaattcgcggcaaagcgctgggcatttacaatatctccgtggtatctggccaggttatcgtgtttatagtcaactatctgatagcaaaaggaatgcctgctgatgtgctggtttcccagggctggaagactatgctttttgcccaagtggtaccctccattgcgatgttagcgattacgcttttcctacccgaatcaccggcatggtgcgcccgtaacaaccgcagcgaagctcgttcgataaaggtgcttacccggatctacagtggattaacggccacagatgtggccgctatttttgacagcatgaaagaaaccgtacgtccacaggacaacgtcgccgggggagaacgcaccaacctgaaaagctcgccggtgctccgctatattctgttggttggatgctgtatcgccgttttgcaacagttcacaggcgttaacgtaatgaactattatgcgccgctggtgttgcagaacagcagtaccgaagtggttatgttccagaccatttttatcgcggtatgtaatgtggtgggcagttttatcggcatgatcctgttcgaccgctatggccgtataccgattatgaaaattggtaccatcggctcaattgtcggcctgttgatcgcgtcatacggtttgtacacccacgatacaggctacattaccatctttggcatcctgttttttatgctgctgtttgccgtcagctggagcgttggcgcatgggtactgatttctgaggttttccctgaaaagataaaaggttttgggatggggctggcggtgagcctgatgtggatagccaacttcctcatctcactgttgttcccggtcataaatgataacgcctggctgcaggagaccttcggcggcgctttttcgatgtggatttttgtcgtctttaatttggtctgctatgtctttatttctcgttatgtgccggaaacaaaaggggtgccgctaacagaaattgaacggctggccgagaacaagctgcgtgaaattcaggggaaacatcgcgatgtaatagcctga

SEQ ID NO: 373138 - DNA, 1332 bp, Salmonella enterica
atgataaaggaacgtaaaaccgaactggtagaagggtttcgccattcagttccctatatcaacacccatcgcggaaaaacctttgtcattatgctcggcggcgaagccattgagcatgacaatttttccagcatcgttagcgatatcgggctactgcatagcctcggtattcgccttgtcgtggtgtatggcgcgcgaccgcaaatcgacgccaatctggccgcgcatcatcatgaaccgatttaccacaaaaacacgcgggtgacggacgccaaagcactggagctggtgaaacaggccgccggtttactccagcttgatattaccgcccgtctgtcgatgagtctgaacaatacgccgttgcagggcgcgcacattaatgtcgtcagtggcaatttcaccattgcgcagccgctgggcgttgatgatggcgtggactactgtcatagcggccgtatccggcgcattgatgaagatgcgatcaaccgccagttggataacggcgcgatcgttctgatggggccggtcgccgtctcagtgaccggcgaaagttttaatctgacctcagaagagattgccactcaactcgccgttaaactgaaagcggaaaaaatgatcggtttctgttcttctcagggcgttaccaatagcgagggcggcatcatttctgaactcttcccgaatgaagcacaggcgcgggtggaagagttggaagcgcagggcgattacaactccggaaccgtacgttttttgcgcggcgcggtaaaagcctgtcgtagcggcgttcgtcgttgccatctgatcagctatcaggaagatggctcgctattacaggaattgttctcgcgtgatggtatcggtacgcagatcgtcatggagagcgccgagcagatccgccgcgccaccatcaacgatattggcggtattctggagcttatccgcccactggaacagcagggcattctggtacgccgttcccgtgaacaactggagatggagatcgataaatttaccattattcagcgcgataatatgactatcgcctgcgcggcgctgtatccttttgtggaagagaaaataggcgaaatggcctgcgtagcggtacatccggattaccgcagctcatcgcgtggagaagtgcttctggagcgggttgccgcccaggcgcggcaaatggggctgcgtaaattgtttgtgctgacgacgcgcagtattcactggttccaggagcgcggttttacgcctgtcgatatagagttactgcctgagagcaagaaaaaaatgtataactatcagcgacgttcaaaggtgctgatggcagatttaggataa

SEQ ID NO: 373139 - DNA, 2889 bp, Salmonella enterica
atgccccgcagcacctggttcaaagcgttattgttattggtcgccctctgggggcctgcagttcaggcggatatcggttggcaaccgctgcaagaaactatccgtaaaagcgataaagatacccggcagtatcaggcgatacgtcttgataatgacatggtggtgttgctcgtatccgatccgcaggctgtaaagtcgctttcagcgttagtggtacccgttggatcgcttgaagatcctgaggctcatcaggggcttgctcattatcttgagcatatgtgcctgatggggtcaaaaaaatatccgcaggcggatagccttgccgaataccttaaaagacatggcggtagccacaacgccagcaccgcgccttatcgaacagccttctacctggaggttgaaaacgacgcgctaccaggcgccgtagatcgcctggccgacgccattgccgcgccattgctcgataaaaagtatgccgaacgcgaacgaaacgcggtgaatgccgagctgacgatggcgcgcacccgcgacggtatgcgtatggcgcaggtaagcgccgaaaccattaacccggcgcatccaggctcgcacttttctggcggcaatctggaaacgctaagcgataagccgggcaatccggtgcaacaggcgttgatcgcttttcatgaaaaatactattcatctaatctgatgaaggcggtgatttacagtaataaacccttgccggagctggcgcgtattgccgccgcaacctatggccgcgtgccgaataaacagattaaaaaaccggaaattaccgtacctgtcatcaccgaggcgcagaagggcatcattattcattacgtgccggcgctaccgcgtaaagtgctgcgcgtggagtttcgtattgataacaatagcgcgcagttccgtagcaagaccgatgaactggtctcttatctgattggcaatcgtagcccggggacgctctctgactggctgcaaaaacaaggactggtcgaaggtattagcgcggattccgatccgattgttaatggtaacagcggcgtatttgccatttcggcaacgctgaccgataaaggtttggccaatcgtgatgaagtcgtcgcggctattttcagctatctcaatacgttacgtgaaaaagggatagataaacgttactttgacgagctggcgcatgtgctggatctcgacttccgctatccgtcgattacccgcgatatggactatgtcgaatggctggcggacactatgatccgcgtcccggtagcgcatacgctggatgcggcgaatatcgccgatcgttacgatcctgccgctatcaaaaatcgcctggcgatgatgacgccgcagaatgcgcgcatctggtacatcagtccccaggaaccccataataagacggcgtattttgtggatgcgccttatcaggtcgataagattagcgaacagacgtttaaaaactggcagcaaaaagcacagagcattgcgttgtcgctgccggagttaaacccctatattcctgatgatttcacgcttgttaagaatgacaaaaactacgtgcggccagaactgattgtcgataaagcggatttgcgcgtggtttatgcgccgagtcgttatttcgccagcgagccaaaagctgacgtgagcgtggtattgcgtaacccgcaggcgatggacagcgcccgcaatcaggtactgttcgcccttaatgattatctggcgggaatggcgctcgatcagctcagcaaccaggcggcagtgggcggcattagcttttctactaacgccaacaatggtctgatggtcactgcgaacggttatacccagcgtttgccgcagcttttcctggcgttgctggaaggatattttagctacgacgccacggaggaacagctggcgcaggcgaaatcctggtatacgcagatgatggattctgcggagaagggaaaagcctacgaacaggcgattatgccagtgcagatgatttcgcaggtgccttatttttcccgtgatgaacgtcgcgctttgctgccgtccattacgttgaaagaggtgatggcctatcgtaatgcgttaaaaacgggcgctcgtccggaatttctggttatagggaatatgagcgaagcccaggcgacctctctggcgcaagatgttcaaaaacagctagcggcgaacggatcggcgtggtgtcgtaacaaagacgtggtggttgagaaaaagcagtccgtaatatttgaaaaagcgggcagtagcaccgactccgcgttagcagcggtctttgtcccggtcggctacgacgagtacgtcagcgccgcctacagcgcgatgttaggtcagattgttcaaccgtggttttacaatcagctacgaaccgaagagcaactgggatacgccgtttttgcctttccgatgagcgttggccgtcagtggggaatgggattcctgctacagagcaacgataaacagccctcttacctgtggcaacgctatcaggcatttttccctgacgccgaggcgaagctgagggcgatgaagccggaagagttcgcccaaattcagcaggcgatcattacgcaaatgcgccaggcgccgcaaacgttgggcgaagaagcatcccgtttaagcaaggatttcgatcggggtaatatgcgctttgactcgcgtgataaaatcatcgctcagataaaattgctgacgccacaaaagcttgccgacttcttccaccaggcggtggtggaaccacaaggtatggcaatattgtcacagattgctggtagccagaatggaaaagcagaatacgtgcatccgacaggctggaaagtgtgggataacgtcagcgcattgcagcaaacgttacctctaatgagcgaaaagaatgaatga

SEQ ID NO: 373140 - DNA, 933 bp, Salmonella enterica
atgtcggcgctgccgctctttcactcgttcggtttgacggtgggcctgtttacgccgttgttgaccggcgcggaagtgtttctttatccaagtccgctgcactaccgcattgtgccggaactggtctatgaccgtaactgtaccgtgctgtttggtacgtcaaccttcctcggcaactatgcgcgctttgccaatccgtatgatttttatcgcctgcgctatgtggtggccggtgcggaaaaacttcaggagagtaccaaacaactgtggcaggataaattcggtctgcgcattcttgagggctacggggtaacggaatgcgcgccagtagtctcgattaacgtgccgatggcggctaagcctggcactgttggccgcattctgcctggcatggacgcgcgtctgctggcggtgcccggtattgaaaacggcggtcggctacagctgaaagggccgaatatcatgaatggctatctgcgcgtggaaaaaccgggcgtgctggaggtgccgtcagcggaaaacgccagaggcgaaaccgagcgcggctggtacgacacgggcgacattgtacgcttcgatgaaaatggttttgtgcagattcaggggcgcgcgaaacgctttgcgaaaattgctggcgaaatggtctcgctggagatggtcgagcaactggcgcttggcgtttcggcggacaaaatgcacgctaccgccattaaaagtgatgccagcaaaggtgaagcgctggtactgtttacgactgacagcgaactcacccgagaaaagttacagcactatgctcgtgaacacggtattccggaacttgccgtcccgcgtgatatccgttatctgaagcagcttcccttgcttggcagcgggaaacccgattttgtgacgctgaaaagttgggtggatgcgccggaacaacatcatgagtga

SEQ ID NO: 373141 - DNA, 585 bp, Salmonella enterica
atgcgtaataaaataatacttgccatggcggctgccggtatgatgtatggtgcttctgtatttgccgccgatactacacccacagcaggcccgttcggctcaggtaaaattcttttcactggtaccatcaccaactcaccctgtgatatcgcaccgggcgacgatgcgatcaccgttccgtttggacagatttcttaccgtaaactgaataccgccaatgcaaccacggactcaaaaccgttcaccattcatctgcagaactgcgccttcgatccgaatgaaactacaatagccggctccgcagggaaaatgtctaaagtaaccgtctctttcagtggcacagctgatacctcaggtaaagcttacgtcagcaccggcagtgcccagcatgttggtgtgcagcttctgaaaggtgacaacacctcactgattacacccaataccccgatgccggatggcgacgctcagcaactgcaggccgggaataacgaactcaacttctttgcccgcctgatagccctgacagatgccgcaactcctggcgatgttaacgcctccgtcacctacaccctgaaatacctgtga

SEQ ID NO: 373142 - DNA, 879 bp, Salmonella enterica
atgacagctcgctacatcgcaattgactggggatcgaccaatctgcgcgcctggctttaccagggcgacaaatgcctggagagcaggcaatcagaagcaggcgttacacgcctgaacggtaaatctcctgacgcggtgttagcagaagtcacaacacactggcgcgacagcgccacccccgtggtaatggcgggcatgatcggcagtaacgtaggctggcaaaatgcgccttatctgccggttcccgccctgttctccgctattggcgaacagttaaccgccgttggcgacaacatctggatcatccccggattgtgtgtctcacgcgaggataaccacaacgtgatgcgcggcgaagagacgcaactgcttggcgcccgcgaactttctccttcttctgtctatgtcatgcccggcacgcattgcaaatgggtacagactgatacgcaacaaattcatgattttcgtactgtgatgacaggcgaactccatcacttgttgctgcgtcactcgctggtcggggctggtttgccggaacaggaagcttctggcgacgcctatgccgcggggctggagcgcggtcttaattctcctgccgtcctgccttctctttttgaggttcgcgcctcgcacgtgttggggcatcttgcgcgtgagcaggtcagcgacttcctctccggcctgttgattggcgcggaagtcgccagcatgagcgaatccttcgcggcgcaacaggctatcactctcgtcgctggacccgcgctgatctcacgttaccaacaggcgtttagtgctattgggcgtgatgtttcaaccgtggatggcgatatggcatttcaggctggaataaggagcatcgctcatgcagtggcaaactaa

SEQ ID NO: 373143 - DNA, 315 bp, Salmonella enterica
atgttgaaagcggtacgcacgcacgaaccgctcaccttaattgataagctgatttgcggggcgtacattgaagcccgctcctgcgaacgttttgccgctctggcgccctggctggatgaggatttacagacgttttatctctcgcttctgcgctccgaagcgcggcattatcaggattacctggcgctggcgcagcagatttccgccgaggacatttctgcgcgcgtgcgctattttggcgaggtggaagctgaccttatcttgtcgccagaccgcgagtttcgttttcatagcggcgtgccagccgccggataa

SEQ ID NO: 373144 - DNA, 1221 bp, Salmonella enterica
atggaaaagcattttgtcggttctgaaatcggtcaattacgcagcgtaatgttgcaccgtcccaatctcagcctaaaaagacttaccccttcaaattgtcaggaattactttttgacgatgtattatccgtagagcgcgctggcgaagagcatgacatttttgccaacacgctgcgccagcaagggatagaagtgttgctgttaaccgacctgctcacccaaacactggatgtggctgacgctaaagcctggctactggatacgcaaatttccgattatcgccttgggcccacctttgccgcagatattcgcgcctggctggcggatatgccgcaccgtgaactggctcgccatttaagcggcggtttaacttacggcgaaatccccgcctccataaaaaatatggtggtcgatactcacgatattaatgactttattatgaagccattaccgaatcacctatttacccgtgacacgtcctgctggatatataacggcgtctcaattaaccccatggcgaaacctgtacgccaacgtgaaacgaataatttacgtgctatttatcgctggcatcctcaattcgcaggcggtgatttcattaaatatttcggcgacgaggacattaattacgaccacgccactttagagggcggcgatgtgctggtgattggccgcggcgcggtgttgatcggtatgtctgaacgtactacgccgcagggcgtcgagttcctggcgcaggcattgtttaaacatcgtcaggcggaacgcgtcattgccgttgaactgccaaaacatcgctcctgcatgcaccttgacaccgtcatgacccacattgatatcgacaccttctccgtctatccggaagtcgttcgcccggacgttcagtgctggacgctgacgccagacggacgcggcggtctgaaacgaacccaggagagcacgctggttcatgctcttgaaaaagcgcttggcatcgatcaggtgcgcttaatcaccactggcggcgacgcatttgaagctgagcgcgaacagtggaatgacgccaataacgtgctcaccctgcgtcccggcgtggtggtgggctatgagcgcaacatctggaccaacgaaaaatacgacaaagccggcattaccgtccttcccattcccggcgatgaactgggtcgcgggcgcgggggcgcacgctgcatgagctgtccactggaacgcgatggtatttaa

SEQ ID NO: 373145 - DNA, 990 bp, Salmonella enterica
atggcaattaaagcgctcgatggtggacggtataaagtggatgttagaccgcgtggccggagtggacgtcggattcagcggatttttaagaaaaaggcagatgcagtggcctttgagcgttatgttctcagccacatgcacgataaggaatggcttgaaaagccaacagagcaacgtcatctctcagatctgcttccgttatggtgggaattgggtggacgcaataagccatatgctaacggcgttctaaccaggttgaaaaaaatcatcaaagaaatgaatgatccaagggttagccagattaatgctcgtttcatggccgcttatcgaagctcccgtttatccttgggagtaaaagagtctactgttcggcgtgatgagtcggatctcggaggaatgtttacactcctggcaaatgccggggaatttcacggagaaaatccgctccgcgccctcccctctttgaaacgaaaatcacccgaaatgacgtatctcaccacggaagaaatcgccaaattactggatgcagtaagcggtgatgcccggcggattacgctactttgtctcagtactggggcgagatggggagaagcgaaaaatctgcgcgcggaacacatcatcaataatcgcgtgacgtttaacaaaactaaaaacggaaaagttcgaattattcctgtctctgatgaagttgttagtgagatcaaaacaaagaaatccggccttttgtttgacgtcaattatgaggaatatcgcaaggtgcttcgcagtgttaagccagacctaccaaaaggacaggctgtacatgttctacgccatacctttgctgctcactttatgattaatggaggaaatatacttacgctccagcgaattatggggcacgccacgatccagcaaactatgacctatgcgcacctcgctcctgatttcctccaggatgcaatttcacttaatccgttaaaaggaggcatccacatttcatccacataa

SEQ ID NO: 373146 - DNA, 303 bp, Salmonella enterica
atgcgtatgactattggagagcgcataaaaatcatgcgtgaaagcgagagacttactagcctcccggatacagcaaaaatgcttggtttaaaccgtgatgctctgtggagatatgaaagcggtaaaactatccctaatgctgaagtaattgagcaaatactaaacaaccccagatttgagaaatatgcgttgtggtttatgactggaaaaattgcgcctgaatccgggcagatagctccggctctcgcacactatgggcaagagccaacggacttacccccatccgaaaggaaaattggttaa

SEQ ID NO: 373147 - DNA, 327 bp, Salmonella enterica
atgaatgaagaactattgagggcattgtttaagatcccagaccccatcaccgtcgatgagttttcccgccgcacaggtaagaccgaatcagccgtaagaaagttggtagagcgtcgactcatccctctaactactgagcgcgaggttttaggcgaggaagggagttcgcgccgtcttctcatcctttggaatgagtggctcgaaatggtctatgacgcaacgaaacagcttcctcctgagcgtaaagattggcgcaatcactggcttaagaaagccaagaagctggcggaagatttgggattaggcttccttaattttgctgcatga

SEQ ID NO: 373148 - DNA, 342 bp, Salmonella enterica
atgaaacagcaacgtaattcacgctttcgtaatggtgctgaacgccacgctaaccgtttcgctaccagtgcatcacgcagcaacatccgctacagcctgagtgatacacacgcaacgccggatggctacccagtaaaacaaatcggcgagcatgcctggctgattgagaaagctggaatcgtggtccacaaatgcccacgcaatccgtttaccggaaaccgcatttttgcactaagcagcggcgacaatcagttcgggcaggatttcacattatacgaagcactacgcacggttgatcgtctgcttcgcggacaaagttttattaaacaggctgatttataa

SEQ ID NO: 373149 - DNA, 279 bp, Salmonella enterica
atgaccaaagagcatgcacaaggtgtatttattcgttttattgattttcgcggtgaactgttattacgcgcatcagctattgatggagtcgtcccatcagaaaaaaatgcagctacttacgtttatctgaacggcacgcgcctgaccgtagaacttccgtaccagactgtacacgaaatcattagcgaagcggaaaaagcacgtaagactaatggcgatgaaccctatatcgaaattatttgtatggattcagaagcagaaattcagaaagcagattaa

SEQ ID NO: 373150 - DNA, 243 bp, Salmonella enterica; identical to SEQ ID NO: 7389

SEQ ID NO: 373151 - DNA, 411 bp, Salmonella enterica
atgcacgcaaaagaagaaggtatcatcagagcactgaaagaaatttcaaagacagaaaacgtagtagcgaaaaaagccatagcaaataatcatatggacgtcgcaacccacacactgatagtcgcaagagtcacggcagaagcagccgaaattatcgcaaaacaggatgctgaactggcggttctcagaacacaacccgtcaccggactggatttgtctaacaccggacgccttatttacacaattggctcggagctacagcgatacaccattatcgccgggttacaggataaatacctgatcactcctcaccccataagggaatcagaaattctgacaaatctccgcctgatagagcgctctcaagtcgcattcattgatgacgcacagtgcaccgtatttaacgcatag

SEQ ID NO: 373152 - DNA, 204 bp, Salmonella enterica; identical to SEQ ID NO: 20165

SEQ ID NO: 373153 - DNA, 147 bp, Salmonella enterica
atgagcagaaggcgaatcacacgcaggcatcgccgcacacacatgaattccttaccgacgctgaaagaactcattcaacacgagatcgctgatttctgcgcaacgctggggtcgcctggtgaaccggaaacaccagaagcgatgtag

SEQ ID NO: 373154 - DNA, 204 bp, Salmonella enterica
atgaacaaaaagacctggtttcgcgcatacatgtgggcgctggtatgcgtcctcgtctctttcattctgtatgcaggactactcccccgaatgatttcatcagacagctccttcctggtattgctgggcattttcattgccatgctgtacccggcaggcgttgttcgccttttcagtaagtacatcaaggaaatcaagcaatga

SEQ ID NO: 373155 - DNA, 831 bp, Salmonella enterica
atgaagaaattcaaactctttcagattctcccgctttttgccgccatcctgctggttggttgcgatcgcgttgagccaggtaatgtgggaatcaaagtcaacaaactgggcgacgacaaaggcgtcggcgaagtagttggcgttggccgctactggacaggctggaatacagaggtttacatcttcccgactttcaaacaaatgaagacttacgatgagccgttcaacttccagatgagtgacggcacaaccatcggctatcacatcggcgtggcctacaaagttgatccatccaaagttaccacggtgtttcagacctaccgcaaaggcgtggacgacattaccgacactgacctgcgccagaagatcgccgacgcactcaaccgactggccagcaaaatgaccaccgatagattcatcgacggtggcaagtctgaactgctggattcagcacttaaagatattcaggcagaaatgacacccatcggcattcaggtaatgagcctctcttatgtcggtaaaccggaatatccgccaaccgttatcgacagcattaacgccaaagtcacggcaaaccagaaaaccctgcaacgcgaacaggaagtaaaacagcgcgaagcagaagccaacatgttgcgcgcagaagctgccggacaggctgatgccattcgcacaaaagcccaggctgaagccgacgccattcgtttacgcggcgaagctctgcgccagaatcccggcgttatggagctggaagcgatcaacaaatggaacggcacgctgccgcaatacatgaccagtaacaccgctgttccgttcgttcccgtgaagtaa

SEQ ID NO: 373156 - DNA, 231 bp, Salmonella enterica
atggcaaaccgcaaacagcaccgcgctatcgcggagcgtcgtcacatccagactgaaatcaaccgcagactttcccgcgcattccgcgtcgctaaaatcatgcacatcaatatgctgcatgagcgtagctgcgaactttcaaacctctactcatccgctgttttcagttatctggcggatgatctgcgcgagcttcagcagctcatccagcagcaaaacaaactccattaa

SEQ ID NO: 373157 - DNA, 366 bp, Salmonella enterica
atgattctcgccaacgactttcttgaatacctgctcaacacagagcgtgatcttgccgttcgcgtgcgtgaacgttatgacatgtacctgaaatccctgcctgtaccgcagctcgctgacggaaagattgttattgatggtcgctacatgattgacagccacgagggaaattacaggctttaccgcattgaaggtggcaccccgtccgttattggcatttaccagcgcccatcctctgcaatcgtcgatgtgattgccgacagcatccgcatcacacatcgccatgccgacacagaagacaccctgctggaaattcagcggctggctacagtctgccgcgacaccctgaatggcatgacgaagtaa

SEQ ID NO: 373158 - DNA, 2823 bp, Salmonella enterica
atgacggcagagtacatcagggactggcaacaaccgcgccacgcagtggggcgtgaaggaacggggatccctgctcctgaatccgcgctttcctcctggctggatgcctaccgggtagagaacgagcgccgccaggaaatggctgatgcggcgttctccgccacgccgctgggcaacctgattaataaaagcctggacgcacaggaaaaacaggacaaaaccatcacactggcaggagacgccagaaaacaggcacgcggcgcggtggatgaagccatggcctcgctgcgcctgctgccgtcctatctgcgcgatccgcttattcgccacctctctttcctgcgcaaaaaacaggaagccgatcgtcagaaaggcaaaaagagctggcaggcggaacgctacgcgcgcggaaccctgcgcaaaatattcggacgtctggaccgcaccgacagccgctggctgacaccgggttatcgctccattgccggacgcgaacgcctggacgatttgctttacctgccgcagctcaacaaacaccagatacagacgctggccaccatgacggcggcgatgttcagcagcaccttcgaaaagctctgcgatggctttggtgcgactgatggcgagctgaccatggatgtaacgctgaaggcgtatcagatgctggcccgcatggcgttacacctgcacgccatgcctccgcattatgacgcactgacaacagacaaagaccggaggaacgaaccggacacggaactgctgccgggtgcaatccttcgcctgacctgtgcggaatggtggaaacgcaaactgtggcttttacgttgcgagtggagagaagaacaacttcgcgccgcctgtctggtttccagaaaaacatcaccctatctgagccaggacgcattaagtgaatttcgcgcacagcgcgagaaaacacgcgatttcctgaaaagtttcatgctggaaaatgaagacgggttcacgattgatctcgagacagtgtattacgcgggagtaagtaacccggttcaccgtaaggcagaaatgatggccaccatgaaggggctggaacttctggccgaagcccgtggtgacaaagcggtgtttctgactgtcacctgcccgtcaaaataccacgcaacaacggagaacggtcatccgaatcccaaatggaacggggccaccatgcgcgactccagcgattacctggttaacacgttttttgcggcggtccgcaaaaaactgaaccgcgacggcctgcgctggtatggcatccgcacggtggagcctcaccatgacggcaccgtgcactggcatatgatggtctttgctcatccggaagaaatcgacagcatcgtggccatcacccgcgatattgccattcaggaagatcgtcacgaactgggcgatgatattactccgcgctttaaggcggagtatgtcgacggctcaaaaggcacaccaaccagctatatcgcgacctacatcggaaaaaacctggacagccgcgccgtagatggcatcgacccgaaaacgggcaagccacgcgttgaccacgaaaccggaaaatcaatggccgagagcgtggagcgcgccatcggctgggcgcgccttcaccgggtccgccagttccagttctttggcatcccctcccgtcaggtgtggcgtgaactgcgccaccttgccagccagatggcacgcaatccagaaggcccgcaacagctgaaggatgacgcaatggatgcggtactcgctgccgctgatgccgggtgttttgccacctacattgaaaaacagggtggcgtgcttgttccacgcaaagactacctgattcgcaccgcctacgacctcgcagaagagctgaacgattacggcgaacagagcgtacagatttatgggatctggtcaccactcatcggggaatcctcccgtgtgtgcacgcatccggataactggaagctggtaagacgcaaaccggaagcggaagacagcgcccgcgaaaatggttttgaccttcagggcggccctgccgccccttggactcgtggcaataactgtccccgtgtacaggaaacggacaacaacgggacagaacagccggaagaacggccagcaccgtggccgcagctccctgacggcgttgaagtgaacgaatggatgcgctcactgaaacggcacgaacgccgggcgctgatgcgttcgcttcgtgacaaacaggcaaaaaacagcagtgatgaaatgcagagctggacacagagccgcaaacagcagcggcctttgcctgataaccacgaattactcgctaaagaatggcgggagtctgctgaatctctcggcctgcatatcggtgaacaacagatgcagcacctgttacggggcggcagtctgtacgttgacggcagcatcattgcaccgcagggatttgaaattgtacgcaaaccggatacccgcccggacagccgaatcacgcagctctggcagcgcctgagccgtaatcacggcgtaagcagcacggagatccgccataacccggtcgccagctatctggcgcaactgggggcatcagaccctgaagccgccgcacgcctggcatccacacttcagcaggaccagaacaccatgaaaacacccgttaccgtgctttctgacatgctgcgcgccatccgcgacacagagcacgcacagagaatcagtgaaaccactgaacgcgcccgccgcaaagcagacctgctgcggggtggcctgaccattggaaacaaaaaacagacagaaacgggattcacaaatcccgtaaatgagcaaaaaacgcgccgcgatatatga

SEQ ID NO: 373159 - DNA, 960 bp, Salmonella enterica
atgaaaatttgtatcgatgacggctccaccaacatcaagctggcatggactgagaacggcgaacgccgcaacgccatcagcccaaacagcttcaagtcggaatggtctgcgccgttcggtggcacgcagcccgcgaactacatgcttgatggcgtgcgctatggttttgatccggtcagcgatcgctttgtccagacgaccgacacgcaataccagtacagcgatgtgaatgtcattgccattcatcacgcgctggtcaaatcaggcatcacaccacaggaagtggatgtggttgtcaccctgccactgagcgaatatttcgacacaaacgcacagccggtcatggccaacatcaaccgcaaaaaagcaaacgtcatgcgcccggtggcgtaccagaacggaaaagcattcactatccgtaacgtacgggttatgcctgaatccattccggctggttttaaagcactggctgacatgagtccgtttgaatccctgctgattgtggatttaggcggaaccacgctggatgtggcaaaggttcagggacaactggcaggtatcagccaggtgttttgcgatccacacgtaggcgtttccctgatggccgatgccgtactgtcggtgatggccactaacggtatgcgtaccagtcaccacatcgccaataccattatcgaacatcgccatgatgaagcttggctgcgccagcacatccacaatgacgcgcattacgacagcctgatagcggttattcgtgaaaaggaagaaacactgaaacaacgcgtgatccgcgcgctggcgggtttttcgggttacgggcgggtgatggttgtcggtggcggggcggagattgtggcacccgctatccgcgaagcctgcggagttaatgcgactttcatcgcggacggggtgccacagtttgctctggttaatgggctgtacgcaatggacaaggagtaa

SEQ ID NO: 373160 - DNA, 312 bp, Salmonella enterica
atgacgacaccaaccagacggataagtttctatctgaagcccgccgccgtcaagaacgaaggcgaagcatgcgcctggctggacagccttacaccagaagcccgcaaaagtggtcaacgtgtggcttttctggccggactggcacttatgaaaattaatccggcagaggcttaccgactggctgcatgggctgacgatgaagcgttatccctgacacaaaccaggacagaacgccccgtgtcacagccagcaccaaccgcacagataaccagtcagatggccggaaatatccgggcgttatttcccgaataa

SEQ ID NO: 373161 - DNA, 333 bp, Salmonella enterica
atgcaacacattgacagagaaaaagcgcagcgactgattgagcggatggaagcgctggcgcaagaagaaaatgtcaacatccaaaaaatagctgaatgtggccagatagttcttcgtcgtgaaaaagacctcaaacaactgatgtctggcaaaaccagcaaaacatgggattcaggcgaggaaatgatttattgcagcttctgcaataaatcccagtacgaagtcacaaaggtgattgctggaccgtctgtttacatctgcaatgagtgcgtggatttgtgcaatgaaattatcaggagagaagtggcagacaaaaagggaaaaaacacatga

SEQ ID NO: 373162 - DNA, 315 bp, Salmonella enterica
atgaacagaaaacaaaaacaagagttgaaatactttttacgtaaagaaattgccaggcttgaagatgcagaatcacgatcatcagaaattccgttcggaatggatatcaacgacgcccgtatgctccaggcataccgtatagctcaggctgcactacaggcaaaaccgtcagatggactggttagagcagtacgtttctatgaactggtaaagcgtgagaatccgccaaccgaaaccggagcatggaaagacgctgttgactgggtgctcagagaagcttgccagactgtaaacattggtatcaaaggagagtga

SEQ ID NO: 373163 - DNA, 492 bp, Salmonella enterica
gtgcagatttcaccggttactcttcgtgttgcgaaggcatttatatccagacatcaccgacacaataaacccccggtggggcataaattcagcattggtctgagaaatgatgccggagaattgataggtgtggcgacagccggtcgacctgttgcacgacatttggacgatggattaacgcttgaagtaaatcgcacatgtaccacaggagaacgcaacgctaacagcgcgctttatggtgctgtctggcgggcagcaaaagctatgggttatcaacgttgtattacgtacacccgggcagatgaatcaggagcatctcttcgcgcagctggttttgttcgtgtgaaagagcttcctccaagaaaaagctgggcggaatcaagcgtcgccctgcggagtaaacgcgatccggtcggaaacggtggtgttcctcgtgtgctctgggaaatcaggagaatgagtaccactggcattcgcatcaaaggagagtga

SEQ ID NO: 373164 - DNA, 264 bp, Salmonella enterica
atggcaactttaacaaaaaaagaacgggcatggttgaatgaattacaggacgttcttgatcgctgcccatcaccgaaaaaaattggtttttacaccattggcgataaaagcatttacctgtatgacctgcgccgcatggatgaaatcatggaggctcttgataatcgttcgtcaatggattggtgtgttgctgttcatgatatgaatgcagggtttgatgaaaagattttgttcccctcatcagttgaaagcacagcaggataa

SEQ ID NO: 373165 - DNA, 261 bp, Salmonella enterica
atgacaactttcaccgacaaagaactgattaaagaaatcaaagagcgcataggcagcctggacgttcgagacaatattgagcgccgtgcttatgaaattgcactggcatcactggaagcagagccagtagcatggatgcatgtaaataacggcatcggaataccagcaataacaaggagtaaagaggttgcagagagttggttatcaaaaggctggtatgtccaacccttgcatctagcccagcctgcatcaaagctatag

SEQ ID NO: 373166 - DNA, 1047 bp, Salmonella enterica
atgagcagaaaaaataaaaaagtgcgcatgagttcacgcattgatctcgctgatgcgctcaggaaagaatcatcgctcagtgcattcacatttgatggtccttatcgcctgaccgggcatgacctgctggacaatatgtactgtgctgataacgggcggtggtatgaaaccccggtggactggtacggtctggcaagagctgcccggcaaacgtcctggcatcagtctgcgctttactttaagcgcaatgtattgctcggctgctatattccgcacccgctgctttcccggcaggatttctcggcgctggcgctggactggtttgtgttcggtaacgcattccttgagcttcggagcaatatgctcggcgaaccgcttaaattacggcacgcactggcgaaatacatgcgacgcggaagcgatcttgaatcatggtggtatgtgcaggatggcaaggatgcgtttcagtttcgcccaggcaaagtgtgtcacctgatgaatccggatattaatcaggaaatctacggcatgccggaatatctcggcgcattactctcggccagcctgtctcattcggcggacatgttcagaaaactgtactacgacaacggatcccacgccgggtgcatcatctacatcggtgcagcgcaggtaaaccgcgaaagcatggactccctgaaagaaacgctacagggtgcgcgtggtggtggtgcgtttaaaaacgtgctcattcatgcgcccaacgggggcaaagagggggtgcaaattttgccgttccagcagatcaccgcaaaggatgagttcatgaatgttaaggcggcatcccgtgatgatgtgctggctgcgcaccgcgttccgccgcaactgatgggggcgatgccgggtgaaaaaagtgcgtttggtgatgtggagaaggccgcgcgggtttacgcaattaacgagctgatgcccgtcatggaggccatgaagcacatcaatgactggcttggcgaagaggtgatccgctttaacccttacgcactgttagacatccagcccacatcctga

SEQ ID NO: 373167 - DNA, 1752 bp, Salmonella enterica
atgattcaggacgcttttgtgcgccagcgtgcgcggcaactttactggcagggttatccgcccgcagaaatatcacgtctgatgggaataaacccgaacacgatttatgcgtggaaaaaacgcgaccagtgggatgaaacgccacccgtgcagcgtgtcacgcagtccatcgatgcgcgcctcatccagcttactgaaaaacagaataaaacaggcggtgacttcaaggaaatagacctgctgacccggcagcttaaaaagctgcatgatggccagccggatgtgatggttgcaggaaagaaaggccgggcgaaaaaactcaaaaatcatttcacgccggaacagattgccgcactgcgggaaaaaatcatcagcaggctggagtggcatcagcggggctggtttgactccctgaccctttgcagggaagccgggatacgtaacaggatgatcctgaaatcccgacagattggggcgacatggtattttgcgcaggaagcactgctgatggcgctgcgtgacgatgtggcgcagccttaccagcgtaaccagatttttttgtctgcgtcgcgtcgtcaggcgttccagtttaaaagcattattcagaaggccgcggctgaagttgatgtggagctgaaagggggcgataaaatcatcctctccaacggcgcagagctgcattttctcggcacttctgctgcgtcggcacagtcctatacgggcaatttttattttgatgaatttttctgggtcagtcgctttgctgaactgcgcaaggtggctggcgctatggcaaccctcagcggactgcggcgcacctacttctccacgccatccaccgaaacgcacgaggcatacgcctactggaacggcgaccgctggaacgagaaaaaggccacgcataaacgccagcgtttttctgtggactggaaaacgctgcataacgggcttatctgccctgaccggacgtggcggcaaattgtcacgctggaagatgtggttaatcacggctggaaacacaccgatattgatgaaattcgtgatgaaaacaccgaagacgagttcctcaatctctatatgtgtgagtttgtccgcgaaggggaatcggcatttaacctgaatatcctgattggctgcggtgttgacggatacgacgactggaaagactggaaaccttttgctccccgcccgatggggaatcgtccggtatggattgggtatgacgcaaacggcagcagtggcaacggcgacagcggcgctgtgtccgtggtggttcctccggctgttcctggtggccgttttcgaacggtggagacgcgacgcgttcaggggctggagtttgaagaacaggccagagtcattgaagagttcacgtatcgctacaacgtggaacacatcggcattgatgtgacgggcgggaacggggaggctgtttatcagatagtgaaacggtttttccctgctgccatcccgtacacattcacgctgtcatcaaaacggtcgctggtactgaaaatgctgcaaataatgcgcgccgggcggtgggaatacgatcgcgccgaacgcgagctggtcgcggcctttaacgccgtgcgtaaggtgaaaacaccgggcggctttatcacttacgaaacggaccgcgcgagggggatcagccacggcgaccttgcgtgggcaaccatgcttgctgtcattaacgaaccgattggcggcgaaggagaaaacgagcgtttcacggttatggagttctga

SEQ ID NO: 373168 - DNA, 837 bp, Salmonella enterica
atggctaatgaaaaaaagacatcccgcaaaaagtttcgcgtggctgtctccggatcaactgttgatggccgcgaaatcagcccggtacatctgcgtgaagccgccgagaacttcaacccggatgtttacgctgcccgcgtgaacgttgagcactatctctcgccatgcccgtcaagcgaattttccgcaatgggcgatgtcaccgcgctgagtacggaagatattacggaaggcccgctggccggacgtactgcgctgtatgcagaaatcgaaccgaccgagcgcatgaagcagcttgtcgctgacggcaagaaaatctattccagtatcgaactgcacccgcagttctccgttaacgggcgcgcctatctggtcgggctggcgatgaccgacaccccggcaagcctgggcactgagcgcctgaaattcacggcacagcaacgtcaggcggtgatgacgttcaacagtatccagggtgaagcaccgcttatctccgaagccatcgagtctgaaatcatcgaaatggcagaacaacgccaggaagaaggcacccagtggtttaaccgcgtaatggggattattggtcgtggccgcaaagcggatgacgccagtttctcccgtattcaggaagcggtggaaggcgtcgcaacgtcacaggccgacattatcgaccgttttaatgtgctggaaacccgccatcagcaggaccgccagaaaatcacgtcactgaccacagagctgacagcactgaaggaaaaactgcgcacgcaggacggcgatccgcagaaccgcttcaccgcaacgggcgcagcctccgaccagctggctgacttctga

SEQ ID NO: 373169 - DNA, 1053 bp, Salmonella enterica
atgaatctggtgatgtcagatattacccgcaacaagctgggttgctatatggcgcagcaggcgtcgcttaacaatatcccggtatctgcactggtatcgcgatttaccgtggaacccgcggtgcagcagcgttttgaaaacgcctcaaaggaaagtaccgaatttacgaaaagaattaacgtgatcggcgtgaccgaccagaaaggcgaaaaaatcctcctggacaccacaggaccaattgcgcgcacgaataccagttatgacggaacaaaacgccgtaacccgaataacgtggttgatctgaaaaaccgcaaataccagtgcgaacaggtgaactacgacacgtttatttcgtatccgcagcttgatgcctggtcggcacacagcgattttcagtcccgcatcagcgcacagattgcccgacaggtggcgcttgaccgcatcatgatcggtttcaacggcacgtctcacgcagatgagtccaacttcagcactaacaaactgcttcaggacgttaacgtgggatggctggagcacatcagaaccgacgccagcgagcgcgtaatgaatgacgtgacgctgacctcccgcaacatggacaacaccgtggcgcacgcgggtaagtatgcgaacgctgatgcactggtacaggacgcacgctcatccctgctggatgaatggcacaaggaagctgacgacctcgtggtgattatggggcgcaacctgtttaactcgctgcgtctgcccgtgctgaacagcatcagcggccagaatcccaatgcggaattactcgccgggcagctcatcctgtcatcgcgcaccattggcgggctgggcgtgttccttgcgccgttcttcccggatgcaacgatgctgatcacctcgttcaacaacctgtcgatttactggcagaaaggttcaatgcgtcgtctgatgaaagacgaaccggaatacaaccgcatcgccacctaccagtccatcaatgacgcttatgtcgttgaagactatggcaagtgcgcgatggtcactggcctgaagttcgccgacagctaa

SEQ ID NO: 373170 - DNA, 801 bp, Salmonella enterica
atgattactcccgcacagcaacactggcagaacgtgatggcacagcgcgcaggccgggcgaatgaaggcgtggaccacgccgcgcgtaccgcgcatgaagaggtgctgtatcgtctgcgtctggcacaggcccggcttaagggcgtacaggccagaagcgcgaaagccgccatcaaaaaagagttgttgccggacttttccggctggattgagggaacgctggaggctgacggcggacagcaggatgaagtgattgccacgctgatggtgtgggcgattgactgcggcgatcttccgcttgcgctgcgtattggtgcgtatgtggtccgtcacaacctcatcatgccggataactttggccgtactgctgccacagtgctgaccgaagaaatctgcaacccggtactgacgcaggccgggacggatgccgacgcggatttgtccgcctttatcgaaccactggacacactttgggaaattgtcgccaaccaggatatgccggacgaagtacgcgccaaattatgcaaggcgtgcgcctttgcccgccgtggcctgagtgatgcggacagcatggccttatcactgaagctgctgcgcgaagcaatgcacctgaacccgaatgcaggtgtgaaacgcgagattgcaaccctttcccgcgccctgaaaaaagccgattccgcagccgcaccagaagacgccagcgcaccgcaggcgcagaacgaaagcagcaaagataaaaagacaacgcggaagcctgcaacacgaaaaaccaccgcgacgcagaaggcgaagcgcggttaa

SEQ ID NO: 373171 - DNA, 495 bp, Salmonella enterica
atgagtatggttgccagaaccaaccccggacccgcagaggacgacatcaccgataccgatgatggtgatacccgtatttcagcgggtgcattctggccggatattgtgctgcgtgagctgcgtctggcggtacgactgccgggacgtgtgaccacctcccgcctgctgcataccgccaccggggctgtggcacacgttacccgcgagctggaagcatggcagcaggaacagcaggcggctggacatcagacgctggccgatgttccggcacccgtaattaacggagaaagcgtcaatctctggcactggcgcaatgctgtttataccgccacacgcgccctgattctggagcgttaccgcgatgcggacacaacggacaagggcgagcgccgggcggacgcactggatatacagacatcggatttgtggcgcgatgtgagctgggccatctctgacattctgcgccgcccgcgaatctttgcggagttgtgctga

SEQ ID NO: 373172 - DNA, 201 bp, Salmonella enterica; identical to SEQ ID NO: 35696

SEQ ID NO: 373173 - DNA, 324 bp, Salmonella enterica
gtgagcaccattcaaacagggatcacagagcaggttattgcatggctctttgaccacctgccaacggtgtatgcagtaggcgcggcggtcagcatttccgcgctgatgagtctttatgacggacgaacactggttcagaccgtaacgggatcgctggcgtgcggcgttcttgccatggccgtggccgggtcgttgcgcttcttcggttttcctgaagatgccgtgacgtttatcggcgcatcaatcggttttatgggggcagagaaagcacgcgacaaggttattgcggcctttaatcgcagggtgaaggagaaggacgaatga

SEQ ID NO: 373174 - DNA, 393 bp, Salmonella enterica
atgagcaacacatttaaattcagcagccggagcgaaaagaatttgcagggcgtaaatcctgatctggtgaaagtgacccgacgggcactggaaatctcggaagtggattttggtatcaccgaagggttgcgcagccgttaccgccagaagcaacttgtggccacgggtaagagccagaccatgaacagccgccaccttacggggcatgccgtggatgttgtggcttatatcggcagccaggtgtcatgggaatggccgctgtacgaaaaaatcgcagcagcattcagacaggccagccgggaactgaatattccggtggaatggggcggcgactggaagaccctgaaagacggaccgcattttcagttaccacacggagcctatccggcatga

SEQ ID NO: 373175 - DNA, 408 bp, Salmonella enterica
atgaagctctggcccacgctgggcgtcgctttccttctgattgccgcatggggaacatccatgcgtctgtcgtggtcgctgggccgggagaacgccagaaacgaagcgcaggccagcgccctgaaaagtaccgtcgacaccctgaatatcatcagcaccggggtacaggatatgcagcaggtgctggcgcaactccgcgtggaaaatcaacaacgaaatcaggacggagaggccagacgtgaacagctacgcaacgatattgcaaaagatgaatgcgcccacgctttgcctgacgctcgttttactgacaggttgcgcaggcacgcagaacgcgccactgccagcgccgtcagtccggcttataccgcagacgctgaccataccggtaacgcctccccccttccctga

SEQ ID NO: 373176 - DNA, 468 bp, Salmonella enterica
atgctgaaaactgattccctgcgtgaagccatgacccgttcatgccgatggtgtcaggctaacccggaaaaattcaccattttcgtggagagcggcaacattgaaacgaccggagaaacgccctcgtttgtttaccgctatcagatggtgatgtttgtcatggattacgcaggagagctggacgacctcacgctaccgctgctggcgtggttatccgaaaatcagccacagttgttgctcaatccggagcgtaatcaggacatcaaattttccgccgttatcaatgacgatgacagcgccgatctcctgtttacgctccccctgcgggaacgcgttcgcatcacgcgcaacagtcagggcacaccgcaggcagaacacctgccggagccaaaaccccgtctgccctcttccgaaggcgactggtcgcatgtattccaggatgtgacgtggggtgaaagcgatggataa

SEQ ID NO: 373177 - DNA, 645 bp, Salmonella enterica
gtgaaagcgatggataaggcattcacccgcgtggatgaaacctttgaggccatccgcgacagcctgaatcagcaggccatcaataacatcgccagaaagctggcacaggatttacgccgcgcccagcaggcgcgtatccggtcacagaaagcgccggacgggaccgcgtggacaccacgcagacgccgcgtaacccggatacaggaacgcattcgctttatctggaataacgaagcacgcacgctgaaaaactggcatcacgacacggggaaatacgggcgaaccattaccgggtgggatgaggataaaaacaatatccgcacgttttaccgggatgacatcgaccgctttctggaaatacgcacccggcgcatcaaccaggacagcacaaagcgcgtccccatgttcgtaaaactgcgcaccgcccgctacctgaaagcccgtgcagatgcttccggtgtgacggtgggttacagcggcgtggccgcacgtattgcccgcgttcatcagttcggtgagcgcgatcaggttgcgccgggcattttcaccgattacccggtacgtgagctgctgggtatcagccaggcagatgagcacctgatttataacacggtgctgggccggattgcggaggctgtacggtga

SEQ ID NO: 373178 - DNA, 582 bp, Salmonella enterica
gtgagcgcagaactcatgcgactgctgagcaatatcatccgcaccgggatcatctctgaagttgatgagaagtcctggcgcgtgcgcgttcgcagcggcgaactggaaacaggctggttgcgctggaacaccacgcgcgcgggagccttcaatgtgtggctgccgccatcaccaggcgaacaggtggtaattgcctgcattggcggcaacccggaaaccgccatgataattggcagcctgtggagtgatgccagtccggcacccggcaaaagcctgaaagaaatcgtgatcagcgcgccggacggcgcggtgttccgctacgacgcggacgcaggcgcactgagcgccagcggcatgaaaacggccactttacaggcatccgtcagcgtgaaactggatacgcccgtcgtggaatgcacaaaccttctgagaacggcgacgcttgacgtcacaaaaggaggaaagatgagcggcaatatcacgcacagcggcggcaacttcacctcaaacggcattaccgtgcatacgcataaacacggtggcgtgaaaggcggcagcgattcgacaggaggcccgcagtga

SEQ ID NO: 373179 - DNA, 351 bp, Salmonella enterica
gtgacaacccgctacacaggaatgaatccggacgggacgggaaacctgaacgatatggagcacctgaaacagtcagtcagggatatcctgaccaccccgctggcaagccgggttatgcgacgggaatatggcagccttgtgcctgatttgattgacgaacccatgaataacaccacgcgtctgcaatgcatgagtgctgccgtgattgcgctgacacgatgggaaccccgcattgccctggatgccatcgacgttgtctggaaggcaggaggccgcgccggggtgacgctgtcgggcactgtcatgcagaccatgcagaatgttgaattaaccatcacgctgagagagtaa

SEQ ID NO: 373180 - DNA, 897 bp, Salmonella enterica
atgcctgctgttgacctttcccagttaccggaacccgccatcatcgcggagcctgattttgaagcaattctggctgacacaaaggccatgatgattgcgtcctatcctgccgaacagcgtgaagccgtctccgccgcgctggagctggaatcagaacccctgaacgttatcgctcaaaccatgtcgtttcgtgaaatgctgttacgccagcgggttaacgagggcgcacgcgcctgcatgttaagccacggttcagggacaaacctggacaacctcgcgggcaatatgaacacaaagcgcctggttatcactccggcaacggataccaccgacgcggtgatggagagcgacacctcgctgagactgcgggcgcagcgggcgtacgacggcctgagtgttgctggcccgtcaggtgcatacgagtattttgcccgcagcgccagcggtctggtgcgtgatgcgcgggctatcagtccgtctccggcaaatgtgacggtttccatcctgtccactgaaggcgacggcacggcaacggaggcgttgcttaataccgttcgcgccgttctgaatgcagaggatacccgcccggtggccgaccgcctgaccgtacagagcgccagcatcgtgacatggcggctgaatgcaaaactgtacttttaccccggtccggaatccgaacctattctggccgcggcggaatcgtcattcaggaagtggctggctgaacaggggcttatcggtcaggacgtggcgttgtccgccattgctgccgcactgcatgtgcacggtgtgcaacgcgtggagataatcgaacccacacagaatatgtccatcagcgacatacaggcggcgcgctgtgagtcattcaccatcagcgaaggtgggcgtaatgagtaa

SEQ ID NO: 373181 - DNA, 531 bp, Salmonella enterica
atgagtaattcactgttaccgccatcagccagcaatttcatgcgttgtgccgaagctgtcggaacgcgcattacagacatcccggtagacctcaacacgctgtggtcgccggacacctgcccggtgcacctgctgccttatctcgcctgggcattttccgttgaccgctgggatcgcaactggccggaagagacaaagcgacaggtgattcgtgatgcatggctgatacaccgacacaaagggaccatcagcgcactgcgcagggccattgagccgctgggatacctcattcgcgtgtctgagtggtgggagttcggcggagaaccgggaacatttaccgttgaagtcggcacgctggacagtggcgtgacggaggaaatgtatctggaaatggagcggttgattgctgatgcccgcccggtcagccgccacatgacagggctgaatatcattcaggagatcccgggggatattttcgcggcggcagcaacttacgacggtgaagtcattaccatttatccggacgattaa

SEQ ID NO: 373182 - DNA, 1986 bp, Salmonella enterica
atgagtaccacaacacgaaaatttaaaaccattatcactgatactggtgccaaaaaattagctcaggctgccgcgccagatggtaatcctgtccgcctgactcatatggccgtgggcgacggtggcggcacgttgcccacaccagacagtaagcagacccgtctggtgcatgaggtgtggcgacatactgttaatcgcgtcatcctggacgcaacacatcagaaccgcattattgcagagctggttattcctcctgaaacgggcggattctggatccgggaaattggtgtatttgatgagcacggcgatttgatcgcggtgggcaatactgccgaaagttacaaaccaaccgttgccgaaggatccggacgtgcacaaacatttcgcaccattctgaccgtatccagcactgccaccgtggcgcttaccgtggataacaccatggttatggccacagtggattacgtggatgacaaactgaaagagcatgaacagtcacgacgtcacccggacgcctcgctgaccgcaaaaggctttgttcaactcagtagcgccaccaacagcacgtctgaagcactggccgcaacgccgaaagcggtcaaggcagcctatgaccttgctaacgggaaatataccgcacaggacgccactacagcgcgaaaaggtcttgtccagctcagtagtgccaccaacagcacgtctgaaacactcgccgcaacaccaaaagcggtaaaggccgcgtatgatcttgctaacgcaaaatataccgctcaggacgccacgacggcacaaaaagggattgtccagctcagtagtgccaccaacagcacgtctgaaacactggccgcgacatcgaaagcggttaaggcggtaatggatgaaacaaataagaaagccccattaaacagcccggcgctgaccggaacgccaacaacaccaactgcgcgacagggaacgaataatacccaaatcgcaagcacggctttcgttatggctgcgattgccgcccttgtagattcgtcacctgatgcactgaacacgctgaacgagctggctgcggcgctgggcaacgacccgaattttgcgaccaccatgactaacgcgcttgcgggtaagcaaccgaaagatgccaccctgacggcgctggccgggcttgctactgcggcagacaggtttccgtattttacggggaatgatgtcgccagcctggcaactctgacaaaagtcgggcgggatattcttgcgaaatcgaccgttgccgccgttatcgaatacctcggtttacgagaactcggcacaagcggggagaaaataccgttactcagtacagcgaatacctggaccaatcgacaaacattcagcggtggcctttctggggaactgtccggcaatgccgctactgcaacaaagctgaaaacagcacgaaaaattgctggagttggttttgatggttctagcgatatttcaattagtgccaaaaatgtcaatgcatttgcactccgacaaacaggtaatactgttaatggtgatacatccgttggatggaattgggatagtggtgcatataacgccctgattggtggtgcatctgcattaattcttcactttaatataaatgctggtagctgtcctgccgtacaattccgtgtgaattataaaaatggtggcatttcctacaggtcggctcgtgatggttatgggtttgaattaggttggtcagatttctataccacgacacgaaaaccttcagcgggagatgttggtgcatatacgcgggcagaatgtaactcaaggtttattacaggtattcgccttggcggtctgtcatctgttcagacatggaatggtcccggctggtctgacaggtcaggttatgtcgttacgggttcagttaacggaaaccgtgatgaattaattgatacaacacaggcaaggccaattcagtattgcattaatgggacgtggtataacgcggggagtatttaa

SEQ ID NO: 373183 - DNA, 534 bp, Salmonella enterica
atgatgcacttaaaaaacattactgctggcaaccctaaaacaaaagagcaataccagctaacaaagcaatttaacatcaaatggctttattcagatgatggaaaaaactggtatgaggaacaaaagaatttccagccagacactttgaaaatggtctatgaccataacggcgttattatttgtattgaaaaggatgtttcagcaattaatccggaaggcgcaagcgtcgttgaattacctgatattacagcaaatcgccgggctgatatttcggggaaatggttgttcaaagatggcgtagtgataaagcgaacttataccgaggaagagcagaggcaacaagcggaaaatgaaaagcaaagcctgttgcaacttgtcagggataaaacccagctatgggactcacagctacggctgggtatcatttccaacgagaataaacaaaaattaaccgagtggatgctctatgcgcagaaggtcgaatccacagacacctccagcctgccagtaacgtttccagaacaaccagaatga

SEQ ID NO: 373184 - DNA, 528 bp, Salmonella enterica
atgcagcatttaaaaaatattaagtcaggaaatccaaaaacaaaagagcaatatcagctaacaaagaattttgatgttatctggttgtggtcagaagatgggaaaaactggtacgaggaattaaagaactttcaggaagacacaataaaaattctttatgacgagaataatattattgtcgccatcaccaaagatgcctccacgcttaaccctgaaggctatagcgtcgttgaagttcctgatattacagctaatcgccgtgccgatgattcaggtaagtggatgtttaaggacggggctgtagttaagcggatttatacggcagacgaacagcaacaacaggccagatcacaaaaggccgcattactttccgaagctgaatcagttatccagccactggaacgcgctgtcaggctgaacatggcgacggatgaggaacgcgcacgactggagtcatgggaacgctacagcgttctggtcagccgtgtggatacggcaaatcctgaatggccacaaaagcctgaataa

SEQ ID NO: 373185 - DNA, 837 bp, Salmonella enterica
gtgcaaaagaatggcgataccttgtccggtgggcttacttttgaaaacgactcaatccttgcctggattagaaatactgactgggcaaagattggttttaaaaatgatgccgacagcgatactgattcatacatgtggtttgaaacaggcgacaacggcaatgaatatttcaaatggagaagccgccagagcaccacaacaaaagacctgatgacgctgaaatgggatgcactaaatattctggtaaatgccgtcattaatggcagtcttggagttggtacgacgaatgcgttaggtggtagctctattgttcttggtgataatgacaccggattcaaacagaatggtgatggtattctggatgtttacgctaatagtcagcgagtattccgctttcagaatggagttgctattgcttttaaaaacattcaggcaggtgatagtaaaaagttctcgctatccagctccaacacctccacaaagaatgcaacgtttaatttatggggtgcttcaacccgtccagtagttgcagagttaggcgatgaggcaggatggcatttctatagccagcgaaatacagataactcggtaatattttctgttaacggtcagatacagcccagcaactgggggaattttgattcacgctatgtaaaagatgttcgcctgggtacgcgtgttgttcaattgatggcgcgtggtggtcgttatgaaaaagccgggcacgcaattaccggattaagaatcattggtgaagtagatggcgatgatgaagccatcttcagaccaatacaaaaatacatcaatggcacatggtataacgtagcacaggtgtaa

SEQ ID NO: 373186 - DNA, 600 bp, Salmonella enterica; identical to SEQ ID NO: 7428

SEQ ID NO: 373187 - DNA, 489 bp, Salmonella enterica
atgatgatgatctacggcatgtttgtttttgagctgcgcacgctgccgcatcagcagttacagcaaaacaaaagctggcggcatgtgaaaaatgaacgcgttaaccgttcagcaagctggcagtatataggtgcaggtgatgatcgcatcgttctttctggtgtgctttatcctgaaattacaggtggcgaagtgtcgctgtcgctgctgaccacgcaggcgtatacaggacgaccctggcctttgattgatggcgtcgggcagatttacggcatgtatgtcctgactgaaacgaatacgacccgctccgagtttgatcgctacggtaaggcgaaaaagatagaattttcactgacccttgaacgctgtgatgaggatttgcgggagcgcctgcaatcctcatcgttcagtgatatgctgtccggcttcaaagataaggtgacatcatctcttaacagcgcggccagttcagttaaagggctgttctga

SEQ ID NO: 373188 - DNA, 2808 bp, Salmonella enterica
atgaagactcttgatatccgggtcgctttcagcgccgttgacaggctgacccggcctgccgaaaacgcccgccgcctgatggggcagtttggtgactccatccagcgaacgcagggggcgatcaaaaatctcgagcgtcaggcgcgttcatttgagcgcgcccgtgacgctgtcagtaaagcggatgcgggcatcgtgaaagcacgacgccagcttaacgcccttaatcagttacaacgcacgggtacagtgctcagcgaaaaacaacaaaagctgatgcagcagttaagcacccggcttgaacgcctgaatgaatcgcgcacacgggaaattcagaaaatgcgggagcttggcggagaactgaaacgccacggcatttccctgacaggcagcgataacaccattcagcaggccatcagacgcaccgaacaatacaacaaccagcttgaacgcgaacggcaggcgcttgcgcgtgtaacgcaggcgcgtgagcggtattcgcgcgcgcaggaaacagcgggaaaactgaaaacaggtggtgcgctggcaattggtgcggcagcggcgggcggctatgctgccgggcgttttttgcagcctgcgatcgggttcggcaaagagatgtcccgcgttcaggcgctgacgcgaatcgaccagaacagcccacagtttaaggcgctgcgtgagcaggcgttaaaacttggctctgaaacgcagttcaccgctggagatgccgccagtggacaggcatttcttgcaatggcgggctttacaccgcaggccattcaggctgcgcttccgggcgtgcttagcatggcaacggctggcggcatggatctcggcgagacggcggatattggctcaaatatcctgacgcagttcggcctttctgctgaccagatggaccgggttggcgacacgcttaccgcagcgtttacccgtaccaacactgaccttcgcgcactgggcgaaaccatgaaatatgcaggtccggtggcgggtaagctgggaatatcgctggagcaggccgcagcgatggcgggcgtgctggcgaatatgggtatcagagggagtgatgccgggacggcaatgcgtgccagcctggctcgtctggcatcaccgccaaaggcggcggcagaagctctgaaagagctgggcgtgtccgtctcggatgccgggggcaaaatgcgcccgatggaggatgtgctggccgacctttataaagccacccgcaaatacggggaagttgaccgggtatcgttctttaaggacattgccggagaagaggctttcacatcgtttatggcgctcgttgatgcagcgggtgacggttccttacccaaactgagaaaagaacttgaaggcgcgcgcggtgaggctgaacgcacagcaaaggttatggccaacaaccttgacggcgatctgaaatcactcagcagtgcatgggaagggttgcgcatccgcatcgcagatctgattgacggtccgctgcgttctgtcacgcagtggctcacgcgtgtggtatcaaaggtgacggcgctggcgcaggcccatcccgcactgacgcgccagctactgattgcaggcggtgcactgctggcaatgactgcaacggttggctcgttgtcgctggctattggtgtgcttgctggcccgctggcaaaactgcgtcttggtttttccctcctgaccggatcaatgaatgctgtcagggttctgccagcactatggggaatggtgacgggttccgtttctttactgggaggcgctatcggggcgttgttcagtccggttggtcttatcgtggctgcgcttgccggagctgccgttcttatctggaaatactgggatcccatcagggcattttttgccggggtgttcagcgggattatggaaaggctgaccccgttgcgcgaaacctttgaacggtttggtcctgtttttgacgcaatcgggagtgggatcagccaggtgtttaactggtttaaatcgctgctgtcaccgatggagtccagcaaggaaactctggataaatgtaccagtgctggcgagatattcggtaacgttcttggcggtgcgttacaacttgttctgacacctgcaaaaatgttgctggatacgctggcgtggatacttgaaaagcttggtgtgcttccggatgaagcggaaagggcgcgcaagaaaatcgaagacgcacagcgtgcggccattcttcaggacaaggttgccttgcttcagggggacctggcgaaaatcaatccgccgaagcctgtggaaaatggcaatggcaccggaggtgataaccccaaagacaataaaccgctcacagacagcaataccggtacgctgcgcagactcagcaaaattgctgataacacaggtaagctggttgaggagacgaaaaaacgcattggccccggcgatattgtctttaaaaacctgccccgagcacttgctgttcgtggggagtggcaggagcggaagattgcgcaggtcagtaagcctgcccccgcaattaatatcacacccgtggtcccggctccgctgcctccggcgctggtccctgttgttgcggccagctcccgcccggtggcggaggctatacgatctccagtggcatcagttcctgtaacttcccgtaaccgggagcctgttgcctccggatttggtggtgaaattcatgttcatctgcataacgttgttacgcagaatccccgcgaactggcgaaactggtcggtgaaatggtcagggcagaagtggaacggcgcgcccgtgccgggcgtggcagtttttacgataaagattga

SEQ ID NO: 373189 - DNA, 375 bp, Salmonella enterica
atgaaagacatcgatactgaaacccggaatgacaccgtggcggatgatgtgacggcaggtgaggatatggctgtcgaacgtggcgtaaaactgacccgaccaattgagcgtggtggcgaaaaaatcacgtatgtggagatcaccggggctattgaacaggctggatccctgcgtggtctgtcgctgtctgatgtgctgaatctgaaagcggataccatgttcacgctgttgcctcgcgtgacctcgccacgactggatgaagtgatgattaaaaaaatgtcgtcacgcgattttattcagttgtgcgctgtggctgtaaattttatgagcgagccagactctggcgcgaagagcgtgcaggagacggcagcgtaa

SEQ ID NO: 373190 - DNA, 513 bp, Salmonella enterica
atggctgtaccaaaacatcttcgcttttttacgttgtttgtggatggtgaaaacgaagtgggtaaagtgacatccgtcacgccgcccaaactgacgcgcaaaaccgacagctatcgtggtggtggcatgatgggggcggtaagtattgatctcggtctggacgactccgcgcttgatgcgagttttgttatggggggagctgttcgtgcgctgttccttaaatatggcggcacgattgacggcacgctgctgcgttttgcgggtgaatactacaccgatgcagaaagcgatctgtatgaaatcgagatgcgcggacgtgtgacggaaattgatatgggggaagccaaacagggcgaagccacatcacacacttacgctgtcaaaaacacctactacaagctgagcgttaacgatcgcccgctgtgggaaatcgacctgttgaaccacatctaccggaaggacggcaaggacattgttcctgaccgtatccgttccgcgcttgggcttggctga

SEQ ID NO: 373191 - DNA, 1185 bp, Salmonella enterica
atgagtgaaactcgttttcatggtgcccgtgttacggaaaataccgacctggtaacagcgattaacgatgttgattccagcgttatcggtatcgtggcaacggcggatgatgcggacgcgaagctgttcccgctgaacaagcccacactgctgacccgcgtcaatgacgtgctgggaaaatgcgggacaacggggacgctttatcgtgcgcttaaggccattgcagaccaggtgagcacaaaggtgatcgtcgttcgcgtggctgaacacaaagaagaagacggaaagacgcaggatcaactggttatcggtggttctgaatctgacggcagctatacggggatgtatgcgctgcttgttgcagagcaggatgaaagcatcggataccgtccgcgtattctggccgcgccggagctggacacggaggcggtaacaaaatccctgtgcgtgattgcgggtaaactgcgcgcgtttgtgtatgcctcatgtcacggctgtaacacgatggctgaggcgattacctaccgccagaaattcaacgaacgtgaggtgatgctcttatggccggacttcatcgcctacaacccgaaaagtggcaaaaacgaaacgttccccgcgcctgcctatgcgtgcggccttcgtgcgtacattgaccatgagcagggatggcacaaatcactgtccaacgttccggttaaaaatgtgctggggatgtcgaggcatgtgttctggtcgttgcaggccgaagacagcgatgccaacagcctcaacaacaaagaaatcacgaccattattcgtcgcaacgggttccgcttctggggcaaccgcacaccggaaacgaacgcctacatctttgaggtgtatacccgaaccgcacaggtgctggctgattcaattgcggaagcgcagtttgaaaccatcgacagtccactgacgcctgcgaacgtgaaggatgttatcagtgccatcagggcaaaactggattcgctggttactgccgggaaactgattggtgcggagtgctggtatgacgtggtggataacggcaccacgaatttacgtcagggacgtgtgcgtattcgctacaaatatacgcccgttccgccactggaagacatggagctttaccagacgtttactgatgaattctttggtcccgcatttgcggtgctgggaggtgcctga

SEQ ID NO: 373192 - DNA, 1110 bp, Salmonella enterica
atgaccgacaccaccatgcaattgctcagtcagggcacagaccccgtgaaaatgccggattttgatattctcgcggagggtaaaacgctgtcaggcgtggcagagcgcctgatgagcctgtcactgaccgacaaccggggatttgaggcggaccagctcaccatcacgctggatgatgcggatggtcagttgcagctaccgccacggggcgcgcgcctgacggttctcattggctggaaaggagaaccgctgacagaaaaaggcacttacattgttgatgaaatcgctcacgaaggaccgccggacaggctgactgtttcagccagaagcgcagattttcgggatgaatttaacgttaaacgtgaggtgtcctggcatgatgtgaccgttgagcgcgtggtatccgccatcgctcatcggtacggtctgaaaccgcaaatcagcgaaatgctgatggatatcgaaatcgaccacgccgaccagaccgaagaaagcgacatgtcctttcttacgcgcatggcggaaatgctgggcgcaatcaccacggtaaaaagcggtaatctgttattcattatgccaggcggtggcgtgaacgcacagggccagccgttgccctcgttcgccattacacgcagcagcggcgatcgccatcagttccgtattgctgaccgcgaggcgtatacgggggtacgcgcctactggcttgatcttaattacgggaaaaagaaaaaagtcagcgtgaaacgccgtaaaccgccaaaacccaaaaaggagaaaagcagcagccgtgaaggtgattatatggaaggcgcggaaggcaatgtgtttgtgttacgcaagacttatcagaacgagcaggcagcaagacgcgcagcggcggcaaagtggcagcaactacaacgcggagccgcatcattctccatcacgctggcgcgtggacgtgcagaactctatcccgaaatgcatggcacggtgacaggatttaaaagcgagattgataatcaggactggattattgcgaaagccgagcacaccattgataacagcggctttaccacgcagcttgagcttgaggcaaaaatcccggaatggatagcggaaacagactga

SEQ ID NO: 373193 - DNA, 261 bp, Salmonella enterica
atgttccgttgtccgctttgtggcgcatctgcccgtatccgcaccagtcgttcggaaaatgattcaaacaccgtacggaaaaaatattaccagtgtaacaacctggaatgcggcgtatgcttctcaacactggaagctttccataaattcacatcaaaacacgcctccggcgttcactcttcagaaggtatcccgtggcatgagctgccagcttcacacaggggaaacaatcagatgagtttgcctttatctcagaattaa

SEQ ID NO: 373194 - DNA, 141 bp, Salmonella enterica
atgtcgcaaaaatcgcttacggccatcacgttctgcgtgacggtaatcctcatcatctggatgctgcacggttcgctgtgtgaaatacggatgagcttttggggagcggagtttgcggcgttcttacagtgtaagcagtaa

SEQ ID NO: 373195 - DNA, 801 bp, Salmonella enterica
gtggggatcgcaatccagcaccaaccagcacatacaccggaacacactaaggtttatcagactgacaatgccacgctctgtcgtgggaatgcgctggaaataatgccgctgattgagccagaaagtattgatgccttaatcactgacccgccttacagttcgggcgcgacacacaaggccggacgcaccaaccagggcagccacgcaaaatatctgaacggcgagaaccttcatcgctttgatgggtttgcgggtgaaaacatggatgcccgttcgtgggcttactggacacaattatggatggcacaggcacaccgcgcagtcaggccgggcggttatgccctggtatttactgactggcgacaactgccagctttaaccgatgcgtttcaggccagtggctttacatggcgcggcatcattgcgtggaacaaggggagggggtcacgaacaccacataccgggtatttccggcatcagtgcgaatacattgtctggggcagcaaaggccatttagataaatcgccttcggggccgttcgacggctgcatgacgttcccggttatcccgtcaaagaaaatgcacccgaccggaaaaccagaagaactaatggcagagctggtcagaactgcgaatagtggcggaacagtccttgatccttttatggggtcaggaacaacgggtgtggccgcactgaaagcagggcgaaaatttattggtatagaaaccagtgatcattattttgaggtagcagcgcagcggcttcgggggactattaccacaaccatttcgactacataa

SEQ ID NO: 373196 - DNA, 2574 bp, Salmonella enterica
atgcgtctggatcgtcttactaacaaattccagcttgctcttgccgatgcccagtcgctcgcgctggggcacgacaaccaattcatcgaacctcttcatttaatgagcgccttgctgaaccaggaagggggatcgatacgtcctttattaacctccgccggcattaatgctggccagttgcgcaccgctatcgatcaggcgctgagccgtttaccgcaggtggaaggcaccggcggcgacgtacagccttcttcggaactggtacgcgtactgaacctttgcgacaagctggcgcaaaaacggggggacaattttatttcgtcagagctgtttgttctggcggcgcttgagtctcgcggcacgttaaccgatctgctgaaatcagccggtgcgaccacggccaatatcactcaggcaattgaacagatgcgcggaggtgaaagcgtgaacgatcaaggggctgaagaccaacgtcaggccttgaaaaaatataccgtcgatctgaccgagcgggctgaacaaggtaagcttgacccggtaattggtcgtgatgaagaaattcgccgtaccattcaggtattgcaacgtcgtactaaaaacaacccggtgttaatcggtgagccaggcgtaggtaaaaccgccattgttgaagggctggcgcagcgcattattaacggtgaagtccctgaaggcttaaaaggtcgccgcgtgctggcgctggatatgggcgcgctggtggccggggcgaaatatcgcggcgaatttgaagagcgtctgaaaggcgtgctgaacgatctggcgaaacaggaaggcaacgtcatcctgtttatcgacgagctgcacaccatggttggcgcaggtaaagctgatggcgccatggatgccggtaacatgctgaaaccggcgctggcgcgtggtgaactgcactgtgtgggcgccaccacgctggatgaataccgtcagtacattgaaaaagacgcggcgctggaacgtcgttttcaaaaagtgtttgtcgcagaaccttcagtggaagacaccattgctattctgcgtggcctgaaagaacgttacgagctgcaccaccatgtgcagatcactgacccggcgattgtggcggcggcaacattatctcaccgctatatcgccgaccgtcagttgccggataaagctatcgacctgatcgatgaagcggcatccagcattcgtatgcagattgactctaagccggaggagctggacaggctcgaccgccgtattattcagctcaaactggaacagcaggcgttgatgaaagagtctgacgaggcgagtaaaaaacgtctcgatatgctcaacgaagaactggacgataaagagcgtcagtactctgagctggaagaagagtggaaagcggaaaaagcatcgctttctgggacgcaaactattaaagcggagctggagcaggcgaagatcgccatcgagcaggcgcgtcgcgttggcgacctggcgcgaatgtctgaactgcagtacggcaaaattccggagctggaaaaacagctggaagccgcgacccagtcggaaggtaaaaccatgcgtctgttacgtaacaaagtaacggatgcggaaattgccgaagtgctagcgcgctggaccggtattccggtttccagaatgctggaaggcgaacgtgaaaaactgttgcgtatggaacaagagttacacagccgtgtgatcgggcagaatgaagccgttgaagcagtatcgaacgccatacgtcgtagccgcgcggggctgtccgatccgaaccgtccgattggttccttcctgttcctggggccgacgggggtcggtaaaaccgaactgtgtaaagcactggctaactttatgttcgacagcgacgacgcgatggtgcgtatcgacatgtctgagtttatggagaaacactccgtgtctcgtttggtcggggcgcctccgggatatgtcggctatgaagaaggcggttatttgacggaagcggtgcgccgtcgcccttattccgtcatcttgttggatgaagtggaaaaagcgcatccggatgtattcaacattctgttgcaggtgctggacgacggtcgactgactgacgggcaggggagaacggtcgacttccgtaatacggtggtcattatgacttctaacctcggttccgatctcattcaggaacgctttggcgaactggattacggtcgaatgaaagagatggtgctgggtgtggttagccaaaacttccgtccggaatttatcaaccgtattgatgaagttgtggtattccatccgttaggtgaacaacacatcgcttctattgctcagatccagctgcagcgtctgtacaaacgtctggaagaacgtggttatgaaatccatatctccgacgaggcgctgaaactgttgagcgccaacggttacgatccggtctacggggcgcgtccgttaaaacgtgctattcaacagcagatcgaaaacccactggcgcagcaaatcctgtctggtgaactggttcctggcaaagtgattcgccttgaagccaatgatgatcgtattgtggcagtgcagtaa

SEQ ID NO: 373197 - DNA, 882 bp, Salmonella enterica
atgcacagcagacttaatggcaatgaagtttttttacttgcaaaaacccttgctcctgaactgggtaaaaaagaacgagcaatcgctcgtttcattcatgataatccccagactttatcaaacatgtcaattaccgatattgcacattatcttaaagtaagtgtatcaagcattacaaaggtttcaaaaaaacttgggtttacagggtttcatgacttaaagctcagtatttctaaaaatattaacaacaatgaagatactgtagatattcctgtcattcctgattctgaaggattcatagagaaaattttcgaaagcacactcttgaattctatcctggcgttgcaagaggcgttaaatgttattgactgttctattatcaaatcagttgcctggctttttatccataaaaatgctgaagcaaaaatttttattgctggctgtggtggctcagcgtccatctgcgatgactttaaccataagctattgaagataggtattttttcaactgtattcagtgatagccataagcaactgatgtccgcatcccttatgcgccagggtgatattcttctcgcagtatcacactcaggacaaacttctgacattattcagatggttaatattgcaaatgaaagaggtgccgaaacaatttgcttaacgaactatcccaatagtcctcttagcctgatttgtcgtcattcgataatctctgcggtaaaaaataaccctatcaccggagagaacgccactacccgaattgtacacctaaatattcttgatgctatttttactattatcgccagtaaaacgagtgagataactaagaatagcttattaagcaccaggaacgcggtgatctccaaacgcactgtcagttaa

SEQ ID NO: 373198 - DNA, 921 bp, Salmonella enterica
atgaaaagagatgtagttgttattggaagtcttaattacgacattcttattcagcaagatcgtctgcctgaagtaggagaaacatttacgggtaatgaattgatgttaatgcctggtggtaaaggtgctaatcaagcggtacagtgctcaaaactgggattgaacgtgagtatggtggggtgtgtagggaacgacatttatggcgagcacctcattaatgccctacatgaaaataatgtctccgttgctaacgtattgaaacggggaaccaccacaggtatcggcatcgtacagatccttgagtccggtgattattgtagcaccattattaaaggagctaactatctgttaaacgaaaatgatattagcgataatttatttgatggaaaaccgctggtgattctgcaatcagaaataccttcacatatcgttgaatatgttattaaagtcgccagtatgtatcaatgcaaagttatacttaataatgcgccagccagaagtatagcgccatcaacattaagttctgttgattacctggtcgttaatgaaacagaagccagctttatggcaggtagtgaagtttcatcaattgatgacgctcattcttgtgccgctaagttacataaaatggttaggagtaatgtcattataacattaggggaaaaaggcgcggtattatcctcggatgagtcaaccatgcactttccagcggtcttttgccctgaagttattgatactacaggtgctggcgattcatttatcggcggcattgcctactgcctggttaataatatccctttaacaaaggccatcccttttgctgctgaaataagcatgtgctcaattcaaaagtatggtggacaaagctcttttccaatgcttgcggatgttgctcatgccttagactattccgacctgtaa

SEQ ID NO: 373199 - DNA, 1044 bp, Salmonella enterica
atgaaaattagagttttcatggccaccgtgttgctgctcatcagccactgtgtatttagcacaacgtcactaccgcatattgttattctcgcgacaggcggtactatcgccgggacggcagccaataatacgcaaaccgccggatataaatccggtgaacttggcgtgcaaacattaataaatgccgtgccggaaatgaataatatcgctcgcgttgacggcgagcaggtggcgaatattggtagcgaaaatatgaccagcgatatcatcctgaaactttcacagaaggtgaatgcgttattggcgcgggacgatgttgacggtgtggttattactcatggcactgacacgctcgatgaaaccgcctactttcttaatttgaccgtgaaaagcgacaaaccggtggtgtttaccgctgcaatgcggcccgcgtcggcaatcagcgccgatggcgcaatgaacctgctggaagcggtcacggtggctgctgacccgaatgcgaagggacgcggtgtaatggtcgttttaaacgatcgtattggttcggcgcgctttgtaacgaaaaccaatgccacgactctggatacctttaaagcgccggaagagggctatctgggggtcatcgttaatggtcagccacagttcgaaacgcgggtggaaaaaattcataccctgcgatctgtttttgacgtacgtaatatcaagaaattacccaatgtggtgattatttacggctatcaggacgacccggaatatatgtatgatgcggcgatcgcccatcacgcggacggtattatttatgccggaaccggcgcaggttcagtctcggtacgcagcgacgcggggattaaaaaagcggagaaggccgggattatcgtggtgcgtgcttcccgcaccggaaacggcgtagtaccgttggataaagggcagccagggctggtgtctgactcgctcaacccggcgaaggcgcgggtgttactgatgacggcattaactcagacgcgtaatccggaactgatccagagttatttcagtacgtattaa

SEQ ID NO: 373200 - DNA, 603 bp, Salmonella enterica
atgcaggtaatcatgtttgacaggcagtcaatatttattcatggaatgaaaatcagtttgcaacagcacattccaggaataagtatccagagtgtcggtcaggcagaagaactctggcaaaaaatagaaagcgcgccggatgcgctggtcatgcttgatagcggcctggatgctgaattttgccgcgaggtgttacaaagaatcgcgcagcaatttccggaggtgaagattattatcacggcgatggatggcagtcaaaagtggctgcatgaagtcatgcaatttaacgttcaggccgtggtgccacgcgattctgatgccgaaacctttgtccttgcgctcaatgctgtcgctcgcgggatgatgtttttaccgggggattggttaaattcaacggagctggagtcccgtgatataaaagcgttaagcgcccgccagcgggaaattttgcagatgcttgccgcaggagaatcaaataaacaaattgggcgggcgttaaatattagtaccgggacggttaaagcgcatctggagtcgctttaccggcggctggatgtaaaaaatcgtacccaggccgccatgatgttaaatgaatcgaattaa

SEQ ID NO: 373201 - DNA, 900 bp, Salmonella enterica
atggataaaatatatgcaatgaaattgtttgtacgcgtggcggaacgggaaagtttttcccgcgcagcagaggatatcggccttcccaaaggcagcgtctcacggcaaatacaagcgttagaacatcaactgggcatccgcctgctccaccgcaccacccggcgggtacagcttactcaggacggaatggtttactacgaacgggcaaaagatctgttgagtaacctggatgaactggagggtcttttccagcctgatcccgctagtatcagcggcaaaatacgggtagatataccgccatgtctcgcaaacagcctcatcatgccgcgcctgcccacttttttgcatcagtatcccggcattgcgctggaactttgtagtaacgatcgacaggtcgatttactacgggaagatttcgactgcgtggtgcgcacagagccgctacatgcgccagggatactgacgcgcccgcttggcaaactgagaagggtgaactgcgccagcccacaatacctggcgcgctttgggtatccagaaaaccttgacgacctcgcctcacatgcgatggtgcattattcattgacgccgggagtctcttcaccgggttttgcctttgaaactccccacggtatgcagtgggtaaaaaccggcggaatgctaacggtaaacagtacagagacctggcatacggcctgtctggcaggattagggatcattcagacgccgcgcattgctgtacgggaggcgttacgcgccggaacgctcattgaaattttaccgcaatatcgcgccgctccactgccggtgacgctgcattatccccatcgccgtaatctttcccgccgggtacacctgtttatggtatggctgactgaaaccattaaagaggccgcagagtag

SEQ ID NO: 373202 - DNA, 219 bp, Salmonella enterica
  misc_feature (177)..(186): n is a, c, g, or t
atgacgcaggaaaatgacgtaaaacgccctattcaggaactggagcacgacccgatacaaaaaatagaaacgcagccgcatgacgccccggaaaaaaacgaaaaggcaaatcaggcgttgcattccgtcaccaccctgatgcaaaaaatacagcgtcaaccaatggtggcccacctnnnnnnnnnnggcccacctcattcgcgcgaccgaacgttttaa

SEQ ID NO: 373203 - DNA, 2061 bp, Salmonella enterica
atgactaaagcaggcaaaataaccgccgccatcacagggactttcttgttgttgatcgccatagtgattttgttgatcgcaacatttgactggaaccgcctcaaaccgaccatcaaccagaaagtctctaccgaattgaaccggcctttcgctattcgcggcgatttaggcgtggtgtgggaacgccaaaaacaggagaccggctggcgaagctgggtaccgtggccgcatgttcacgcggaagacgtcattctcggcaatccgccggatattccggaagttacgatggtgcatctgccacgcgttgaggcgacgcttgccccgctggcgctcctgaccaaaaccgtctggctgccgtggatcaaactggtgaaacccgacgcgcgtcttattcgtctgtccgagaaaaccaataactggacctttaacctcacgcaagacaagaatacggaccccaatgctaaaccttccgcctggtccttccggctggataatattctcttcgaccaggggcgaatcgcgatcgatgataaggtcagtaaagcggatatcactattctggtcgatccgttaggcaaaccgttgccgttcagcgaagtgacgggaacgaaaggcaaagcagacaaatccaccgtgggcgactatgtcttcggcctgaaggcgcaggggcgttataacggggaaccgttgaccggtacggggaaaataggcggtatgctggcgctacgcagcgaaagtacgccttttcctgtgcaggccgatttccgctctggtaatacgcgggtggcttttagcggcgtggtgaacgaaccgatgaaaatgggcggcgtcgatctgcggcttaaattctctggcgattcactgggcgatttatatgatttaaccggcgtgctgctgccggatacgccgccgtttgagaccgatgggcgattggtggcgaaaattgacgccgaaaagtcatcagtatttgattatcgcggttttaacgggcgcattggcgacagtgatatccacggctccctcacttataccaccggtaaaccgcgccctaaactggaaggcgatgtcgaatcgcgccagttacgcctggccgatcttgggccgctgattggcgtggattccgggaaagacgctgagcagtcgaaacggtctgaacagcgcaaaggcgagaagaatgttcagccggcggataaagtgttgccttacgatcgctttgaaaccgacaaatgggacgttatggacgccgatgtccggtttaaaggccgacgtattgaacatggcggcagtctaccgattagcgatctttcgacccatatcatcctgaaaaacgccgacttacgtctacagccgctgaagtttggtctggcaggcggcagtattgtctccaacatccatctggaaggggataaaaagccaatgcaggggcgggcggatatacaggcgcgtcggctgaagcttaaagaactgatgccggatgtggagctgatgcagaaaacgctgggcgagctgaacggcgatgcggatattcgcgggacgggcaactcggtcgccgcgctgcttggcaacagtaacggcaatctcaaattattgatgaatgatggattgattagccgcaacctgatggaaatcgtggggctgaacgtcggcaactatattgtcgggcagatttttggcgatgacgaagtgcgggttaactgcgcggcggcgaatctcaatattgcgaacggcgtggcgcgaccgcaaatttttgcttttgatacagaaaatgcgttgattaacgtgaccggtacggcgagcttcgcctctgaacagctcgatttaaccattgatccggaaagtaaggggattcgtattattacgctgcgatcgccgctgtacgtgcgcgggacatttaaaaatccgcaggcgggcgtcaagcccggcccgctgattgcgcgcggcgcggttgcggcagcgctggcgacgttggtaacgcccgccgccgcgctattggcgctcatttcgccctctgaaggcgaagccaatcagtgccggacgattttaacgcagatgaagcagtaa

SEQ ID NO: 373204 - DNA, 399 bp, Salmonella enterica
atgttatttaccgacgcgctggataaataccagcagttgctggaaaaagaccgcatacttatcgtcagcggacaggtcagctttgatgacttcagcggggggcttaaaatgaccgcccgcgaagtgatggatattgacgaagctcgcgaaaaatacgctcgcgggcttgctatctcgctgacggacaggcaaattgatgaccagcttttaaaccgactccgtcagtctctggaaccccaccgctcggggaccattccagtacatctctactatcagagggcggatgcgcgtgcgcggctgcgttttggcgcaacgtggcgtgtctctccgagcgatcgtttacttaacgatctgcgtggcctcattggttcggagcaggtggaactggagtttgactaa

SEQ ID NO: 373205 - DNA, 897 bp, Salmonella enterica
atggatcaaaaacagattgaagaaattgtacgtagcgtgatggcgtcaatgggacaggacgtaccgcagcccgtcgcgccgtcaacgcaggaaggcgcaaagccgcagtgcgccgcgccgacggtgaccgaaagctgcgcgctggatttaggttccgcagaggcaaaagcctggattggcgtcgagaatccgcatcgtgcggacgtgctgaccgaactgcgtcgcagtactgcggcacgcgtctgtacgggtcgtgccgggccgcgtccgcgcacccaggcgctgttgcgcttcctggcggatcactcccgttcgaaagataccgtgctcaaagaagtgccggaagagtgggtaaaagcgcaagggctgctggaagtgcgttcggagatcagcgacaaaaacctgtacctgacgcgcccggatatggggcgtcgcctgagcccggaagccattgacgcgctgaagtcacagtgcgtgatgaacccggatgtgcaggtagtggtctccgatggcctctctacggatgcgatcaccgccaactatgaagagatcctgccgccgttgcttgtcggtctgaagcaggccgggctgaacgtcggcacgccgttctttgtgcgctatggccgcgtgaagattgaagatcagattggcgaaattctcggcgcgaaggtcgtcatcctgctggtgggcgaacgtccggggctggggcagtcggaaagcctctcctgctacgccgtctattccccgcgcgtggcgaccaccgtcgaggccgacagaacctgtatttcaaacattcatcagggggggacgccgccagtagaagccgccgccgtgattgtggatttggccaaacggatgctggagcagaaagcgtccggcatcaacatgacccgttaa

SEQ ID NO: 373206 - DNA, 1278 bp, Salmonella enterica
atggacgagcgtattccttgtaaaaacccgcaatgctcacatttcatcctgccagcaacggctgcccgcacggagggctattgcatgccctgcgtccaggcgcgctatcggcaagagcaggaagaatatatccggaaaaacagaaaaacgatcgacgcgttcagtggcattaccaaccctgttgaaatgcttaaactcgttcatgaaccccgggaacacgatccgttaatcgagtggattccctgccccattccgaccgatgagctttacaaaaagctctccgatgatgaaagccgcgacatggtcgattatgcagaagaattatttgattccggatggcaggaggaagctcaggaaattgcgctgtgcctggcggcatttacccaggccaatctggataatttcctgcgccaggtaataaatgaagaagaactggagctctcttcacccctaccttttcaccgtgcgccgcctgacgtacgcgacgcgcttttgcagaaggtggaaaccgatgacaaaaaccgtgacggcattctttgtgccctggcctggattggcgatgaggttgtcgttgagcattttaaccgctggcgccaggaaccacctgcgtggagtgcttcacttcatatcctccctcatcgctatgctcaccaggcgggatgggaactcactgaaaatggccgcaggcgtgatctttactttacgcaatgtacccatctggtaaaacaggcacctgaacagccggccgtttttcgcgccgtcgcagaatatggtgaaaactgcccacactgttccctgccgctaatcaatctgtttgaggttacgccgagcgccgtcggcctcagcacgcagggttggcccggtcaaattcgtattctgacctgtcagtgttgtacggcatataacaccgttttcgccaccgtcgatccacaaggccagccacgatggtgcgaaaaaaatgcgctctcgacgctggcggtggagaattcctctgactggataacgctaccgcttgatgttctgcaccccggggaatcccgtttgccgctattcgctgctgaaatatttttacccaccaccttctcacagctcggcggccatcccgcatgggttcaggatacagactatcccacgtgcccaacgtgcgcgcaaacgatgatgtttcttgcgcagctaagctatgaagatatcgaggaagaggaatatgcggaaggaatgctttacgggtttatctgcccctcctgccaaacaacggcaacgtcttatcagcaaacataa

SEQ ID NO: 373207 - DNA, 900 bp, Salmonella enterica
atgaaacccgatgcacatcacgtaaaacagtttctgctacgcctgcaggatgatatttgccaaacgttatccgctgtggatggcgcaaactttgtcgaagatagctggcgacgcgaagcgggcggcggcggacgcagccgggtattacgcaacggcgggattttcgaacaggcgggcgttaatttctctcacgttcacggcgatgcaatgcccgcgtccgccaccgcgcatcggccagaactcgccgggcgtagctttgaagcgatgggcgtatcgctggtggtgcatccgcacaatccgtatattcccaccagccatgctaacgtgcgcttttttattgccgaaaaaccgggcgccgatccggtatggtggtttggcggcgggttcgatttaacgccctactacggctttgaagaggatgccgttcactggcaccgcaccgcccgcgacctgtgccagccgtttggtgacgatgtgtatccgcgctataaaaagtggtgcgacgactactttttcctcaagcatcgtaacgagcagcgcggtatcggcggcctgttttttgacgatttgaatacgccggatttcgactactgcttcgcctttatgcaggcggtcggcaacggctacaccgaggcgtatttaccgattgtcgaacgacgcaaagcgatggtctggggagagcgggagcgtaattttcaactttatcgccgcggacgctacgtggagttcaatctggtgtgggacagaggcaccctgtttggtctgcaaaccggcgggcgcactgaatctatcctgatgtcgatgccgccgctggtgcgctgggagtacgactggcagccagaagcgggtagcccggaagcggcgctgagcgagtttattcaggtacgcgactggatttaa

SEQ ID NO: 373208 - DNA, 576 bp, Salmonella enterica
atgaaatcgctgcgtttgactttactcgcactgccgctggcggtgaccggctgctcgacgctctcctcggtcaactggtctgccgcaaatccatggaactggtttggttcctcgacagaagtcactgagcaaggcgtgggagcgctgaccgccgccacgccgctggaagagccggctattgcagaggcattagatggcgattatcgcctgcgtagcggtatgaaaaccgataacggcaacgtggtgcgctttttcgaagcgatgaagggcgacagtgtcgcgatggtgatcaacggcgagcagggaaccgtgagccgtattgatgtgctggacagcgatatcccaaccgccgcggggggcaaaatcggtacgccgtttagcgacctttacagcaaagcgtttggtcactgcgagccggtttccagcgatagccataccagcgtcgaatgtaaagccgagggaagtcagcatattagctatgttttctccggcgagtggagcggaccggaaggcttaatgcctcctgatgacgtcttaaaaaactgggacgtgcgcaaaattatctggcgtcgttaa

SEQ ID NO: 373209 - DNA, 153 bp, Salmonella enterica
atgggcattttcatgctgtttcatgctgttctgcctgatggcgctgcgcttatcaggcctaccaatcgtaggtcgaataaagcgtttgcgctgccatccgacagggttttaccttatagcgctaacaggcgatccaacgacggcgcaaaatag

SEQ ID NO: 373210 - DNA, 1098 bp, Salmonella enterica
atgagcattgagatcgccagaattaagaaatcgtttggtcgcactcaggtactgaatgatatctcgctggatattccttccggccagatggttgccttgttggggccgtcaggttccggtaaaacgacgctgctgcgcattattgccgggctggaacatcagtccagcggccatattcgtttccacggtacggacgttagccgcctgcacgcgcgtgagcgtaaagtcggttttgtgtttcagcactatgcgctgtttcgccatatgacggtgtttgacaacatcgcttttggcctgacggtgctgccgcggcgcgaccgcccaactgcggcggcgattaaaacgaaagtgacgcaattgctggagatggtgcaactggcgcacctcgcggatcgcttccccgcccagctttccggcggacaaaaacagcgcgtggcgctggcgcgcgcgcttgccgtggaaccgcaaatcctactgctggatgaaccgtttggcgcgctggatgcccaggtacgtaaagagttacgtcgctggttacgccagttacatgaagaactgaaattcaccagcgtctttgtcacccacgatcaggaagaagcgacggaagtggcggatcgggtggtggtgatgagtcagggcaatatcgaacaggctgatgcgccggatcgagtgtggcgtgaaccggcaacccgcttcgtactggagtttatgggcgaggtgaaccgcctgacaggcaccgtccgcggcgggcagtttcacgttggcgcgcatcgctggccgctgggttatacgcccgcgtaccaggggccggtcgatctgttcctgcgtccgtgggaggtggatattagccgccgcaccagcctggattctccgctaccagtacaggtcattgaggccagcccgaaaggtcactatacacagttagtggtacagccgctggggtggtatcacgatccgctgacggtggtgatggcgggtgacgacgtcccgcagcgcggcgagcgtttgtttgttggactgcaaaaagcgcgtctgtataacggcgaccagcgtattgaaacgcgtgaagaggaacttgctctggcgcaatcggcctga

SEQ ID NO: 373211 - DNA, 540 bp, Salmonella enterica
atgccaggcgtgttactgtggttttttaaaggcgttatcgcgcttctgttagcgtttgctgtagggttaatcgtttactattatctggaaattcgtcccatagcccagaccgcattacagagcgcctctttctggttgtccgaatcgccgcagacgcgttttttgcgccgcgctgcggccaaaatacatcccaaatcttatactgccagattgctctatacccaagctggcgtggatgggcatttcaggaccgcgatctgggtgttctggttggacagcctgtaccgcgacgacgagctgtatgccatgatgctggcgcaagcgtattatggccgggattcgcagggtaacgcggtttacggtacgaaaaatgcggcgttaacgttatttcacgtaccagtgacagagatggcctgccagcaacaagtacaactgatttatatgtttaaagcgccgtcactttaccggcctggttcagccaggctggtagaaagcagcaagcattacatgacgctttgccaggaacaaatacaacaataa

SEQ ID NO: 373212 - DNA, 264 bp, Salmonella enterica
atgcgcgatctgttcgcctggcagttagtgggcgacgtgctgaaagttggcgcctatgttttcggttatctggtgattgccaaagcgtcgttgcgattttacattctggccgaaattagtcagttcattctgttaacggcgttcgctcactggctgattcccgctcacggcgcgctgggtgcggcacaggcttatatggccacctatattgtctatttttcactttgttgcggcgtatttttactctggcgtaggcgagcatga

SEQ ID NO: 373213 - DNA, 1104 bp, Salmonella enterica
atgacgaaatacggtgttgtaggtacaggttattttggcgctgaactggcgcgatttatgtctaaggttgaaggggcgaaaatcactgcgatttacgatccggtaaatgcggctccgatagcgaaagagttgaactgtgtcgccactgcaacgatggaggcgctttgttcccatcctgatgtggattgcgtaattattgcttcaccaaattacttacataaagcgccggtcattgcggcggctaaagcgggtaaacacgtgttttgtgaaaaacctatcgccttaaattaccaggattgtaaggatatggttgatgcctgcaaagaagctggtgttacctttatggcgggtcacgttatgaacttttttcacggggttcgccacgctaaagcgctcatcaaagctggtgaaattggtgaagttacacaagttcacactaaacgtaatggttttgaagacgtgcaggatgagatctcatggaagaagattcgcgcaaagtcaggtgggcatctgtaccatcacattcacgagctagattgtacactgttcatcatggatgaaaccccatccctggtttcaatggcggcggggaatgttgcgcacaaaggtgaaaaatttggtgatgaagatgatgttgtcctaatcacccttgagtttgaaagcggtcgtttcgcgacacttcagtggggatcatcgttccactaccctgagcactatgtattaattgagggcacgacaggtgcaattctcattgatatgcaaaacacggctggttatctaataaaagcgggcaaaaaaacacactttcttgtgcatgaaagccaggcggaggatgatgatcgtcgcaacggtaacatatccagcgagatggatggcgcaatcgcttatggtaaacccggtaaacgtacgccgatgtggctctcatcaattatgaaactggagatgcagtacttgcatgatgtgataaacggtctggagccaggcgaggagtttgctaaattgctaacgggagaagcggcgacaaatgccattgctaccgctgatgctgcgacgctttcttcaaacgaggggcgcaaagttaaactcactgaaattcttggctaa

SEQ ID NO: 373214 - DNA, 1365 bp, Salmonella enterica
atggttaagttatcaatgacgctgcgcctgacaatttcttttatcgccatccttatcctcgcctgtaccggcattagctggacgctctataacgcgctgagcaaagaattaacgtatcgggatgatatgacgctaataaatcgggcggcgcaaatgcagcaactgttactggatggcgccaggccggaaaatctgccgctctatttcaatcggatggtggatacgaagcaggacatcttattgatccattcagcaacaggccacaatgttgcgattaatcatagcggcatccccgaccaacgctttaacgagattccgctggctaaaaacatcacccgcgaaaccttatttcgccaggcggtacaaggcacggagctgaccgcggtacgagtaaacgccagaagcggcgatgacccgctgacccttactattgccaggctggcgacggaaaggcggcaaatgctgacgcaatatcgccgcaacagtttgctgatgagccttatcgcgatcctcgtctgttcggcgctcagtccattagtcatcagaaacgggctgcgggccattacgtcgctcagccgactcaccgcggcgacagatagcggcacacttcgccagccgttggcggaacaggcgttacccgttgagctcaggccgcttggacaagcgctaaataccatgcgccagaagctttccgacgattttgaacgcctgaaccaatttgccgacgatctggcgcatgagctgcgcacgccggttaatattttactggggaagaatcaggtgatgctgagtcaggaacgcagcgccgaagagtatcaacaagcccttgtcgataatattgaagagctggagggactgtcgcgactgacagaaaatattctctttctggcacgcgcggagcaccagaatatagcggtaaaaaaacagcctgtttcgctcaatgcgctggtcgaaaatatgctggattatcttagcccccttgccgaggagaagcgcatctgttttataaatcaatgtcagggaacggtatgggctgacgaaatattattacaaagagtgctctcaaacctgctgacgaatgccatccgttattctgatgaaaacgccgtgatacgtattgaaagcgcttatgatgataacgttgcagaaattcgggtcgctaatccgggcagccaccccgccgatgcggataagcttttccggcgtttttggcgaggagataatgcccgccacactgccggtttcggcctggggttatcgttagttaacgcgattgctctattacacggtggttcggcatcttaccgctatgccgatgaacataatatcttttcggttcgtctgcccgatagcggtgatagctaa

SEQ ID NO: 373215 - DNA, 1545 bp, Salmonella enterica
atggatgtcattaaaaagaaacactggtggcaaagtgaccagcttaaatggtcagtaattggtctgctgggcctgctggtgggttaccttgtagttttaatgtacgtacaaggggagtatctgttcgccatcatgacgctgattttaagctctgctggcctgtatattttcgcaaatcgtaaaacctatgcctggcgctacgtttaccctggcctcgccggcatggggctatttgtgctattcccgctggtgtgcaccatcgctatcgcctttactaactacagcagcaccaaccagctcacctttgaacgcgcccagcaagtgctgatggaccgttcttatcaggcaggaaaaacctataacttcggtctttacccgagcggcgacgagtggcaactggcccttaccgacggagaaacgggcaaacattacctgtctgacgcattttccttcggcggcgaacaaaaattacagctgaaagagaccgatgccctgccgggcggcgaacgcgccaatctgcggataatcacccagaaccgtctggcgctgaaccagataaccgccgtcctgccggatgaaagtaaagtaattatgagctcgctacgtcagttttccggtactcgtccgctgtacacactggctgatgacggcctgctgaccaataaccagagcggcgtaaaataccggccaaacaacgatagcggttattatcagtcgatcaacgccgacggaagctggggtgatgaaaaactcagtcctggttataccgttactatcggcgcgaaaaactttacgcgcgtctttaccgacgaagggatccagaagccttttttcgctatcttcgtctggaccgtggtcttttcggtcctcactgtggtgttaaccgtggcggttgggatggtattggcctgcctcgtacagtgggaagcgctgaaaggtaaagctatctaccgcgtcctgctgattctgccctacgccgtaccgtcgtttatttcaattttgattttcaaagggttattcaaccaaagctttggcgaaatcaatatgatgctgagcgcgctgtttggcattaaacctgcctggttcagcgaccccaacaccgcgcgggcaatggtgattatcgtgaatacctggctgggctatccctacatgatgatcctgtgcatgggactgctgaaagcgattccggatgacctgtacgaagcctccgcaatggacggcgccggtccgtttcagaatttctttaagatcaccttaccgctgctgattaagccgctaacgccgctgatgatcgccagcttcgcctttaactttaataactttgtcctgattcagttattgaccaacggcgggccagaccgtctcggcaccaccacgcctgccggttataccgatttgctcgtcagctacacctaccgtatcgcctttgaaggcggcggcggtcaggacttcggtctggcggcggccattgccacgctgatcttcctgctggtaggcgcgctggcaatagtgaacctgaaagccacgcgtatgaagtttgattaa

SEQ ID NO: 373216 - DNA, 2097 bp, Salmonella enterica
atgaaaaaaacacatctgctcagcgtgctggcgctgggtattagcgcggcctgccatgccgaaacatatccagcccctgttgggccttcacaatctgactttggcggcgtgggcctgctgcaaacgccgacagcgcgtatggcgcgtgaaggggagatgagcctgaactatcgcgataacgatcagtaccgctactactcggcttcggttcagcttttcccgtggttggaaaccacgttgcgctataccgatgtccgtacgaaaaagtacagcagcgtggaatcattctccggcgaccagacttacaaagataaagcgtttgatgtgaaactgcggttgtgggaagagagttactggatgccgcaggtggcggttggcgcgcgcgatatcggcgggacggggctgtttgatgcggaatatattgtagcgagtaaggcctgggggccgtttgatttttcattaggtctcggctggggctatcttggcaccagcggcaatgtgtctaatcctttctgttcgtatagtgataaattctgttcgcgtgataacagttataaagaggccggttccgtcgacggtagcgatatgtttcacggcccggcctcgctgtttggcggcgtggaataccagaccccgtggcaaccgctacgcctgaagctggagtatgaaggcaataactatcagcaggattttgcgggtaaactggagcagaagagcaagtttaacgtcggcgccatttaccgcgtcaccgattgggccgacgttaacctcagctacgagcgcggcaacacctttatgtttggcgttacgctgcgcaccaatttcaacgatttacgtcccgcgtatcatgacaattcacgcccgcaataccgaccacagccgcaggatgccatcctgcaacattcggtagtggctaatcaattaacgttattgaaatataatgccggtctggcggacccgaaaatccaggtcaaaggcgatacgctgtacgttaccggcgaacaggtgaagtaccgcgactcccgtgaagggatcgtgcgcgctaaccggatcgtcatgaacgatctgccggaggggatccgcacgatccgcgtgacggaaaaccgccttaatctgccgcaggtcaccactgaaaccgatgtcgccagcctgaaacgccatctggaaggcgaaccgctgggacatgaaaccccgctggcgcaaaaacgcgtggagccgatcgtgccagagagtactgaacagggttggtatatcgacaagtcgcgcgttgattttcatcttgatcccgtgctgaatcagtcggtaggcggcccggaaaacttctatatgtatcagctgggcgtaatgggaactgcggatctgtgggtcacagatcatctgctcaccacgggcagcgtgtttgccaatatcgccaacaactacgacaaatttaactacaccaatccgccgaaggactcgcatctgccgcgggtgcgtacgcatgtccgtgagtatgtgcagaacgatgtttatgtgaataacctacaggccaactacttccagtattttggcaatggtttctatgggcaggtctacggcggttatctggagaccatgtttggcggtgccggggcggaagtcctgtatcgcccggtagacagcaattgggcgtttggtctggatgccaactacgtggaacagcgtgactggcgtagcgcgcaggatatgatgaagtttaccgattacagcgtgaagaccggacatttgaccgcatactggacgccgtcgttcgcccaggatgtgctggtgaaagccagcgttggtcagtatctggcgggcgataaaggcggtacgctggagatcgccaaacgcttcgatagcggcgtcgttgtcggcggttacgcgacgattaccgatgcgtcgccggatgaatatggggaaggggattttaccaaaggcgtatatgtttccgtaccgctggatctcttctcgtccggcccaacccgaagtcgtgcggcaattggctggacgccgctgacgcgtgacggtggtcaacagcttggccgtaagtttggcctgtatgatatgaccagtgacaggagcgtaaatttccgttaa

SEQ ID NO: 373217 - DNA, 384 bp, Salmonella enterica
atggctaaggtgaacctgtatatcagcaatgatgcctatgaaaaaataaatgcgattattgagaagcgtcgacaggaaggggcaagggaaaaagatgtcagtttttcagcaacagcttcaatgcttcttgaactggggcttcgtgtacatgaggctcagatggagcgtaaagagtctgcatttaatcagactgagtttaataaattgcttcttgaatacgttgtaaaaacacaatcatcagtagcgaaaattttgggtattgagtctctcagtcctcatgtctccggaaatccaaagtttgaatatgccaatatggttgaagatatcagggagaaggtatcatctgagatggaacgattttttccaaaaaatgatgatgaataa

SEQ ID NO: 373218 - DNA, 690 bp, Salmonella enterica
atgtatccgatggatcgtattcaacaaaaacatgctcgtcaaatagatctgctggaaaatctgacggcagttattcaggattatccaaatccagcctgtatcagggacgaaactggaaaatttattttttgcaatacgctgtttcatgagtcatttcttacacaagatcaaagtgctgaaaaatggcttctgtcgcagagagatttttgtgaattgatctctgtcacagagatggaagcatataggaatgagcatacgcatcttaatcttgtagaggatgtttttattcagaacagattctggacaatttctgtccagtcatttcttaatggacacagaaatattattctgtggcaattttatgatgctgctcatgttcgtcataaagacagttataatcaaaaaacgattgtcagtgatgatatcagaaatataatcagaagaatgagtgatgattcttctgtatcatcatatgtaaatgatgtcttttacttatatagcaccggaatcagtcataatgctatagcaagaatattaaacatatccatctccacatcaaagaaacacgcgtctctgatatgcgactacttctctgttcctaataaagatgagttaatcatcttactctacaataaaaagtttattcattatttgtacgagaaggctatgtgtatcataaatacgcgttaa

SEQ ID NO: 373219 - DNA, 360 bp, Salmonella enterica
atggtaaaactaaaattacctttagatgtggaaagtctattaattgaggcaagtaacagaagcggaagaagtcgatcgtttgaggcagtaataagacttaaagatcatcttcaccgctatccaaagtttaacagggcagggaatatctatggtaagtcgctggttaagtatctgacaatgcgtctggatgatgaaactaaccagctacttattgcagccaaaaatcgtagtggatggtgtaaaacagatgaggctgcagacagagttattgatcatttgatcaagtttcctgatttttataactcggagatattcagggaggcagataaagaggaagatataacatttaatacactctag

SEQ ID NO: 373220 - DNA, 312 bp, Salmonella enterica
atgtcgggagacgagaataaacttaagaaatatcgtttcccggaaacactgaccaaccagagccgctggtttggcctgccactggatgaactgatccccgcagcaatctgtattggctggggtatcacaacatcgaaatatctgttcggtattggtgcagcggttctggtttatttcgggattaaaaaactgaaaaaagggcggggcagttcctggttacgtgacctgatttactggtatatgccaacagccctgttgcgcggtatttttcataatgttcccgattcgtgtttccggcagtggattaaatag

SEQ ID NO: 373221 - DNA, 567 bp, Salmonella enterica
atggaacacggtgcccgtttaagtaccagtcgtgtaatggccatcgcctttatatttatgtcagtgcttattgttctcagcctctctgttaacgtcattcagggagtgaataactaccgtcttcagaatgagcaacgcactgccgtgacgccaatggcatttaatgccccctttgccgtgtcacagaacagtgccgacgcctcttatttacagcagatggcgctgtcatttattgccctccgtctgaatgtttcatcagaaaccgtcgatgcctcacatcaggcgcttctgcaatatatccgcccgggcgcacagaaccagatgaaagttattctggctgaagaagcgaagcgtattaaaaacgataacgtgaactcagcctttttccagaccagtgttcgtgtctggcctcagtatggccgtgtggaaattcgtggtgtgcttaaaacctggattggtgattcaaaacctttcactgatatcaaacattacatccttattctgaagcgggaaaacggggtgacctggctggataatttcggggaaacagacgatgagaaaaaataa

SEQ ID NO: 373222 - DNA, 729 bp, Salmonella enterica
atgagaaaaaataatacggcaataatattcggcagcctgtttttttcctgcagcgtgatggccgcaaacggtacgctggcccccaccgtggtgccaatggtgaacggtggtcaggccagtattgccatcagcaataccagcccgaatctgtttaccgttcccggtgaccggattatcgccgtgaacagtctggatggtgccctgaccaataatgagcagaccgcctccggcagtgtggtggtggccaccgtcaacaaaaagccctttacgttcattctggaaacagaacgtggtctgaatctttccattcaggccgttccccgtgaaggcgcggggcgtaccattcagcttgtcagtgacctgcgcggaaccggagaagaagccggtgcgtgggaaacgtccacgccttacgaatccctgcttgtgaccatcagccaggccgtccgtggcggaaaattacccgcaggctggtatcaggtcccggtgacaaaggaaaccctgcaggccccggcgggtctgtcttcagtggcagatgccgtatggacggggaatcacctgaagatggtccgctttgccgtggaaaataaaactctgtctgctctgagtatccgggaaagtgacttctggcagccgggaacccgtgccgtgatgttcagccagcctgccagccagttactggcaggtgcgcgcatggatgtgtatgtcatccgtgacggggagggcaactga

SEQ ID NO: 373223 - DNA, 1452 bp, Salmonella enterica
atggccagtatcaataccattgtgaaacgcaagcagtacctgtggctggggattgtggttgtcggtgcagcctccgcgattggtggtgcgctgtatctgtctgatgtggacatgtccggtaacggtgaaaccgtggctgaacaggagcctgtgccggatatgaccggtgtggtggatacgacctttgatgacaaggtgcgtcagcatgctactacagagatgcaggtgacggcggcacagatgcagaagcagtatgaggaaatccgtcgtgaactggatgtcctgaacaaacagcgcggttatgaccagcgtcgtattgaaaagctgggacaggacaatgctgcactggcagagcaggtgaaagccctgggtgcaaatcccgtcaccgcgaccggtgagcctgtaccgcagacgccagcctcaccgcccgggccggaaggcgaaccacagccaggaaacacccccgtatccttcccgccgcagggcagcgttgctgttccaccgccgacggcgttttatcccgggaatggtgtcacgccaccaccacaggtgacgtaccagtctgtgccggtgcctaaccggatacagcgtaaggtgtttacccgtaatgagggaaaacagggaccatcactgccgtacattccgtcaggaagttttgcgaaagccatgctgattgaaggggcggatgccaatgcctcagtcaccggtaatgaatccacggtgccgatgcagctgcgtatcaccggcctggtggaaatgccgaacagcaaaacgtatgacgcaacgggatgttttgtggggctggaagcctggggggatgtctccagtgagcgtgccattgtacgtacccgcaatatcagctgcctgaaggacggcaaaaccattgatatgccgattaaggggcatgtcagcttccggggtaaaaacggtatcaagggcgaagtggtgatgcgtaacggcaaaatcctcggctgggcatggggcgcgggatttgttgacggtatcggtcagggaatggagcgcgcctcccagccggctgtcgggctgggtgccacagccgcttacggggctggtgatgtcctgaaaatgggtatcggtggcggcgcatcgaaagccgcacagacgctcagtgactactacatcaaacgtgccgaacagtatcacccggtgataccgattggtgcgggcaacgaagtgaccgtggtgttccaggacggcttccagctgaaaaccgtggaggaaatggcgctggagcagtcacagagtacagcggaagagggtaacccggaaagcccggtgccgaatcctccctcggcagaaagccacctgaacggttttaacaccgaccagatgctgaaacagctgggcaatctgaatccgcagcagtttatgtccggagacaagaacccgctgggcggggatgccggcaaggagggcggaaatggcgggtga

SEQ ID NO: 373224 - DNA, 561 bp, Salmonella enterica
atggcgggtgatgcactgacattccgtgtggcgtttgtcgttcgctggctgctgtgggtcgtcaggtttgtggttatctggccactggccacaatggccctgatggctctgtttgttttatggaaggacaacaccacaccaggaaaattactggttcaggaaattgacttcgtaagacaaacagcccctgccgggcagtttcctgtaagagaatgtttgccttctctgcatgatcttccaggagcagaagagaaaatctgccgttaccgtgctgctgatgctgcagattatgtcagggagactgaccggtcactgatgcaactggtcaccgcattctgggcaacgctggcacttatgtatatgtcgtttgcggcaggcaccgggaaatatccggtgcgacccggaaaaatgaaatgtgtccgtgtggcaacagcagatgagcgtctgaaggaagttcttgcagaagacacttccctgccgggaaaaatcagggagtgccatgtttatttccctgatgacagaacaatcagaaacaacggagataaaaatgaacatgcgtaa

SEQ ID NO: 373225 - DNA, 321 bp, Salmonella enterica
atgaacatgcgtaatattaatgttattactgcccgctctgtaccggataaaagcgtatcagatgatcttatgcatgctgttctcagtaactgcaccacaagaatcgtacttcctgcaccgaaggaattcagttctgaatcattgccgcacaattttaatatggctgctgtcggtgtgatgaagaagggtatgtcgatgagcttattttcttctccggggcatattgtggttgccggacaatccggtagcggaaaatctgttccggtgaaagaactaatcgacagaattattcagaaatataaggaacccttcgatgaataa

SEQ ID NO: 373226 - DNA, 252 bp, Salmonella enterica
atgaataagctggtttctgatggcagcgtcaaaaaaataaagtatccggtgctgtatgaatccggaataacccctccgttatgtgaagtcagtgtgccagaacctgatgcgggggggaaacgcattgtggcatatgtttataaatcatcacggaatacggtttttgaaaatcctgacattgtaaaaacctgtacggtcagggatttgaagaatgattttgtgaactgcgatgagaaaggtgagggacaatga

SEQ ID NO: 373227 - DNA, 516 bp, Salmonella enterica
atgaaacagatttctttatttattcctctgctggggaccttattactttccggctgtgccggaactaatacggaatttgagtgtaacgccaccacatccgatacctgtatgacgatggagcaggccaatgagaaggccaaaaaactggagcagtcctcagaagcaaagccggttgcggcatcactgccgcgcctgggtgaagggaacttccggacaatgccggtgcagaccgtcaccgcggccactccgtccggcagcagacctgcggtgacagcacatccggagcagaaactgctggcaccacgcccgctgtttaccgctgcccgggaagtgaaaacgattgttccggtcagttcagttgcgccggtaacacctcctcgtccgctaagaacgggtgagcagacggctgcattatggatagcgccttatattgataatcaggatgtttatcatcagccatccagcgtgttttttgttattaaaccgtctgcgtggggaaaaccacgtattaattaa

SEQ ID NO: 373228 - DNA, 2628 bp, Salmonella enterica
gtgaataatccacttgaggccgtcactcaggcggttaactccctcgtcacagcactgaaactgcctgacgaatccgcaaaggccaatgaagttctgggcgaaatgagcttcccgcagttcagtcgtctgctgccgtaccgtgattacaaccaggaatccggtctgttcatgaatgacaccacgatgggctttatgctggaagccattcccatcaatggggcgaatgagtccattgtggaggccctcgatcacatgctgcgcaccaaactgccgcgcggggtgccgttctgcatccatctgatgtccagtcagctggttggtgacaggattgaatacgggctgcgtgagttctcctggtcgggtgaacaggctgaacggtttaacgccattacccgtgcctattatatgaacgcggcagcgacacagtttccgctgccggaggggatgaatctgcccctgaccctgcgccattaccgggtattcttctcgtactgttctccctcgaagaaaaaaagccgggctgatattctggaaatggaaaacctggtgaaaatcatccgggcgtcgttacagggggccagtatcaccacacaggcggtggatgcacaggcctttatcgatattgtcggggagatgattaaccataacccggactccctgtatccgaaaagacgtcagctggacccgtattctgatctgaattatcagtgtgtggaggacagttttgacctgaaagtccgggcggattacctgacgctgggcctgcgtgagaagggcaggaacagcacggcccgcatcctgaatttccatctggcccgtaacccggaaatcgccttcctgtggaacatggccgacaactacagcaacctgctgaacccggaactgtccatctcctgtccgttcatcctgacgctgactctggtggtggaagaccaggtgaaaacccacagcgaagccaacctgaagtacatggacctggagaaaaagtcgaagacctcctatgccaaatggtttccgtccgtggagaaagaggcgaaggagtggggggaactgcgtcagcggctgggctccggtcagtcctctgtcgtgtcctacttcctcaacatcacagcattctgcaaggacaataatgaaacggcgctggaagtggagcaggacatcctgaacagcttccgtaaaaacggttttgagctgatttcaccgcgctttaaccacatgcgtaatttcctgacctgccttccctttatggccgggaaagggctgtttaaacagctgaaagaggccggtgtggttcagcgcgcagagagctttaatgtggccaacctgatgccgttagtggcggataaccccctgacaccggcaggtctgctggcacccacctaccgtaaccagctggcgtttatcgatattttcttccgggggatgaataacaccaactacaacatggcggtctgtggcacctccggggccggtaaaaccggactgatacagccccttatccgcagcgtgctggactccgggggctttgccgtggtgtttgacatgggggatggatataagtccctgtgtgagaacatgggcggggtgtatctggacggtgaaaccctgcgttttaacccgtttgcgaacatcaccgatattgaccagtcagcggagcgtgtccgtgaccagttgtcggtgatggccagccccaacggtaacctggatgaagtgcatgaaggtctgctgctgcaggcggtcagggcctcctggctggctaaaaagaacagggcgcgcatcgatgatgtggtggatttcctgaaaaacgcccgtgataacgaccagtatgtcgagtcaccgaccatccgcagccgtctggatgaaatgattgtcctgctggatcaatataccgccggcggcacttacggccggtattttaactctgatgagccgtccctgcgggatgatgcgaaaatggtggtgctggagctgggcggactggaagaccgtccgtcactgctggttgcggtgatgttcagcctcattatttacatcgagaacaggatgtaccgcacgccgcgtaacctcaaaaaactgaacgtcattgatgagggatggcgtctgctggacttcaaaaatcacaaggtcggtgagtttattgagaaaggttaccgtaccgcccgccgtcataccggtgcctatatcaccatcacacagaacatcgtcgactttgactctgacaaggcctccagtgctgcccgcgcggcatggggtaactcctcctacaaaattatcctcaaacagagtgcgaaggagttcgcgaaatacaaccagctgtatccggaccagttcctgccactgcagcgtgacatgattggtaagttcggtgcggccaaagatcagtggttcagttccttcctgctgcaggtggaaaaccattcctcctggcaccgcctgtttgtggacccgttaagccgcgccatgtacagctctgacggcccggattttgagtttgtgcagcagaaacgtaaagaggggctgagtattcatgaggcggtgtggcagctggcgtggaagaagtcagggccggagatggcttcgctggaagcctggctggaagaacatgagaaatacaggagtgttgcatga

SEQ ID NO: 373229 - DNA, 387 bp, Salmonella enterica
atgagttcaacgcagaaacccgccgacgtcacggcagaacgacgcagccactggtggtggacggtgccaggttgtctggcaatggtgttactgaacgcagctgtcagttacggcattgtcagactgaacgcaccggtgactgtcgccttcaacatgaaacagaccgtagatgcgttttttgacagcgccagtcagaaacaactgtcagaagtacagtcaaaagccctttcagcgcgttttaacacggcactggaagccagcctgcaggcgtggcagcagaaacaccacgcggtcattctggtgtcgcctgctgtggtacagggggcaccggatatcacccgggaaatccagcaggatattgcccggcgaatgagggcagaaccatga

SEQ ID NO: 373230 - DNA, 633 bp, Salmonella enterica
atgagatgtcgggggctgattgccctgctggtatgggggcagagtgtggccgccgccgatcttggcacctggggcgatctgtggccggtaaaggagccggacatgctgacggtgatcatgcagcgcctgacggtactggagcagtccggtgagatgggccggaaaatggatgcctttaaggagcgggtgatccgcaacagtctgcggccccctgccgtgcccggtatcggacgcacggagaaatacggcagccggttgtttgacccgtccgtcagactggctgcggatatccgggataacgaagggcgggtgtttgcccgccagggtgaagtgatgaatccgctgcagtatgttccttttaaccagacgctgtatttcatcaatggcgatgatccggcgcaggttgcctggatgaaacgccagacgccgcccacactggagagcaaaattatcctggtgcagggcagtatcccggagatgcagaaagcactggacagccgtgtttactttgaccagaacggtgtgctctgccagcgcctcggcatcgatcaggtaccggcacgggtgagcgccgttcccggcaatcgcttcctgaaggtggaatttattccggcagaggagggcagaaaatga

SEQ ID NO: 373231 - DNA, 993 bp, Salmonella enterica
atgaagcgaagcctgtggctgctgatgttattccttctcgccggtcatgtccctgcggcgtctgcggattctgcctgtgaggggcgttttgtaaacccgatcacggatatctgctggagctgtattttcccgctctcgctgggcagtatcaaagtcagtcagggtaaggtccccgacacggcgaacccgtcgatgcccattcagatttgtccggcaccgccgccgctgttcaggcgtatcggactggccattggttactgggagccgatggcgctgacggacgtcacccggtcaccgggatgtatggtgaacctgggcttcagcctgccggcttttggtaaaacggcacagggaacggcgaaaaaagatgagaagcaggtgaacggagcgttctatcacgttcactggtacaaatacccgctgacgtactggcttaacatcatcacatcgctgggctgcctggaaggtggtgacctggatatcgcttatctttctgaaatcgaccccacctggacggacagcagcctgaccaccattctcaatccggaagccgtcatttttgccaatccgatagcacagggggcctgtgctgcagatgccattgccagcgcctttaacatgcccatcgatactctgttctggtgtgccggttcgcagggaagtatgtacccgttcaatggctgggtgagtaatgagtccagtccgttgcagtcctccctgctggtcagtgaacgcatggcgttcaagctgcaccgtcagggcatgattatggaaaccatcgggaaaaataacgccgtctgtaatgaatatccgtccccaatcctgcccaaagaacgctggcgttaccagatggtgaatatgtatccggacagcgggcagtgccacccgttcgggcgcagcgtgacccgctgggaaaccgggaaaaatccgcccaacacaaagaaaaacttcggctacctgatgtggcgtaaacgtaactgtgtcttcctgtga

SEQ ID NO: 373232 - DNA, 639 bp, Salmonella enterica
atgaagctgagtatgaaatctctggcagcactgctgatgatgctgaacggggcggttatggcgtcagaaaatgtgaacacacctgaaaaccgccagttcctgaagcagcaggaaaatttaagcagacaactgcgtgaaaaacctgaccatcagctgaaagcctgggcggagaagcaggtgctggaaaacccccttcagcgttcagataaccatttcctggatgagctggttcgtaaacagcaggcttcacaggacgggaaaccccggcagggtgccctgtattttgtgtcgttttccattcccgaagaggggctgaaacggatgctgggcgaaacccggcactacggtattccggccacactgcggggcatggtgaataatgacctgaagaccaccgctgaagccgtgttgtccctggtgaaagacggcgcaactgatggtgttcagatcgacccgacgctgttttcacagtacggcattcgcagtgtaccggcactggtggtgttctgccgtcagggatacgacatcatccggggaaacctgcgggtcggccaggcgctggagaaagtggccgccacgggtgactgccggcaggtggctcatgatttactggcagggaaaggagattccgggaaatga

SEQ ID NO: 373233 - DNA, 1809 bp, Salmonella enterica
atgaaacgtattttacctctgatactggctctggttgccggcatggcacaggctgacagcaacagtgattaccgggccggctctgattttgctcaccagatcaaaggacagggaagcagcagtattcagggctttaagccacaggagagtatccccggctataacgcgaatccggacgagacaaaatattacggtggcgtgactgccggcggggatggcggcctgaaaaatgacggcaccacggaatgggcgaccggtgaaaccggaaaaaccattacagagtcattcatgaacaagccgaaagacattctttcaccggatgcaccgtttatccagaccggcagggatgtggtgaaccgggctgacagcattgtgggaaacaccgggcagcagtgcagtgcgcaggagattagccggagtgaatacacgaattacacctgtgagcgggatttacaggtggagcagtactgcacacgaactgcccgtatggagctgcaggggagtaccacatgggaaacccggacgctggagtatgaaatgagtcagctacctgcacgtgaagtgaatggtcagtatgttgtctccattacctctcccgttaccggtgaaattgtcgatgcgcattacagctggagtcgtacttacctgcagaagagtgtacctatgacaattacagtactgggaaccccactgagctggaatgccaaatactcagcagatgcctcatttacaccagtacagaaaacactgactgccggtgtggcttttacgtcatctcaccccgtccgggtcgggaatacaaaattcaaacgtcatacggcaatgaagctgcgtctggttgtcagggtaaaaaaagcctcgtacaccccgtatgttgtctggtctgaaagctgcccgttcagcaaggagctggggaaactgacaaaaacagaatgtacggaggctggcgggaacaggacgctggtgaaagacggtcagtcatacagcatgtaccagagctgctgggcataccgggacacgtatgtcacgcagtcagcagacaagggaacctgtcagacctacaccgacaatcctgcctgtaccctggtgtcacaccagtgtgccttttactccgaagaaggtgcctgtctgcatgaatatgccacgtactcctgtgagtcaaaaacatccgggaaagtgatggtctgtgggggagacgtcttctgtctcgatggcgaatgcgataaggctcagagcgggcagagtaatgattttgccgaagccgtttctcagctggcggcactggccgcagcaggtaaggatgttgcggcgctgaacggggtggatgtccgtgctttcaccggtcaggcgaaattttgtaagaaggctgcagccggatacagcaactgctgtaaggacagcggctggggacaggatatcgggctggccaaatgcagcagtgatgaaaaggccctggctaaagcaaaatcaaacaaactgaccgtcagcgtcggggagttctgttcgaagaaagtgctgggtgtctgtctggagaaaaaacgcagctactgtcagtttgattcgaagctggcgcagatagtccagcagcaggggcgcaacggtcagttgcgtatcagttttggtagtgcgaagcatcctgactgtcgggggattacggttgatgagctgcagaaaattcagttcaacagactggatttcactaacttctacgaagacctgatgaataaccagaaaatcccggacagtggcgttctgacgcagaaagtgaaagagcagattgctgaccagctgaaacaggcaggacagtaa

SEQ ID NO: 373234 - DNA, 258 bp, Salmonella enterica; identical to SEQ ID NO: 39433

SEQ ID NO: 373235 - DNA, 744 bp, Salmonella enterica
atgaataaagcattactgccactgttactctgctgctttatttttccggcgtcaggaaaagatgcaggctggcagtggtataacgagaaaataaatccgaaggaaaaagaaaataaacctgtacctgcagccccccgtcaggaaccggatattatgcagaaactggccgcactgcagacggcaacaaagcgggcgctgtacgaagccattctgtatcccggcgtggataattttgtgaaatatttccggctgcaaaattactggactcagcaggccgggcttttcaccatgagcgccagaaaggccatgctggcacatcctgaactggactataacctgcagtacagccattacaacggcacggtacggaaccagctggcagcagaccaggcgcagcagcgacaggccattgcgaaactggctgaacactacggcatcatgtttttttaccgggggcaggaccccatcgacgggcaactggcgcaggtcattaatggcttccgggatacgtatggtctgagtgttattcccgtttccgtggatggcgtgattaatccgctgttgccggattcccggactgaccaggggcaggcgcagcgcctcggcgtgaaatatttcccggccatgatgctggttgacccgaaacagggcagtgttcgcccgttatcatacggctttatttcgcaggacgacctggcaaaacagttcctgaacgtttctgaagattttaaacccaatttttaa

SEQ ID NO: 373236 - DNA, 348 bp, Salmonella enterica; identical to SEQ ID NO: 106979

SEQ ID NO: 373237 - DNA, 315 bp, Salmonella enterica
atggaaaagcgatcttttaaagaaaaactggaaataatcagaaacataataagagagtcgttactgggaaatgcggcaattattgcgctgatatatgcagcatcacattcattaccggtcaatgccttccctgactatcttgtaataagtttattaagtatcgcagcaggcatcgttgtattatggttattttcaattatctatatttatttttgtgagctattcagaagccactggattgcggtatggtttatcatatggtcttcagtaatcaacctcattattttgtatggtttttatgaccgttttatatga

SEQ ID NO: 373238 - DNA, 285 bp, Salmonella enterica
atgataagtaaacgcagattctctttaccccggcttgatattacgggaatgtgggtattttccctgggtgtctggtttcatatcgtcgcccgtcttgtttacagcaaaccctggatggctttttttctggcggagctgattgcggccattctcgtactgttcggcgcataccaggtgctggatgcatggattgcccgtgtcagccgggaagagcgtgaggcactggaagccaggcaacaggccatgatggaagggcagcaggagggcggacatgtctctcactaa

SEQ ID NO: 373239 - DNA, 546 bp, Salmonella enterica; identical to SEQ ID NO: 36676

SEQ ID NO: 373240 - DNA, 282 bp, Salmonella enterica
gtgcgaaataagcaggtggtgttactcattgccggaatatccggcatcgtgacgggaataatcgtcagcctgaatatcccctttatccgtcaggggcttttttatcccgccagccctgtagaaattgtcgtttcgctgagtcttaccttttctgtttctgttgtgttttttgtgggggcaattgtgggatggatttcggtgtctgaaatatattacagccgcatgaccggtctgaatgaatcatcggaaatatcagagggaacttataatgagagaaaataa

SEQ ID NO: 373241 - DNA, 381 bp, Salmonella enterica
atgagagaaaataaaagtaatcctgagctcaaaatcagaagtacagaacgagattataaatacatttccagaattactggcaggtatgctgggttgtctctggtattcctgactgccggaattgttttatggacagttatggatattatttttgatgcctgtattgattcgtggaaagcggacccggaattaaataattcgagttatatgtggaatatcctgatatatgccattccgtatacgttatatgcgcttgcagccgggtttcttgttacatttttttctgtccccaatgtgcgaattaatatacggaaatatcgagatattcctgctgaaatgtcgtatgcaccgggagaacacattaagggagggcaagaatga

SEQ ID NO: 373242 - DNA, 2823 bp, Salmonella enterica
gtgaatgaagtttatgtgattgccggtggtgagtggttgcggaataacctgaacgccattgccgcctttatgggaaccaggacgtgggattccattgaaaaaattgcgctcacattgtctgttctcgcggtggccgtaatgtgggtacagcggcacaacgtgatggatttgctgggctgggtggccgtatttgtgcttatcagcctgctggttaatgtccgcacatcggtgcagattattgataacagtgacctggtcaaagttcaccgggtggataatgtgccggtcggactggcgatgccactttcactgacgacccgtatcgggcatgcaatggtggccagttacgagatgatcttcacgcaaccggacagtgtcacctacagcaaaacggggatgctgtttggcgcagaactggtatcaaaaagcaccgactttttgtcccgcaatccggaaatcgccaatcttttccaggattatgtgcagaactgtgtgatgggggatatttacctgaaccacaaatacacgctggaggagctgatggcctccgctgatccctacacgctgattttttcccgccccagcccgctgcggggcgtttatgacagcaataataatttcgtaacctgtaaggacgcgtcggtttcgctgaaagacaagctgaatctggacacacagagtggcggaaaaacctggcattattatgcccagcagctatttggtggacgccctgatcctaacctgctgttcagtacgctgattggcgacagttacagttacttctatggctcaagtaaatcagccagccagatcatccgccagaatgtcaccatcaatgcgctgaaggaggggatcaccagttatgccgcacgtaatggtgattcggccagcctggtgaatctggccaccacgtcatcgatggagaaacaacgtctggcacatgtctccatcggtcatgtggcgatgcggacactgcccatgacgcagaccatcctgacggggatcgccatcggtattttcccgctcctggtactggcggctgtattcaacaaactgacgctgtctgtcctgaaaggttatgtgtttgccctgatgtggctgcagtcatggccactcttgtacgccattctgaacagtgccatgacattttatgcgaaacagaatggtgcgccggtgttgctctctgaaatttcacagatacaactgaaatactccgatctggcttccactgccgggtatctttccatgatgatcccgccattatcctggatgatggtcagggggcttggggccggattttccagtgtgtacagccatttcgcttcctctgctatcagcccgactgccagtgcggcaggtagtgtggttgacggtaattactcctacggtaacatgcagacggaaaacgtgaacggcttcagctggagcaccaacagcaccacgtcgtttggtcagatgatgtaccagaccggcagtggcgcaaccgccacacagacccgtgacggtaatatggtgatggatgcaagcggagcgatgtcccgtttaccggtcggtatcaatgcaacgcgtcagattgcagcggcacaacaggaaatggcccgggaggcgtcgaacagagcagaaagtgccctgcatggtttcagcagcagtattgccagtgcctggaacacgctcagtcagtttggttctaaccgggggagcagtgactctgtcaccagtggtgctgacagtacgatgagtgcacaggactccatgatggccagccgtatgcgcagtgcagtggaaagctatgcgaaggcgcataatatcagtaatgagcaggcgactcaggaactggcatccagaagtacgagagcttctgccgggatgtatggagatgctcatgctgaatggggggttaaacctaaaattcttggtgttggtggaggattaggcgttagaggtggtggtcgggctggcattgactggagtgatgatgatgcgcatcaggccagcagtggttcacgggccagctatgatgctcgtcatgatattgacgctaaagccagtaaggactttaaagaggccagcgattactttaccagtcgcaaagtcagtgaatccggcagccatactgacaataatgctgattcccgggtggatcaactgtctgcagccctgaattcagcgaaacagagttacgaccagtacacgacgaatatgacccgcagccatgaatatgctgaaatggcatcccgtactgaaagcatgagtgggcagatgagcgaagatttgtcgcaacagtttgcacagtatgtgatgaaacacgcaccgcaggatgccgaagctattctgacaaataccagttcgccggagattgcagaacgccgtcgggcaatggcctggtcttttgtgcaggaacagatacagcctggtgttgataatgcctggcgggaatcccgtggcgatattggtaaaggaatggagagcgtaccttcgggtggaggcagtcaggatattattgctgaccatcagggacatcaggccattattgagcaaagaacgcaggacagtaatatccgtaatgatgtaaaacatcaggttgataatatggtcacagaatataaagggaatataggtgatactcagaacagcatacgtggcgaggaaaatattgtaagaggacagtattctgaactgcagaatcaccataaaacagagtcattatctcagaataataaatataatgaagaaaagtcggctcaggaaagaatgcccggagctgacagtccacaggaactgatgaaaagggcaaaggagtatcaggataagtataagcaataa

SEQ ID NO: 373243 - DNA, 492 bp, Salmonella enterica
atgagatgtttagcccatattgctctggtaacagtgatacagtttatcgcctgttatctggctgattgggggaatgccgaaacagtttttatgctgttcttcatagtgctatggcagggactgtttatctggttgttctctcaaatacgaaaaaaacgggatgtgtcggatgagtttaagtttagtaaaggcgtttggtatataacgatgccagtatcttccttactctctccgttattaagcctgatggtttttatcattggtacactatacgaattaaggcgagttagtggttgcataagcataaaaaaatgggggcaaaatcaactcaaagaccaatatgatgggagtgaaaagttagacttcgggggcattgaacagaccccaacgatctactataacccttcaaccggatatcctatgcatggaggctttgattcagcgggaaatacttttgggactcgttggcaggactattatgacaggcaataa

SEQ ID NO: 373244 - DNA, 777 bp, Salmonella enterica
atgacaggcaataagaaaactgtagtttgtaaaaaaggtaatttgatgaaaacaaaaaaattgatgatggttacactggtcagttccactctggccctttcagggtgtggtgcgatgagcacagcaatcaagaagcgtaaccttgaggtgaagactcagatgagtgagaccatctggcttgaacccgccagcgaacgcacggtatttctgcagatcaaaaacacgtctgataaagacatgagtgggctgcagggcaaaattgctgatgctgtgaaagcaaaagggtatcaggtggtgacttctccggataaagcctactactggattcaggcgaatgtgctgaaggccgataagatggatctgcgggagtctcagggatggctgaaccgtggttatgaaggcgcagcagttggtgcagcgttaggtgccggtatcaccggatataattccaattctgccggtgccacactcggtgtgggccttgctgccggtctggtgggtatggctgcagatgcgatggtggaagatgtgaactataccatgatcacggatgtgcagattgcagagcgtactaaggcaacggtgacaacggataatgttgccgccctgcgtcagggcacatcaggtgcgaaaattcagaccagtactgaaacaggtaaccagcataaataccagacccgtgtggtctcaaatgcgaacaaggttaacctgaaatttgaagaggcgaagcctgttctcgaagaccagctggccaaatcaatcgcaaatattctctga

SEQ ID NO: 373245 - DNA, 2154 bp, Salmonella enterica
atgagttttaacgcaaaggatatgacccagggcggtcagattgcgtccatgcgtatccgcatgttcagtcagatcgccaatatcatactttactgcctgtttatttttttctggatcctagttggtctggttttatgggtaaaaataagctggcagacgtttgtgaatggctgcatttactggtggtgcaccacgctggaaggcatgcgggatttaatcaggtcccagccggtctatgagatccagtattacggcaaaaccttccggatgaacgcggctcaggtactgcatgataaatatatgatctggtgcggtgagcagttatggtcggcattcgttctggcgtctgtcgtggccctggttatctgcctgatcaccttctttgttgtctcctggattctggggcgtcagggtaaacaacagagcgaaaatgaaatcacaggtggtcgtcagctgactgacaatccgaaagaggtggccaggatgctgaaaaaagatggcaaggattccgatatccggattggcgatctgccgattatccgggattctgaaatccagaacttctgtctgcacggcactgtcggggccggtaagtcggaggttatccgtcgtctggccaactacgcccgtcagcgtggtgatatggtggtgatttatgaccgttcgggggaatttgttaaaagttactatgatccctccatcgataaaatcctgaatccgctggatgcacgctgtgctgcctgggatttgtggaaggagtgcctgacacagccagattttgataataccgcaaatactctgatcccgatggggacaaaagaggacccgttctggcagggttcaggacgtaccatttttgcggaagcggcatacctgatgcgtaatgaccccaaccgcagctacagcaaactggtggacacactgctttccatcaaaattgaaaagctgcgtaccttcctgcgtaattcaccggcggccaacctggtggaagagaaaatcgagaaaacggccatatccatccgtgctgtgctgaccaactacgtgaaagccatccgttacctgcaggggattgagcataacggtgagcccttcaccatccgtgactggatgcgtggtgtccgggaagatcagaaaaacggctggctgtttatttcgtcgaacgccgacacccatgcctccctgaagccggtgatctccatgtggctgtccattgctattcgtggtctgctggcaatgggagaaaaccgtaaccgtcgtgtgtggtttttctgtgacgagttacccacgttacacaaactgccggacctggtggagatcctgccggaagcccgtaagttcggtggctgttatgtgtttggtatccagtcctatgcccagctggaagatatctacggtgagaaagcggctgccacgctgtttgacgtcatgaacacccgtgcctttttccgttctcccagccataagattgcagagttcgctgccggtgaaattggtgagaaagagcacctgaaagccagcgagcagtattcctacggtgctgatccggtacgtgacggggtatcgaccggtaaggatatggagcgtcagacgctggtcagttattccgacattcagtctctgccggatctgacctgttatgtcaccctgcccggaccgtatccggcagtaaaactctccctgaaatatcagacacgaccgaaggtcgctccggagtttattccgcgtgacatcaacccggaaatggagaaccgtctgagtgccgtacttgccgcaagggaagcagaaggtcgtcagatggccagcctcttcgaaccggatgtcccggaggttgtttccggagaagacgtgactcaggctgaacagccgcaacagccggtgtctcctgccatcaacgataagaagtcagatgcaggtgtgaatgttccggcaggggggatcgagcaggagctgaaaatgaaaccggaagaagagatggaacagcaactgccacccgggatcagtgaatccggtgaagtggtggatatggccgtttatgaggcatggcaacgggagcagaatccggatatccagcagaagatgcagcgtcgtgaagaggtgaacatcaatgtgcaccgggagcgcggggaggatgttgagccgggagatgatttctga

SEQ ID NO: 373246 - DNA, 399 bp, Salmonella enterica; identical to SEQ ID NO: 106974

SEQ ID NO: 373247 - DNA, 228 bp, Salmonella enterica; identical to SEQ ID NO: 9799

SEQ ID NO: 373248 - DNA, 5271 bp, Salmonella enterica
atgatgagtatcgcgcaggtcagatcggccggaagtgccggtaactattataccgacaaggataattactatgtgctgggcagcatgggagaacgctgggccggcaggggggctgaacagctggggctgcagggcagcgtcgataaggatgtttttacccgtcttctggaggggaagctgccggacggagcggatttaagccgcatgcaggatggcagtaataagcatcgtcccggctacgacctgaccttctccgcccccaaaagtgtctccgtgatggccatgttaggcggtgataaacgtcttattgatgcacataaccaggccgtggattttgctgtccgtcaggtggaggcgctggcttccacacgggttatgacggacggacagtcagaaacggtgctgaccggtaatctggtgatggcactgtttaaccacgacaccagtcgcgatcaggaaccacagttacacacacatgcggtagtggccaatgtcacgcagcataacggcgagtggaagacactgagcagtgacaaagtggggaaaacggggttcattgagaatgtgtacgctaatcagattgccttcggcaggctctaccgggaaaaactgaaagagcaggttgaggcgctgggctatgaaacggaagtggttggtaagcacggtatgtgggagatgccgggcgtaccggtggaggccttctccggacgctcacaggctatccgggaggccgtcggggaagacgcctcgctgaaatcccgggatgtggcggcactggatacgcgaaaatccaaacagcacgtcgatcctgaagtcagaatggctgaatggatgcagacgctgaaggaaaccgggttcgacatccgggcgtatcgtgacgcggcggaccaacgggcggagacccgcacgcagacgcccggacccgcttcacaggacgggccggatgtgcagcaggcggtgacacaggccattgccggattaagtgaacgcaaagtgcagtttacgtacactgacgtgctggccagaacggtcggcatactgccgccggaaaatggtgtgattgaacgggcacgcgccggtatcgatgaggccatcagccgtgagcagcttatccccctcgatcgtgagaaggggctgttcacgtccgggattcatgtgctcgatgagctgtcagtccgggcactcagtcgtgacatcatgaaacagaaccgggtgaccgtacatccggagaaaagtgtcccccggacggccggttacagcgatgcggtcagtgttctggcacaggatcgcccgtcgctggctattgtgtccgggcagggcggtgcagccgggcagcgtgagcgggtggcggagctggtcatgatggcccgggagcaggggcgggaggtgcagattatcgccgctgaccgtcgctcgcagatgaacctgaagcaggatgaacggctgtccggtgagctgataaccggacgtcgtcagctgcaggagggcatggccttcacgccgggcaatactgttatcgttgaccagggcgaaaaactctccctgaaagagacgttaaccctgctggacggtgccgcacgtcataacgtacaggtcctgataaccgacagcgggcagcgaaccggtacaggcagtgcactgatggccatgaaagatgccggggtgaacacatatcgctggcaggggggagaacagcggccggccaccatcatcagtgaaccggaccgtaatgtccgctatgcccggctggcaggagattttgctgccagcgtgaaagccggagaagagagcgtggcacaggtcagcggggtacgggaacaggccatactgacacaggccattcgcagtgagctgaaaacacagggcgtgctcggacgcccggaggtaaccatgaccgccctgtcgccggtctggctggacagccggagccgttatctgcgggatatgtaccgtccggggatggtgatggagcagtggaacccggagacacgcagtcatgaccgctatgttatcgaccgggtgacggcgcagagtaacagcctgaccctgcgggatgcgcagggtgaaacgcaggtggtgcgtatttcctccctggacagcagctggtcgctgttccggccggaaaaaatgccagtggcagacggcgagcgactgagggtgacagggaaaattcccggactccgcgtctccggcggtgaccgcctgcaggtggcatccgtcagtgaagatgcgatgacggttgttgtgccggggcgggctgaaccggccaccctgcctgtgagcgattcaccattcatggcactgaagctggagaacggctgggtggaaacgcctgggcattccgtcagcgacagtgcgaaggtttttgcctccgtcacacagatggcaatggacaacgccaccctgaacggtctggcccgcagcggtcgtgatgtccggctgtattcctcactggatgaaacccgtactgcggaaaaacttgcccgccatccctcctttacggtggtttctgagcagataaaggcgcgtgccggtgagacattgctggaaaccgctatcagtctgcagaaaaccgggcttcacacgccggcacagcaggctattcatctggcgcttcctgtggtggaaagtaaaaacctggccttcagcatggtggacctgctgacagaggcgaagtcgtttgctgcagaaggaaccagttttactgaactgggaggggaaatcaatgcgcagataaaacgcggtgatttactgtatgtggatgtggcaaaaggctatggcacaggcctgctggtttcccgtgcgtcgtatgaggcagaaaagagcattcttcgccatattctcgaaggtaaggaggcggtcacgccactgatggagagagtacctggcgaactcatggagaaactgacatcaggacagcgtgccgctacccgcatgatactggaaacgtccgaccgtttcacggtggtgcagggctatgccggtgtgggtaagaccacacagttccgggcggtgatgtcagccgtgaacatgctgccggagagtgaacgtccccgtgtcgtggggctggggcccacgcaccgtgcggtcggtgagatgcgcagcgccggcgtggatgcacagacgctggcgtcctttctgcatgacacgcagctgctgcagcgcagcggagaaacgccgaatttcagcaacacgctgttcctgctcgatgagagctctatggtgggcaataccgacatggcacgggcatacgccctgattgcggccggtggcggtcgtgccgtggccagtggtgacacggaccagttgcaggccatcgcgcccggtcagcctttccgtctccagcagacgcgcagtgctgccgatgtggccatcatgaaggagattgtgcgccagacgccggagctgcgggaggcggtatacagcctgattaaccgggatgtggaaagggcactgtccgggcttgagagtgtgaaaccgtctcaggtgccacgtcaggagggcgcatgggtaccggagcactccgtgacggagttcagtcacagccaggaagcgaaactggcagaagcgcagcagaaggcgatgctgaaaggtgaggcttttccggatattcccatgacactgtatgaagccattgtccgcgattataccggcaggacgccggaagcacgggagcagacgctgattgtcacgcatctgaatgaggaccggcgcgtactgaacagcatgattcatgatgcacgggaaaaggccggtgagctgggaaaagagcaggtcatggcgcctgtcctgaacacagcgaatatacgcgacggggagttgcgtcgtctctccacctgggagacacatcgggacgcacttgccctggtggataatgtgtatcaccggattgccggtatcagcaaggatgacgggctgataaccttgcaggatgcggaaggtaacacgcggctgatttcgccccgggaggcggtggctgaaggcgtcacactgtacactccggacaccatccgggtgggaaccggtgaccggatgcgcttcacgaagagtgaccgggagcgcggttatgtggccaacagcgtctggacggtgacagcggtttccggtgacagtgtcacgctgtcggacggacagcagacccgggtgattcgccccggtcaggagcgggcagagcaacatattgacctggcctatgccatcaccgcccacggtgcgcagggggcaagtgaaacctttgccattgcgcttgaaggcacggaaggtaaccggaaacagatggccggttttgagtcagcctacgtggccctgtcgcgtatgaagcagcatgtgcaggtgtataccgataaccgtcagggctggacggatgccattaacaatgccgtacagaaaggaactgcccacgatgtgctagagccgaaatcggaccgggaggtcatgaatgcagagcggctgttcagtacggcgcgggagctgcgggacgtggtggccggccgtgccgttctccgtcaggcagggctggccgggggagacagtcctgcacggtttattgcacccgggcgcaaatatccgcagccgtatgtggcactgccggcttttgaccgtaacggcaagtcagctggtatctggctgaacccgctgaccacggatgacggaaacgggctgcggggcttcagtggtgaaggccgggtgaaaggcagcggggatgcgcagttcgtggccctgcagggcagccgtaacggagagagcctgctggctgataatatgcaggatggtgtccagattgcccgtgataatcctgacagcggtgtggtggtaagaatcgccggtgaaggtcgtccgtggaatcccggtaccatcaccggtggtcgcgtgtggggggatatcccggacaacagcgttcagccgggagccggaaatggcgaaccggtcacggcagaggtactggcacagcggcaggctgaagaggccatccgccgtgaaacggaacgccgtgcggatgaaattgtccgtaaaatggcagagaacaaacctgacctgccggacggcaaaacagagcaggctgtcagggatattgccgggctggagcgtgacaggtctgccatatctgaacgggaagctgcgctgccggagagtgtactgcgtgaaccacaacgggtgcgggaagcggtccgggaggttgcccgggaaaatctgctgcaggagcgactgcagcagatggagcgggatatggttcgtgacctgcagaaagagaaaaccctgggcggagactga

SEQ ID NO: 373249 - DNA, 747 bp, Salmonella enterica
atgacaacggataacacgaacacaacacgtaatgattcactggctgcccggaccgatacctggttgcagtcgttgctggtctggtcacccggacagcgggatatcatcaaaacggtggcactggtgctgatggttctggaccatgcaaaccgcattctgcatctggaccagtcgtggatgtttctggtcgggcgtggggcctttccgctgtttgccctggtgtgggggctgaatctgtcccgtcatacgcatatccggcaggaggccattaaccggctgtggggatgggcggtgattgcccagttcgcatattatctggccggctttccctggtatgaggggaatatcctgtttgcctttgcagttgcggcacaggtgctgacatggtgtgaaacgcgcacctggtggcgttccgcagaggccatgttgcttctggcaatgtggttgcctttctccggcaccagttacggcattgccgggctgctgatgctggcagtcagccacaggctgtaccgggcggaagacagaatggaacgtctggcgctggtcgcctgcctgctggctgttattccggcgcttaaccttgccaccagtgatgcagcggcggtggccggccttgtgatgacggtgctgactgttggtctggtgtcctgtacagggaaatcactaccccgtttctggtacggggattttttcccgacgttctatgcctgtcatcttactgtgctgggcgttctggctgtgtga

SEQ ID NO: 373250 - DNA, 861 bp, Salmonella enterica
atgaaaattacggatcacaaactccctgaaggtattgccctgacatttcgtgtcccggaaggaaatataaaacatcctttgattctcttatgccatggattttgcggtatccggaatgttctgctgccttcctttgcgaatgcgtttacagaagccgggtttgcaacgattacttttgattatcgtggattcggtgagagtgaaggggaacgaggtcgtctggttccggcaatgcagaccgaagatattatttcagttatcaactgggcagaaaagcaggtatgtattgataatcaacgtataggattatggggaacatcgctgggtgggtgtcatgtattcaatgcagctgcgcaggataaaagagtgaaaagtattgtcagccagctggcttttgctgacggtgaggttctggttaccggagaaatgaatgaactggagaaagcttcttttctgtccacgctgaataaaatggcagaaaagaagaaaaataccgggaaagagatgtttgtgggggttacccgggtactgagtgataatgaatcaaaggtattcttcgagaaggtaaaaggtcagtatcctgaaatggatataaaaatacctttccttacggttatggagacgttgcaatataaaccggcagagagcgcagccaaagtacagtgcccagttttggttgttattgccggccaggatagtgttaatccaccagaacagggaagagccttatatgatgctgttgcttctggtactaaggaattatacgaggaagctgacgcatgccattatgatatttatgaaggcgcgttttttgaacgtgtggcggcagtacagacgcaatggtttaaaaaacatctttaa

SEQ ID NO: 373251 - DNA, 558 bp, Salmonella enterica
atgacagagcagaaacgaccggtactgacactgaaacggaaaacggaaggggaaacaccgatccggagccggaaaaccatcatcaatgtcaccacgccaccaaaatggaaggtgaaaaagcagaaactggcggagaaggctgcccgggaagcagagctggcggcgaagaaagcacaggccagacaggcgctgtccatttatctgacgctgccctcgctggatgaggcggtgaacactctgaaaccctggtggccgggattgtttgacggtaacacgccccggcttcttgcctgtggtatccgggaagttttactggatgaggtgtctcagcggaatatcccgctctctcataaaaaactgcgcagggcactgaaggccatcacccgttcagaaagctatcttggcgccatgaaagccggtgcctgccgctatgatacagaaggctatgtgacagaacatatcacacaggaagaagaacagtatgcgcaggcgcgcctggaaaaggtgcgcagacagaaccggatcaaggatgagctgcgggcgatcctggcagaataa

SEQ ID NO: 373252 - DNA, 204 bp, Salmonella enterica; identical to SEQ ID NO: 38990

SEQ ID NO: 373253 - DNA, 462 bp, Salmonella enterica
atgaagaaatatataccagtggtattatttgttttttcatgtcaggtattttctgctgatattcatggacggggcgtgcgtgttctggatggcaataccattgacgtcatgttatctcagcatccggtgcgtgtccgtcttgttaatattgatgcacctgaaaagaaacaggaatatggacggtggtctgaaaaaataatgaaatctctggttgcgggaaaaacggttactgtcacatattttcagcgagatcattatggtcgtattctcgggcaggtttatgcaccagacggaatgaatgttaatcagtttatggtccgtgcaggcgatgcatgggtttatgagcagtacaacaccgatcctgttcttcctgtcctgcagggagaagtacgacagcagaaacgtggtctgtgggcagacagcgctcctgttccgccctgggtatggcgctcacggaaataa

SEQ ID NO: 373254 - DNA, 207 bp, Salmonella enterica
atgaagtaccttaacactactgattgtagcctcttccttgcagagaggtcaaagtttatgacgaaatatgcccttatcggggtgctcgccgtgtgcgccacggtgttgtgttttttactgatattcagggaacggttatgtgagctgaatattcacaggggaaatacagtggtgcaggtaactctggcctacgaagcacggaagtaa

SEQ ID NO: 373255 - DNA, 249 bp, Salmonella enterica
atgtcgcagacagaaaatgcagtgacttcctcatcaggtacaaagcgagcatatagaaaagataatcctctgacgcttgcagaacgtcagcaggcatccctggcaagaaaacgagccacacataaagaactcagagtgtttattcctgctgcgttaaaagcgcaattgcaggagatgtgtgaagctgagggtgttactcaggctgagatgattgccgaactgataaggcagaagagtgcttttagctaa

SEQ ID NO: 373256 - DNA, 858 bp, Salmonella enterica
gtgactgatcttcaacaaacgtattaccgccaggtaaagaacccgaatccggtgtttacaccccgtaaaggtgccggaacgctgaagttctgcgaaaaactgatggaaaaggcggtgggcttcacctcccgttttgatttcgccattcatgtggcgcatgcccgttcgcgtggtctgcgtcggcgcatgccaccggtactgcgtcgccgggccattgatgcgctgctgcaggggctctgttttcactatgatccgctggccaaccgcgtccagtgctccatcaccacgctggccattgagtgcggactggcgacagagtccggtgcaggaaaactctccatcactcgtgccacccgtgccctgacgttcctgtcagagctggggttgattacctaccagacggaatatgacccgcttatcgggtgctacattccgaccgacatcacgttcacaccggcactgtttgccgctctcgatgtgtctgaggtggcggtggcttccgcacgccgcagtcgtgtggaatgggaaaacagacagcgcaagaagcagggactggatgcactgggtatggatgaactgatagcgaaagcctggcgttttgtgcgtgagcgtttccgcagttaccagacagagcttaagtcccgtggaataaaacgtgcccgtgcgcgtcgtgatgcgaacagggaacgtcaggatatcgtcaccctggtgaaacggcagctgacgcgtgaaatctcggaagggcgcttcactgccaatcgtgaggcgataaaacgcgaagtggaacgtcgtgtgaaggagcgcatgattctgtcacgtaaccgcaattacagccggctggccacagcttccccctga

SEQ ID NO: 373257 - DNA, 153 bp, Salmonella enterica; identical to SEQ ID NO: 18541

SEQ ID NO: 373258 - DNA, 270 bp, Salmonella enterica
atggcacaggttaatatgagtttaagaatcgacgctgaactgaaggatgcttttatggccgctgcaaaaagcatggatcgtaatggctctcagttaatccgggattttatgcgccagaccgttgaacggcagcataatacctggttccgcgaccaggttgcggcaggacgtcagcaactcgagcacggcgatgtgcttccccatgacatggtcgaatcatctgctgcagcatggagggatgaaatgagcaggaaggtcgccggtaaatga

SEQ ID NO: 373259 - DNA, 282 bp, Salmonella enterica
atgatggagatattctggaccatgctggccagccaggacaggaagcgcattcgtgagtacattgcggagcagaacctgatggccgccattgaactggacgaacggattggttattcagccagcagcctggccgggcagccgtataaaggccgcaacggtcgtgtggaaggtacccgggaactggttattcacccacattttgttctggtttatgaggtcgacagccagtggggaaaagtgtatatcctgcgagtattgcatactgcacagaagtggccatag

SEQ ID NO: 373260 - DNA, 348 bp, Salmonella enterica
gtgccctttgagcagaaaaaagcccgggccattgccctgatggacagcaaaaagatgtggcggagcaattatgcccctcctcttctgcgtattctctggcggctgggtatccggcttccgccattaccctttatgccgttctggcaggtcgcggtgctgacggggggcttatggggcacttcctggggatgtgcaatgtggtttatctactgggggccgtcaggaatggtggcaggtgaggccattattataagtatcacgggtggttttttgttcggactgctcacggcctctttccactggtggcgcaggaaagttaaccggctgccaccatgggatgacgtgtaa

SEQ ID NO: 373261 - DNA, 591 bp, Salmonella enterica
atgactcagagccgccgaccgtcgccactgcagcggagagtgctgattgtgctggctgcccttgatgaaaaacggccgggacccgtgctgacgcgggacatagaacgggtgctggagcgaagcggggaagccccggtctacgggccaaacctgcgcgcctcctgccgtcgtctggaggatgccggctggcttcgtaccctgcgcgctccgaacctgcagctggcagtggagctgacggacgccggccgggccgtggcacagcctctgctgctggcagaacaggaccgcctccgggcagaacagcgtgcggcagaagtcgtcgtactgccgctggtcccggcagcaggtctgcccgcagacggcacttctgccactgatctggcggtagagctgaacggcataacgtatcaggcctgccgtggggattttgtggtgcgtctcgacggcagcacctgtctgcagttatggaataaagaaggcagggtggtatgcctggagggcgatccgctggaagtggcgcagtggctgcaggcctgtcatgacgcaggaatagaggttcgcgtacagataaatgaaagtagcgtcccgtaa

SEQ ID NO: 373262 - DNA, 255 bp, Salmonella enterica
atggatgaagaaagggtgttttcactcagctatgagcaactaacccgaatagcggaaaaaaatatccgtgaatgtgggctggacaaccagagcgccaggtgtattagtgaattgaaggcctcagctctgctgtggttgtggtatgaactggccattcatggtgcgccacagaacaatcacgcacaggcccgggaacgcatcgataccgattatcagcgcctcaaaaaactcatctggtcggagggtgacagttaa

SEQ ID NO: 373263 - DNA, 480 bp, Salmonella enterica
atggccgatccattcaatctgcagaccgatgtggtcaggcagcatacggttccccgttttttactgaagcatttcagtacgccgggaaagggtaagcggcagcgcttatacgcctttgacaaggctgccgggcgcgcctatgccaccacgccggatgacgcgaccgtccgcaacacgttctacaacctcgataatcacccggaccgtctgagtcttgaaccactgctggggatttacgagcaccacgcggcaccggtaattgcagccctgctggcgcacagggatattcgcaggctgacagatgatgaacgctacaggctggccgtgtttgttgccgtgcagcgcgcacgaaccttcggtgaactggagcgtatctcaggcatgatttcggtgcttaccgataagatggaggccatcggctcgacgtataggaaattgaaaaaccagacgataccgctgtccacgccttatgccacgtga

SEQ ID NO: 373264 - DNA, 1209 bp, Salmonella enterica
atgacccgaagtggtggtgattttcagccccgaccgctgaaacgcctgttcacagccaaccagtgctggacatccttcctggatgcgggcggcctgcgcgatatcgaggttgaggctgtcacaaaaatgctggcctgcggcacgcggatactgggtgtgaaggaatacaactgcgataaacctgagtgcccccacgtcagatacgtcactaactcatgtggcagccgtgcctgcccgtcctgcggaaaaaaggccacagacctgtggatagcgacacagctgaatcgtcttcctgactgcgactgggtgcacctggtcttcaccctgccggacacgctgtggccggtgttcgaaagcaaccgctggctgctgaatgacgtgtgccgtctggcggtggagaatctgctgtatgcagcccggaaacggggtctggaacccggtatcttctgcgccatccatacgtatggccgtcgtctcaactggcatccgcatgtgcatgtgtcagtgacctgcggaggtctgaataaacacggacactggaaaaagctgagcttcctgaaagacgcgatgcgttcgcggtggatgtggaatatgcggcagctgcttctgaaagcgtggtcagaaggtctggcgatgccggaatcgttgtcacatatcacgacggaatcacagtggagaagcctggtgctgaaagccggcggaaaatactggcatgtgtacatgtcgaagaagacagccggagggcggaatacggcacgctacctgggtcgttatctgaagaagccaccaatagcggcttcccggctggcgcattacaacggaggagcgagtctgagcttccgttacctggaccacaaaacgggagaaacggcgacggaaacgctgacacagcgggagctggtcgcgaggctgaaacagcacatcccggagaagttttttaagatggtgagatacttcgggttccttgccaaccgggtgtgtggagagaagctgccgcaggtgtaccgtgctctggggatggataagccggaaccagtggcgaaagtgtgctatgcacaaatggtgaaacagttcctgagtcgtgacccgttcgaatgcgtgctgtgtggcggccggatggtataccgccgggccattgcggggctgaatgtatcagggctgaagaaaaacgcgcgggatatcagtctgctgaggtatatgccggcctga

SEQ ID NO: 373265 - DNA, 273 bp, Salmonella enterica; identical to SEQ ID NO: 80730

SEQ ID NO: 373266 - DNA, 816 bp, Salmonella enterica; identical to SEQ ID NO: 6090

SEQ ID NO: 373267 - DNA, 564 bp, Salmonella enterica; identical to SEQ ID NO: 38989

SEQ ID NO: 373268 - DNA, 345 bp, Salmonella enterica; identical to SEQ ID NO: 36035

SEQ ID NO: 373269 - DNA, 1056 bp, Salmonella enterica
atggacatgtccctgactaaaccggtaagcgcggaacaaccctgcggccccgatccggagtacgatccggaatacctgctgctgttcagccgcgccgccccccaggcggaggcgcaatatggtgattttgtcagtacgccggaagccgtgaactggccggaaattgaacgtgatgcgcgccgtctgctcacgcgcagtaaggatatccgggtgttgatcctgctgctgcgcagtcgcatccagcaggctggcgcacagggactggcggaaatgctcacacaactggcagaactgagcgtaatctggtctgatgcactccatccacagctgcttaccggcgaaggcgcatccgcagaatctattgaagatgcgtcgctggcgcgcagtaatgccctggcggcgctgctggatcacgaaggcgtgatggcggacattcgcggtattacgctgtcaaacagtgccgccctgcgcctacaggtacgggatgtggagcgcgcgttatccgctccccgcccggctgatgcgctggcccccgaatccgtccgccagcaactggccgacctcgaagcccgtggggcattaccgctggcggcgtttcgcgaagcgcaggaaagcgcagaacgcctgcaagtgtgggcgcgtgagacattaggcgatctggctccagatttttcacgcctgcggcagttgttagcgctgctgcctgacgtggtacagacaaccacaccggaaatccctccgtcgccagcgccagtgccagaccccgcaggcacggttatggataatgccgttccggcacgggcagaggatgtgccgcctgtcaacgcgccacccggtatatccctcccacacaatgctgaaccggggccaattcgcgatcgtaatgatgcgctggaacgcctgcggtgcattcgtcgctggtttgagagcagtgaacccagtagcccgaccatcccactgttacgccaggctgaaagactggtgggaaaacggttctcggaggtgatcaatgagatcccggtggagttgctggagaagtgggatgccctggaatga

SEQ ID NO: 373270 - DNA, 996 bp, Salmonella enterica
atgaccggcgctctcgaccaggcgcagaaaaccccctggcgttacggattcctgaacctgatgcggcgcgtggatgcccagctctgtgatactccggcaggcagtatctggcagccacggatggaaaaattccgtctgggacagacgccgacgatgacctttgcgccacgggaaatcgcccaggtcagctggcaggatggacgcctgcacctgagcctgtacagcctcggactatgggggccaaacggcccgttgccgctgcactataccgagctggcactgaaccgctcagagagtcgtcacgatccgacgctggttcatttttccaatatttttcaccaccgctggctgacgcagttctggcaggcatggcgcagcgcccagtccgctggtggcgggctggacaaaccggaacacgaccgttttgcgttttatatcgccagtctcagcgggcaggatctacgggaaagcgccgaaagcccgctgtcagatcatgttcgcctggcagcctccgcccatctggtacgcgaatcgcgcaatcctgacgggctggccgccacgctggcgcactatttcagcgtaccttttgcggtgaaagaattcgccctgcactggataacggtggcgaacgatgaaatcacccgtctgggcacgcccgcgcagtcttcggtgctgggcaacggggcgcttatcggccaggccgtaccggatatgcagtacaaattccggctaattatcggcccgctcacgctggaggattacctgcgttttctgcccggcggcaacaatctgcccgtgctgacagaactggtgcgtacgttcatcggttttgaatattgctgggaaattgagctgcagttgaagcctcatgccgcaccgcctgcggtgatcggcggcgcgcagcggcttggctggacggcctgggcaggtaaagccatgcatgaccgtccggtgaccggcatgatttttgaacctgaacacggcttaacccactga

SEQ ID NO: 373271 - DNA, 1884 bp, Salmonella enterica
atggatccacggctactggagtattacaaccgcgaactgagctacctgcgggagaccggtgctgagttcgccaccctccatcccaaaattgccgcccggctggggatgcagggaaccgatattgccgacccgtatgtggaacgcatgatcgaggcgttcagctttctgagcgcccgcactcagctaaaaattgacgccgagtttccccgcttcacacagcggttactggaagtcgtcagccccaattacgtcacccccacgccatcgatggcagtggtaaagctgtatcccgatacgcaggaaggcgacctggcgaaaggggtcaccgtgccgcgcgataccgcgttcgtttcccccatcccggaaggcgaaaataccgcctgccagtttcgcagcagccaggacgtcacgctgtggccgctgtccatcgaggaggtacgcctgaccgccgcgccgccggatatgcccgccctgcaccgctatctgccgcctaatattcatgtcgccggggcattgcgcatcaccctgcgaaccttcggggaattgactttcagcgagctggccggtccggcacggctgcccttttacctctgcggcgaagaacgcattgcgtcacacctgtttgagctgctacataccagcgccgtcgccacactggccggtgaacccggtcactttgacggcgaactgaatgtgaatcttcaacacccggtggcgcacgaagggctggagccagggcaggggctgctgccgctcgcctggaacgtgtttcatgggcataatctgctgcatgaatttttcgcctgtccggaacggttttacttcttcaccccgaccggattgtctgccggtctacaaaaggtgcagggcaatgtggcggaaattgtcatactgcttaaccgcctgccgccggactggctgattcatcagacggacgctgcacagttcagcctgttctgtacgccggtgatcaacctgtttccccgcaccaccacccggattgaagttactcacagcgtgacggaacagcatctggtggtggatcgtacccgtccgctggattacgaggtgttttctgttcaggaagtcgaaggcctggaagcggaaaccacacggaagatgatttttcgtccgctgtatcacacccgtaataatgacgaaggcaaccacgggcgttatttttcactgcgtcgtgagccgcgccgctcgtcagaaaacgcccgccgctatggcacccgaaccccctataccggctcggaagtcttcctgtcgctggttgatcagcatgaagcgccctacccggaaaatctgcgccatatcaccgtcacggcaatggtgactaaccgcgatctgccctgccttattccacgtaatggccgggatgatctgaccgtagatgcggcgattccggtggcgggcgtgggtcttatcaaaccgccgcgcccgccgcagccgccgctggctgaacgcgaaatggcctggcggctgatccggcagttgtcgtttaattatctgccgctggccgatctggatcaccgtaccggcggtcaggcgctgcgcgatctgctgaatctgtttattccggctcacgacagcccgcagtcgcgccaggtgcgcagcctgattggctgcaaaaccaccccggtaacccgccgcctgcccggctccggcctgttggtctatggccggggcgtcagttgcgaactgaccgtggacgaagaaggattttccggtatcagtccttacctgttcggtctggtgctggaacactatattgcccgccatgtttccattaataccttctcgcagatgacgctgcactcgatgcaacgcgggcatgtcatgacctggccggtcagaaccgggcaacgggggagcgtatga

SEQ ID NO: 373272 - DNA, 825 bp, Salmonella enterica
atgaaaaaaactgacacgcttcctgctaccctgtccgcgctgatacaggaatactctattgcggaggggattcagatggcggagcagcaggttcgggaaaatccggcgaaagcgctctgccgccacagcctgtttcagttgctgtgtgtggccggagactggtcgcgggcgctacaccagcttcagctatgcgccaggatggaggccaattatacccaggaggcccggctgtaccgggagctggttcgctgcgaaatgttccgccacaccgtttttcagggtgaacaacgacccggttttcttctgccgcagcccgtttgggtggagtcactgctggcggcactcgcctgtcatgacgataccggtgaggttgataaacaccgtaataccgcactggaagccataacagacacgggcgggcagtggaacggcggcgcatttgactgggcgagcgacagcgattcccgccttggcccggtacttgagctggtcaccggcggcgtgtatatctggctaccgttttcgcaaatacgctcgctggaatcgccgcaaccggcgcgcctgaccgatctgctgtggaaacccgttaatatcaccctggtgaatggcgatacgcacggcgcctggctctttacccgttacagcggttcggaaagtgcatccgacgccctgcgtctgtgccgggaaaccgcctggcaggatggccccggcgaaaccaccgtgcgggcgctggggcagaaagtctggctgaccagccacggcgatatcagcctgctggacatggcccattgtacctttcatgctcaggaaaacgatggcgcatga

SEQ ID NO: 373273 - DNA, 2640 bp, Salmonella enterica
atggaaactcctgtttcacgcagtgcgttgtatggaaaactggccggcccactattccggtcgctggaatcggcaacggcattttgcaaactacgctctaatccctgggttgagctgactcactggctgcaccagttaacacagcagcccgataacgatattctccacgttcttcggcattaccagatccctctttctgatgtggagaaagcgttactccggcaactggatatgctgcccgccggggccagcgccattagtgatttttctcaccatatcgatctcagcgttgaaaaggcctggatgctggcgagcgtccgttacggcgataacaaaattcgcagcggctggttgctgctggccttgttgaccacgccagaactgcgtcgggtactgagcagtatctgcgcgccgctggccacgcttccggttgatgaactgacggaaatactgccctcgttgatcgaaacatcgccggaagcgcaggagcgcccttacgacggctccggcctggcatcagccattcccggtgaaagcagtcaggcgattcccaacggcgggcaggatggtaaatccgcgctggcaaaatactgtcaggacatgacggcactggcgcgcgacggcaaaatcgacccggtgacggggcgtgagcatgaaatccgcaccatgacggatattctgctgcgccgtcgccagaataatccactactgactggtgaggcaggcgtcggaaagacggcggtcgtcgaaggttttgccctcgcgattgctcagggggaagtgccgcccgcgctgcgggaagtacggctactggtgctggacgttggcgctctgttggccggagccagcatgaaaggcgagtttgaatcgcgtctgaaagggttactggaagaggccgggcgctcgccgcagccggttattctgtttgtcgatgaagttcacactctggtgggcgcgggcggcgcatccggcacgggcgatgccgctaacctgctgaaaccggcgctggcgcgcggcaccctgcggactatcggcgccaccacctggagcgaatacaagcgccatattgagaaagatccggcgctgacccgtcgttttcaggtgttgcagattgccgaaccggaagagatccccgcaatggaaatggtgcgtggtctggtggatacgctggaaaaacaccataacgtactgattctggatgaggcggtacgtgcggcggtacagctttctcaccgctacattcccgcccggcagttgccggataaggccatcagcctgctggataccgccgcggcccgcgtggcgctgacgctgcacacgccgcctgccagcgtacagttcctgcgccagcagctaaaagcggcggaaatggaacggtcgctgttgcagaagcaggaaaaaatggggattcagtcagatgagcggcgcgatgcgctgacggcgcgaattttctcgctcaacaatgaactgactgcatccgaatcccgctggcagcgggagctggaactggtacatacgttgcaggaactgcgtgtcgcagagtctgatgctgatgacaaaaccacgctgcaacaggccgaaacggcgctaagggagtggcagggcgacgcgccggtggtgttcccggaagtcagcgcggcggttgtcgcggcgattgtcgccgactggaccggtattcctgccgggcgcatggtgaaagatgaggccagccaggtgctggaactgcctgcccgactggcgcaacgcgttaccgggcaagacggcgcgctggcgcagattggtgaacgtattcagaccgccagggcgggactgggcgatccacgcaaaccggtgggcgtgtttatgctggccgggccgtccggtgtcggtaaaaccgaaaccgcgctggcgctggcggaggctatctacggcggtgagcagaacctggtaaccatcaatatgagcgagttccaggaggctcacaccgtttccacgctgaaaggcgcgccgcccggctatgtgggctatggcgagggtggtgtgctgacggaagcggtgcgtcgccacccctggagtgtagtgctgctcgacgagatcgaaaaagcgcaccatgacgtccatgaactcttctatcaggtgtttgacaagggcgggatggaggacggcgagggtacacatgtcgatttcaaaaacaccacgctattactcaccaccaacgtgggttccgacctcatcagccagatgtgtgaagatccggctttaatgcccgacgctacggggcttaaagaggcgctaatgccggaattacgcaagcatttcccggcggcatttctgggccgcgtgacggtgatcccttacctgccgctggacgaaacgtcgcgtggcgtgattgcccgtctgcaccttgaccggctggtggcgcggatgggcgaacagcacggcgtgacgctgacgtatagcgaggaactggtcgcacatattgtggcgtgctgtccaatgcatgaaacgggcgcgcggttgctgattggctacatcgaacagcacattctgccacgactgtcgcgctactggttgcaggccatgacggaaaaagccgcgatcaggcagattgatatcggcgttaatggtgatgagcagattgtttttgagatcgtttgctga

SEQ ID NO: 373274 - DNA, 447 bp, Salmonella enterica
atgaccataagcccaacttttcatctgttacctggtattgttctgctcttttcacaatatgctgtagcctgggaagtcagttgcccggctgttattgatactcagtcttctgctgtgagcctgaagtctgatgtcccagcggcgtggcagctttctccccgatatatgtcgcgtttatggttaagtagtattggggtaacgcagggtaaacctgaaaacctgatggatctcaaaccagagactaaaaaagtaaacggtgaaaattggtctgtatgggaaacagaacgtgttagcgataaagaaaccgatcgctattgggtttcgtgtatttatggtcatgaacagatatggttgacgcaaccaatacctgcttcttctactcgctgtaagactcataattttgagggatcgccagaagaccagtctatatcttttatctgtaattag

SEQ ID NO: 373275 - DNA, 486 bp, Salmonella enterica
atgtcttatgacatttttctgaaaattgacggcattgacggcgagtcaatggatgacaaacacaaaaatgaaattgaagtactgagctggcgctggaatattcatcaggaatccaccatgcacgccggtagcggtctcggttccggtaaggtctccgtcactaatctttcatttgaacattacatcgatcgcgccagcccgaacctgttcaaatactgctcttccggtaagcacattccgcaggccattctggttatgcgtaaggctggcggcaatccgctggagtacctcaagtacactttcacagatctgattgtcgccgtggtttctccgagcggcagccacgatggtgaaatcgcctcccgtgaaacggtggagctctccttcagcaccgtgaagcaggaatacgtggtgcagaaccagcagggcggcagcggcggcaccatcaccgcaggctacgacttcaaggccaacaaagaaatttaa

SEQ ID NO: 373276 - DNA, 732 bp, Salmonella enterica
atgagtaagttacagtttgaccctcatagcccattggctgaatatttttccagaacaaagatagacggggagtttatcaaaaacgattatggtgatagaggtgaatttgtcataaatagtgaaacgggagctatttcattattgttaaaatgtaaatatacatgggttaaaaatagcgatgtgaaggacgactggacgtttatagaaaaatcattgtttatcattaatgtttatacgacagtttgttcagaatggaatggtaaaatatttttttctgtttcaggaagttcagatttcgccaggaagtttcaggggaagcctctgccatttgatatacagatgatccctgtcaatcatggtgagcactgggatgtgactgcattgaaagtgagaccaggggatgatgtaaggacttatgttatctggggttctcgtatcctccatattgactccgaagatgtggtcgcagtgcggaaatgtcttgatccagcccagacagtttgctctaaccagataaacgtacctcatgaaattggacatatgattggttatcatgacgatgagtatgctctggataaatcaggtaaagcaacaacggcatatagatcggatgctgccgcattaatgaatattggaatggagcttcgaagtcgttacctggaacatgttaacacatttctgaatgtaataattcctgatacttactttacagttttgagtgtaggtaaatga

SEQ ID NO: 373277 - DNA, 435 bp, Salmonella enterica
atgatacaaacatgtattctgctcattcattttctgatgcatggcgtaatgtttaatccccaccctcaaccctctgtcactgcgataaatggtatgaaatatgatctggtaaatgtaacaaaaaaagatgatcaggtaactcaatattatgaaaaaaataatatacaaaacggaggggttgatgcttcttttgttgaaaaatatggcaggcctgaacatgagtttgtcagacctcgctatatgtttgttggggagtattatattgggctggaaaaaacctataggtcaacggaccccagatttagcaatgtactgattaaagaaatgttctggcatctccatgatgatttgaacttgacatgttggtttcattataaggacgagcagtggcgagtgttctcctatattttttggccacccggcgctgtattctag

SEQ ID NO: 373278 - DNA, 2220 bp, Salmonella enterica
atgagttttgtatctacgggtaataaatcagctggaaatggtggacccgtcatcaccacgccgccaataactggcgaaagtggcgatatgagcacaggttcagtcgcaaccggtgttgctgatgcagccgaacagatggcagaacaggcagcggcggagctgtttggtgcgctgccggagccgtcagggctggtgaaagcggcagtaaccgcagcgcaggccgccgcagcggcggcagggatatcggatatagttagtgctgcccaggatacggcggcgtcgcttgctgccggtgggccgggagcgcacaacgtcacggttagcggtagcgctgtgccgccgcagatgctgctttttgctggtataaatggttcggagaaacttggcagcctgtttacctacattgtacagctaaaaacgcccgacaccctgaacctgggctatgtctccccggcggccaacctgccgctcaaaccgatggtgggcaaagatctgtgcgtcaacatcgaactggatggtggcggtaaacggcatatcagcgggctggtcacggcggcgcgggtggtgggccatgaagggcgttcggttacctatgagctgcgtatggagccgtgggtaaaactgctgacccataccagcgactacaaagcattccagaataaaaccgtggtggatattctggatgaggttctggcggaatacccctacccggtggaaaagcgactggtggaaagctacccggtacgcacctggcaggtgcagtacggtgaaactgattttgattttcttcagcgactgatgcaggagtggggcatctactggtggtttgagcacagcgaggacagccacacgctggtgctggcggacgccatcagcgcccacaaagcatgtccggactcgccgctggtcgagtggcaccaggaagggctgaagctggataaggagtttatccacaccattacagccagtgagcgactgcgcaccggacagtgggtgctggacgattttgactttaaaaaaccacgctcgcggctggcaaacacagtggcggacccgcgcgaaaccggtcacgcgaactacgagcactacgaatggccgggcgattattttgacaaaggcgagggcgagatgttgacgcgcatccgtatggaagcgcagcgcagccccggcagccgggttcacggtgccgggaatatccgcaccctgatgaccggatattcgttcacgctgacgaaccaccccactgccgaggtcaaccaggagtacctgctggttcagactacgctgtttgtgcgggacaacgcgcagcacagcggccaggagcagcacttcacctacgtcagcacgttcgaactgcatcccacccgcgaagtctaccgtccacagcgaacaatagacaaaccgcacactaaaggcccgcagagcgccattgtcaccggcccgtcgggccaggaaatctggacggatcagtacgggcgggtaaaggtgcagtttggctgggatcgttacggcaaaatggatgaaaacagctcctgctggatacgcgtcagctacccatgggcgggcaaaggcttcgggatgatccagatcccgcgtatcggccaggaagtgctggtggatttcaaaaacggcgatccggatctgccgatcatcgtggggcgtacctacaaccaggacaccatgccgccgtggggactgccgggaatggcgtcgcagagcgggatattcagtcactcactatatggcgggccaacgaacggcaacatgctgcgttttgatgataaaacgggcgcggaggaagtgaagttccacgcggaaaaagatctcaacaccacggtgaagaataatgaaacgcatacggtaaatgctgaccggacaaagaccattatccataacgaaattacaaaagtgcatattgatcgcacggaagatgtttttggtaagcatactgagacgattaagggaaaccgcaatgtcaaggtgacgaaaggggatcagctcctgactgtggagaaagggatacgggaggtaacggtaaaaactggcaccagtactgaaacggttgaaaaagatatctctattacatccatttccggggctattcatctgacggcaaaaacacagattacgctaaccgtaggtaaaagctcactcaccatgaattcagacggcactatcacattgaacggccccacccatctggcactcaatccacagtaa

SEQ ID NO: 373279 - DNA, 432 bp, Salmonella enterica
atgcaataccttattaatgaaggacatttttccctgcccggaaactggcaggataacacgatgaacattctgacaccggtgctgagcgacattgcaggcgcaaacctggtggtcacgcgtgaaattctgccggaaggggcggagttcagtgattatctggcggtacagaagaagaaattccgtactgagctgaaggcgatgacattcacggtggaagaatcctgccatgtggaagagcgtccggcggaatactgggagtttagctggaacaacaacggaataacgatacaacagctactgctggtgatacttaacggtcgtcaggtgctgacgctgacctattcctcaacgcaggcgctggcagaggaagatcgtaaaacgatgcgggggacattgttgcattttcgttttgggatgccgcaggacaaataa

SEQ ID NO: 373280 - DNA, 849 bp, Salmonella enterica
atgccccttacgtgcgagcggcagactgtttacagaaatgattttgctgccctcagctatctgcggcagcggttcgcccggatcgtcgctgcaaatcactggatcggttacccgtgccactgcttttccttcaaaagtgacattgggcgaaccttcatgaatttctccggtatcagaggcccagcgggaaccaatggccatcgcggcaccgccgacaaatccccccgccagccctccagctccggcagcaacagtggcagcgagtacccccagcgcagcccctcccgtcgcaacgaccagtgcaccaaccgcaatccctacaataagtccgccaatcaacccaccaattgcgcccagaaaggaattgttatgaacaatatgatgtcccacacacgccggtatatctgtggggccagaaactgcgtgatctttaccccaggtatccataaaccagtcacccgctttggtacccagccatccccccagcatccctcccgccagtcctgcaaccagagggccgccaaatccagcaacggctttggctattccggctgcacaggttttggccgctgctgctgccagccctacctttgccgttgcccccaccatactgacgaccgtgattccgacactggcaacatgccctgtggtggcgatgttttctactgtttcggcattactgtcccgctggtccagttccgccagcttttcctgcgcgcttttttccgtcatccgttcgtccttaccactgcgtccgccgggttatttgtcctgcggcatcccaaaacgaaaatgcaacaatgtcccccgcatcgttttacgatcttcctctgccagcgcctgcgttga

SEQ ID NO: 373281 - DNA, 1248 bp, Salmonella enterica
gtggcggtagcgcgtggtctggcccatcgcgccggtatggacggcgatttttccctcgccgtcgtagcggaacgtttctgcgccgccgtctgcccggataaccgcgctgaccttttcatgcgggttgctctctcccggacggtactgccagtgcgtgctgcgcccttccgcatccgtcacgcccgtcagccgcagccagcggtcttccgcataatgcgtcgtccggcctgccgcatcggtatgcgccgtcaggctgccctgcgcgttataagcccactgttcgcggctgccgtccgggtaaatgacctcctttatctggccatcttcggtgtaacggtactgccatttctggtcattcacttcccggtgaaccaggttgccttcgctgttatagcggtatgccgccgtggtgcggtggtcccggtaagccgttatctgcccgaacgcatcccgctgccattcccgcttgcgcccgtcggcatccgtttcgctcaggatgcgtccggcataatcgcgtttaatctgtgtgacacgcccgcccggctgccggatgctcaccggatggtcatattcatcgcgcccccactccgtgatgcgccccagcgggtctcgctgttttatcagcagccatgtttcatcaaaccacagcgtggtgacggccccggttgcatcggtgtactcggttttgcgctctgccgggaagtaacggaaggtgtcgttatacagcccctcttcggtgcccgtcgccaccacccgcccttcatcgtcgtagcgcaggtgaaaatgtgtcgggccgttgtcgcgccaggaattcagccagccctgttcggtgtacgtgtaatgcagcgtgccgttaaaccgtgtctgcgcatcacgcagccaccactcatcgccgtggtgagtgtagtcataacgtaccagctcactgccgtccgcctcgtcgctgacgcggtaaatcagtccttccgggccacacatcacccgcaggcgcaggccgccgctgtgttcgacgtttgtcagatggcccacgccgttatagagaaagcggatttcgttgcggttacggtctttgatagcggacagacgcaggcggcgtgcgccgggggaaacgggtgtgaagatatagccctgctgcgtatgctcatcgaagatgacggcccgcctgcggttacccgtcaggcggtagtgcggcaccagcaggttgcggcagttgtatggctcctgcaccgtggaataggccggacataa

SEQ ID NO: 373282 - DNA, 615 bp, Salmonella enterica
atgtttaattggcttgcagaaaaatatattgataataagttgatatctaaagcaattaaaaatcttcaggttgaattctctcctgaacataaaaaatcactagagcatgcagttggtcttgcttattatttttatgctcagtcagaaaatgagtccgcaaaaaaaatagccgagactatgtctatatttctatttaatggtaattatgattattggacttggattgagagtgctttggcactacatgcgagaatagcaaggatagaaggtgatatagaaactcataaaaaattagttgatataatatggggagcttttgaaataggcgatgaaacaaaacaacggattaataaaaaaatatttatcagaacattgaaaggtggggatataggattcgataaagttacagcctgcatggaggatggcgatactatatctgaagttaattataggttctcttgtttaaggaaaatgatcttgataagagaggttggcgcgtctgaaacatatcctattgagcaggcagaaaaagatattgaagataacataattgccataaaaaaattgctttgttcagttgatgttaaaaaaatattaccattttcggatatgtaa

SEQ ID NO: 373283 - DNA, 753 bp, Salmonella enterica
gtgcgttaccagtggctggggatggcgctgtcagcgagtgagaagcgctacgcggacggcagcccggcgctgcgtgagcagtggcattaccggggcggttttgagctgctggcgaaggaggcgcgggcggcgaacgacgacaccagcgacttttatcccatactcatcggtccggatggcgcgccgcaggagatgtacagcgctaacgggcgaaaggtgtggcggcggcagcgaagcctgtgggggctggcggcggcgaatgacgcgtcgcctgacgcgcgtgagagctgtgacgcgggctttatgggccagtggcaggacgaggagagcgggctgtggtataatttacaccgctacatggactcacggacggggcagtatttaagccaggacccgctgaaactgggcggcgggctgaacacgcagtcgtatgtgcatgatccggtggggtggtgcgatccgtgggggttgatggactgtccgtcttcagcggaggcggagatattctatcggactatgtcagaagataattatgccacattacaaagtacagggcgtatgcctggaacaaccgaaacgacgatatcgccaacaagagtgttttctgaagcatatgatggtgttctggtaaaatttaatatgaaatcaggaactcaaaaatcacttgagaatataggtattagagatggttctaagttaactgaggtaatgtatcctgatatgcctagtcccaccaagactaaagggtggtga

SEQ ID NO: 373284 - DNA, 549 bp, Salmonella enterica
atgatggatagtagacagaaaaaattagttctttcggttattaataataaaccaatccacgagggaaaagtgtctgatgaggattttcttgccgaatttccatccggttgtgacaatgtcagtgagtttgtaactaaattattgattgaatcctgtgtttctatggatgcgcaatgtgttgaattatctctatatgtaggattccactttggtttttcaggtgctgatgagctcattttagataagcttctggtatgtgattttcattacagacatgatgaaattgtacgagctttagttctaataggagcatccacagatgagactgtcgatgctctttccaaatgcgctttaactgaatttgattatctatcagatgacagagatgacggcatatatactttgtcatggaattgtatatatgcgctggctaaaatagcaacaccttatgcgattaataaattgaaatggttatctgaatgtgatatccaggaaattaaagataaagcagttgaagtaataaaaaaatataaaataaatattatgtga

SEQ ID NO: 373285 - DNA, 570 bp, Salmonella enterica
atggatcaagtaagagcctattacacagaaaattttatcagagtgtatcaagcatattcagatgaaattgccgattccgtcttaaaaaataaaacttttgtttccccgccgtttaacatggcgcgtatgacctggattaaaccatcatttctctggatgatgtatagatctcactggggtacgaaagatcctggtcaaaaaagaatcctagctattgacatagctcgcactgactttgatactattttcgaaaagtcggtaattaacaaccatgacaaaaatcacaatttatcatcaaatagctggaaagaagcagtgaaaaaaagtgatattatcattcaatgggatccagaacgagatatttatttaaacaaacttaattaccggacaattcaaataggtctacgaaatgaagccgtcataaattatactaataaatggataaaaaacatccacgatgttactaaattagcatcaaaaatacattcacttgtactatcaggtaatttagaagaagcaatgttattattgccaatagaatctgaataccccactaaccatcaaaggtaa

SEQ ID NO: 373286 - DNA, 843 bp, Salmonella enterica
gtgcgttatcagtggctggggatggcgctgtcggcgagtgagaagcggtatgcggacgggagtccggctctgcgtgagcagtggcattaccggggcggttttgagctgctggcgaaggaggcgcgggcggcgaacgacgacaccagcgacttttatcccatactcatcggtccggatggcgcgccgcaggagatgtacagcgctaacgggcgaaaggtgtggcggcggcagcgaagcctgtgggggctggcggcggcgaacgacgcgtcgcctgacgcgcgtgaaagctgtgacgcgggctttatgggccagtggcaggacgaggagagcgggctgtggtataatttacaccgctactataatgccaggaccggtcagtatttaagtcccgatccgctgaggttggcggggggattaaacacctatggttatgttcacaatccgctgacatgggcagacccatacgggttagctggatgtagtgcacaattcaaatcgagaaatgaagccttcagggctgcgaaaagagatgccggtattccgatgaatcaacaaccagacagaatatttaattctaaaactggatttttcagtgatcacagaaatgtaccaatgactgattccagaaaaaatcctatttttgataacaatggcaatcaagtctggacaagagaatatcaatttaccagagcggatggttctaaaattatcatccaagatcattctgctggacactcttatgctgatggagtaggaaatcaaggttctcatttaaatgtaagaccaatcgaaaatactcgaacgggttcagttcctggtacatttgatcattatgaattttga

SEQ ID NO: 373287 - DNA, 378 bp, Salmonella enterica
atgtactggaatgatattgatggtagtatattatttaacaaagttttcactaaatctattgaagtaaatgaaatcgatgtctttgacataaaaatagatcgtgaagctgctacagtgacaatatcctttgatttggttaatgaattaccggataatccactacctaaatgggttaaaggttacaatagatgtaggtgtggtataaattgtagcggagttagatatttaaaaatagatggcatgtctacagatatgctagcaaaaatagaaatacatactgataataatgaagttataataaagggaactgatattcttctaaatctgaagtgttctcacatacaacttatggggccttcggtatatattagccaatga

SEQ ID NO: 373288 - DNA, 246 bp, Salmonella enterica
atgcatcaatcaaccgttaccagtttgttatttggctcgccgctctgtgaaagaggggatgacctgggtacagagcaatgggcgcttgcaggtaacggcttgattaatttcgaattagcagcaaatcaggaacgtagcaatccgagtaatgtaacctgtctatcactaataactgtcctgaaagaatgggtcaatatcattgtactgttgcataacttattaacaggtgaaagagtgaccccataa

SEQ ID NO: 373289 - DNA, 831 bp, Salmonella enterica
atgaaagcgctactgtggctggtgggtctcgcgttgctgttaacaggctgcgcgagcgaaaaaggaattatcgataaagagggatatcagcttgatacccgacatcgggcgcaggcggcctatccgcgcattaaagtcctggtgattcactatacggcggaaaactttgacgtttcgctggcgacgttaacgggtcgcaacgtcagttcgcattacctgattcccgcaaccccgccattatatggcggtaaaccgcgcatctggcaactggtgccggaacaggatcaggcctggcatgcgggcgtcagtttctggcgaggcgccacgcgtctcaatgatacgtctattggcattgagctggaaaatcgcggttggcgaatgtccggcggggtgaaatctttcgcgccgtttgaatccgcgcaaattcaggcattgattccgttagcgaaggatattatcgcgcgctataacatcaaaccgcagaatgtggtggcccatgcggatatcgcgccgcagcgtaaagacgatcccggcccgcgcttcccgtggcgcgagctggcggcgcaggggattggcgcctggcctgacgcccagcgtgtggcgttttatctggctggacgcgcgccgtatacgccagtcgataccgcaacggtgcttgcgttactctcgcgctatggctatgaagtcaaagccgatatgacggcgcgcgagcagcagcgggtgattatggcgttccagatgcacttccgtccggcgcaatggaacggtatcgcagatgccgaaacgcaggcgattgccgaagcattactggagaagtacggccaggattaa

SEQ ID NO: 373290 - DNA, 1014 bp, Salmonella enterica
atgaaggtactggttaccggcgccaccagcggcttaggtcgaaacgcggttgaatttttgcgcaataaaggcattagcgtcagagcgacgggtcgcaatgaagcgatgggcaagctgcttgaaaaaatgggcgcggaattcgtccatgcggatttaaccgaactggtctcctcgcaggctaaagtgatgcttgccgggatcgacacgttgtggcactgctccagctttacctcgccctggggaacccaacaggctttcgatctggcgaatgttcgcgccacccgccgtctgggagaatgggcggtcgcctggggcgtgcgcaattttattcatatctcctctccctcgctctattttgattaccaccatcaccgtgatatcaaagaagatttccgtccgcatcggtttgccaatgagttcgcccgcagcaaagccgctggcgaagaggtgattaatctgttggcgcaggccaatccgcaaacacgttttacggtgttgcgtccgcaaagcctgtttggcccgcacgataaagtatttatcccacgtctggcgcatatgatgcaccattacggtagcgtcttattaccgcacgggggcagcgcgctggtcgatatgacctactatgaaaatgcgatccacgccatgtggctggccagccagccgggctgcgatcatctgccttctggccgcgcttataacatcactaacggcgaaaaccgcaccttacgcagcatcgtacaaaagttaattgatgaattgactatcgattgccgcattcgctctgtgccttacccgatgctggatatgatcgcccgcagtatggagcgcttcggcaaaaaatccgccaaagagcccccgctaacgcattacggcgtgtcaaaactgaattttgattttacgctcgatacgactcgcgcgcaggacgagctgggctaccagcccatcgtcacgctggacgaaggcattgagcgcaccgccgcctggctgcgcgatcacggaaatttaccgcgttaa

SEQ ID NO: 373291 - DNA, 1038 bp, Salmonella enterica
gtgaccgataagacctctcttagctataaagatgccggcgtcgatattgatgcgggtaacgctctggttgatcgaatcaaaggcgtagtgaagaaaactcgccgcccggaggttatgggcggtctgggcggtttcggtgcgctgtgcgcgttgccgcaaaaatatcgtgaaccggtactggtttccggcactgacggcgtaggcaccaaacttcgcctggcgatggacttaaagcgtcacgacgctatcggtattgatctggtggcaatgtgcgtaaacgatctggtcgttcagggcgcggaaccgctgtttttcctcgattactatgccacgggtaaactggatgtcgataccgctgccagcgtgatcaacggtattgccgaaggctgcctgcaatccggctgcgcgctggtcggcggcgagacggcggaaatgccgggcatgtatcacggcgaagattacgatgtggcgggtttctgcgtcggcgtagtcgaaaaatcagaaatcatcgacggctcccgggttgccgaaggcgacgtgctgattgcactcggctccagcggcccgcactcgaatggatattcgctggtgcggaaaattattgacgttagcggctgcgacccacaaaccactctgctggaagggaagctgctggccgatcatctgcttgaaccgacccgtatctacgtaaaatcggttctggaactgattgaaaacgtcgatgtacacgctatcgcccacctcaccggcggcggcttttgggaaaatattccgcgcgttctgccggagaatacccaggcggtaattaatgagtcgtcctggcagtggcccgccatctttacctggctgcaaaccgccggtaatgtcagtcgacatgaaatgtaccgtacctttaactgcggcgtcggcatggtgattgcgctctccgctccggaagcggacaaagcgcttgctctgctaaacgagaaaggtgaaaacgcatggaaaatcggtatcatcaaagcctctgattccgaacagcgtgtggttattgaataa

SEQ ID NO: 373292 - DNA, 1227 bp, Salmonella enterica
atgccattgagtgttggacagggttatttcacatcatctatcagttctgaaaaatttaatgcgataaaagaaagcgcacgccttccggaattaagtttatgggagaaaatcaaagcatatttctttaccacccaccatgcagaggcgctcgaatgtatctttaatctttaccaccatcaggaactgaatctaacaccggtacaggttcgcggagcctacatcaaacttcgagccttagcgtctcagggatgtaaagaacagtttattatagaatcacaggaacacgccgataagttgattattaaagatgataatggtgacaatattttatctattgaggttgaatgtcatccggaagcttttggtcttgccaaagaaatcaataaatcacatcccaagcccaaaaatatttctttgggtgatattaccagactggtattttttggcgacagcttgtctgactccttagggcgtatgtttgaaaaaacacatcatatcttaccctcctatggtcaatactttggcggaaggtttactaatggatttacctggactgagtttttatcatctccacacttcttaggtaaagagatgcttaattttgctgaagggggaagtacatcggcaagctattcctgctttaattgcatcggtgactttgtatcaaatacggacagacaagtcgcatcttacaccccttctcaccaggacctggcgatatttttattgggggctaatgactatatgacactacacaaagataatgtaataatggtcgttgagcaacaaattgatgatattgaaaaaataatttccggtggagttaataatgttctggtcatggggattcccgatttgtctttaacaccttatggcaaacattctgatgaaaaaagaaagcttaaggatgaaagcatcgctcacaatgccctgttaaaaactaatgttgaagaattaaaagaaaaatacccccagcataaaatatgctattacgagactgccgatgcatttaaggtgataatggaggcggccagtaatattggttatgatacggaaaacccttatactcaccacggctatgtacatgttcccggggctaaagaccctcagctagatatatgtccgcaatacgtcttcaacgaccttgtccatccaacccaggaagtccatcattgttttgccataatgttagaaagttttatagctcatcattattccactgaataa

SEQ ID NO: 373293 - DNA, 690 bp, Salmonella enterica
atgaatgatgattcaattattaaaaactcttcgatgcttttggcctatttaggtggtttgggatggggaagcgcctatttttatggctggggcgtctccgcgtactatggtttcccgtggtggtatgtaggcgtcggccctgacaacattgcccgaagtctattccatgcgattagcctgatggctatattcataatagcgtggggagtgggtattctattattttttttagtaaagcaaaaagcacgtatccacgaccttagcttcttacgcctttttttggcagcggttttgttctttattccaattgttatcgagttttctctcttaacagaatcgtttttgtgggagcttttttttatcattttactggtggctttatgcctatcggtggggatgcgtttttatagtaaattgatgccagtgatttgttttacgcaactcagttgggtgcgaagacattgtttcactatagttatgattggttttattattgggatctataagccacaattaaagaaagaatacgaaatgatattgtatgatggaggctggtactacgtcctggccagatatcatgatagttttattttgtcgaaatcctttactaaaaataacaatagatttattatttttagaccagaagatggacactcttatgaaattaccctggtaaaagtcagattttaa

SEQ ID NO: 373294 - DNA, 189 bp, Salmonella enterica
atgacacattatgcccggcgcggcgatattcggcgcttcgtcattaaatgccgcgttgataatcaggccagtaacgcagtcgcacggcgcaaccattttacgctggaaggctgtatgaagcaggcggagtatcttaacggcgactatcacgacgttaatatgtatgcccgcattattgatgcggattaa

SEQ ID NO: 373295 - DNA, 138 bp, Salmonella enterica
atgtatgaacagcaggcattttataatggcgagccaatagactttaataacttagatttatgggataaatttaaagtcacatttggactcaatgttacagaaaaaatcaaacccaatggtaaaaaatttcaattttga

SEQ ID NO: 373296 - DNA, 1503 bp, Salmonella enterica
atgacccacacgataaaaaagatgagccttattgggcttatcctgatgatttttacttctgtttttggttttgcgaatagcccgtcggcgttttatttaatggggtatagcgcaatcccgtggtatatattttctgccttgctgttttttattccattcgccttaatgatggctgaaatgggttccgcttatcgcaaagaagagggcgggatctattcgtggatgaataatagcgtggggccacgttacgcgtttattggcacgtttatgtggttttcatcgtatgtcatatggatggtaagtacggcggcaaaaatttgggtaccgttttctacttttgtttttggcgccgatatgacgcagcactggcgtattgcagggcttgagcctacgcaggttgtcgggctgctcgccgtcggctggatgattctggtgacgtgtgtcgccgccagagggatcaataaaattgcgcgaattacggcggtcgggggtattgccgtaatgtgtcttaatttagttttattgttagtgagtgtcgctattttgttattaaatggtgggcattttgcacaagagattaattttacctcgtcaccgaatccgggttatcactccggcctggcaatgttgtcatttgtggtatttgctatttttgcttacggcggtattgaggctgtcggcggactggtggataaaaccgagaaaccggaaaagaattttgcgaaaggtattgttttcgcggccattgtgatttcaattggttattctttggcgatctttttatggggcgtcagtactaactggcaacagatattaagtaatagcgccgttaacttagggaatatcacctacattctgatgtcgagtttaggcacgacattaggtaacgcgttaaacctttctccggacgcagcgatgacggtgggcgtctggtttgcgcgtatcaccggcctttctatgtttctggcttataccggcgcgttttttacgttgagctattcaccgctgaaagccattattcaggggacgccaaaagcgttgtggcccgcgccgatgacgacactgaacgctaacggtatgccggcgaccgctatgtggctacagtgcgtgcttgtgagtctgtttattttgctggtctcttttggcggtgacaccgcatcggcgttttataacaaactcacgctgatggcgaacgtctcaatgaccttgccatacctgttccttgcgctggcatttcccttctttaaagcgcgtcaggatctggagcggccatttgttctctttaaaaccaaagcctctaccctggtcgcgacgggtgttgtggtgctggtggtgacgtttgccaacgtctttaccatcatccagccggtgattgaagctggggactgggacagcgccttgtggatgatcggcggcccgatcttcttctcgttgctggcgatggcgatttatcagaattacagcagccgcatgagcgccgatccggagtgggcggcggagtaa

SEQ ID NO: 373297 - DNA, 741 bp, Salmonella enterica
atgaaaaaaaaacttattgtcatgctgttagccagcctctccgttcacgccgcttccgtttccgccagaacattacattttggcacctctgccacctatgcgccctatgagtttgtcgatgccgataataaaattgttggtttcgatattgatgtcgccaacgcggtctgcaaagagatgcaagcggagtgctcattcactaaccagagctttgatagtctgatccccagcctacgcttcaaaaagtttgatgcggtgatcgccggtatggatatgacgcccaaacgtgagcagcaggtctcctttagccaaccctattacgaaggtctatcggcggtagtcgtcacgcgtaaaggggcttatcacacttttgccgatctgaaaggcaaaaaagtcggtctggaaaacggtacaacgcatcagcgctatttgcaggataaacaacaagctatcacgcctgtcgcctatgacagctatctaaacgcctttaccgatctgaaaaacaaccgtcttgagggcgtgtttggcgatgtcgccgcgattggtaagtggctaaaaaacaatccggattacgccatcatggatgaacgcgccagcgatcctgactactacggaaaagggttaggcattgcggtacgcaaaggcaacgacgcgctattgcaagaaattaatgccgcgctcgacaaggtgaaagcgtcgccggaatatgcgcaaatgcaggagaaatggtttacgcagtaa

SEQ ID NO: 373298 - DNA, 1563 bp, Salmonella enterica
atgaacaaaaagttttcgatatccctactgtcgctgtgcattggtttgtcttcagccatttccttttcagccgatgcgcgtgacatcacaatttattatacaaacgatttacatgcccatgtaaccccagaaattatcccctatgtatccaagacacgtccggtaggcggctttgcgcccatctcgaaaattgtcaaagatgcaaaagcgaaagagaaagatgtctttttctttgatgctggcgactatttcaccggaccttttatcagtacgctgaccaaaggcgaggctattattgatattttaaataccatgccttacgacgccgtctctgtcggtaaccatgaatttgaccatggccatgagaatctggttaaacaactcagcaaattgcaattcccggtattgttggataatgttttttacagcggcacagatacgccattaattaaagaaccgtataccatcgtggaaaaagatggattcaagatcggcgtcatcggtatgcacggcgtttccgcattctatgaagcgattgccgcaggcgtgcgtgaaggcgttgactgccgcgatccgattccttatgtgaaaaaacagctggaagagttaaaagggaaagttgacctgaccgtgctgctcgcccacgaaggcgtgccgggtatgcagtccagcgcaggcgaggctgatgtcgcacgcgcactgaaaaccgacgttgatatggcgaaatcgctggaaggctatggacttaacgtcctgattaccggccatgcgcataaaggtacgccagaaccgattaaagtgggcgatacccttgtcgtttccacggatgcgtacaccatcgaattaggtaaactggtgcttgactggaacccggaaaccaaaaaagtggacagctacaatggtaagttgatcaccatgtatgcggatacttataagccagatccggtcacgcaggccaaaattgacgaatgggataacaaggttaagaaaattaccgatgaggtggtcgcgcactctccggaagtgctgacccgttcttacggtgaatccgcgccaaccggcaacttaatcaccgatgccctgatggctaccgttcctggcgccgacgcttccttctataatgctggcggcatccgtaccgaattgcctaaaggtaatatcacctatggtgatgtgctgagtatgtatccgttcaccaacgatgtcatgagcatggaaatcagcggtaaggacctgaaatccatcatgtcacacgctgccgatctgaaaaacggtatgctgcacgtatctaaaaccgtccagtttaaatatgacagcaccaaaccgctgggccagcgtattgttgaatttgatatcaaaggcaaaccggtagaagacaataaactctataccgtcgcgctggactcctttatcggtaaaggtggtggcggatttaccttcactaaaggtaaaaatatcaaatatatagggatacaaaccgcaccggcgttggttaactatatgaagcaggttaacaatattcaacctgaccacaccatgcgcgtggatgatattagcaaataa

SEQ ID NO: 373299 - DNA, 729 bp, Salmonella enterica
gtggaagggtggcagcgcgcatttgtcctgcacagtcgcccctggagcgaaaccagcctgatgctggacgtcttcacggaagaatcggggcgcgtgcgccttgtcgccaaaggcgcgcgatctaaacgttccaatctgaaaggcgcgttacagccttttacgccgttattgctacgctacagcggacgcggcgaggtgaaaaccctgcgcagcgccgaggcagtttctctggcgctgccgttaagcggtattacgctctatagcggcctgtacatcaacgaactcctctctcgcgtactggaatatgaaacgcgcttctccgaactcttttttgattatctgaactgtattcaggcgctggcgggaaccaccggctcgcctgaaccggcgttgcgacgtttcgaactggcgttgctgggtcatctggggtatggcgtcaatttcacccactgtgcaggcagcggcgaacgggtggatgacaccatgacctaccgttaccgcgaagaaaaaggctttttcgccagcgtcgtcatcgataacaacacctttaccggacggcacctgaaagcgctggaggcgcgggaatttccggatgtagataccctgcgtgccgctaaacgctttacccgtatggcattaaagccgtatcttgggggaaaaccgttaaaaagccgggagctgttccggcaatttatgcccaaacgcacagtaaaaatgaagaaagattaa

SEQ ID NO: 373300 - DNA, 1110 bp, Salmonella enterica
atggcgagcgtacagctacgaaatgtaacgaaagcctggggtgacgtggtggtatcgaaagatattaacctcgatatccatgacggggagttcgtggtgtttgtcggaccgtcaggctgtggtaaatcgaccttgctgcgtatgatcgccgggcttgaaaccatcaccagtggcgacctgtttatcggggaaacccgtatgaatgatattccgcctgccgagcgcggcgtgggcatggtattccagtcttatgcgctctatccccatctctccgttgcagaaaacatgtctttcggcctcaagctggcgggcgccaaaaaagaggtaatgaatcaacgcgtcaatcaggtggcggaagtactgcaactggcgcatctgctggaacgtaagccaaaagcgctttccggcggtcagcgtcagcgcgtagcgattggccgcacgctggtggcggagccgcgtgtgtttttgctggatgaaccgctctctaacctggacgccgcgctgcgcgtgcagatgcgtattgaaatttctcgcctgcataaacgtctgggccgcacgatgatttacgtcacccacgatcaggtcgaggcgatgacgctggccgacaaaatcgtggtgctggacgccggtcgcgtcgctcaggtcggtaagccgctggaactgtaccactatccggcggaccgctttgtcgcgggcttcatcggctcgccgaagatgaacttcctgccggtgaaagtgaccgccaccgcgattgaacaagtccaggtcgaactgccgaatcgccagcaaatctggctgccggtcgaaagtcgcggcgtgcaggtcggcgccaatatgtctttaggcattcggccggaacacctgctgccgagcgatatcgccgatgtcaccctggaaggcgaagtccaggtggtcgagcagttagggcacgaaacacaaattcatatccagatccccgccatccgtcaaaacctggtttatcgccagaatgacgtggtgttggtagaagagggcgccacattcgctatcggcctgccgccagagcgctgtcatctgttccgcgaggatggcagcgcatgtcgtcgtctgcatcaagagccgggtgtttaa

SEQ ID NO: 373301 - DNA, 1359 bp, Salmonella enterica
atgatgattactctgcgcaaactcccactggcggttgctgtcgcagcgggcgtaatgtccgctcaggcaatggctgtcgatttccacggttacgcccgttccggtattggctggacgggaagcggcggcgaacaacagtgtttccaggcaacgggtgcccaaagtaaataccgtcttggtaacgaatgtgaaacctatgcggaactgaaactgggccaggaagtgtggaaagagggcgataagagcttctatttcgacaccaacgtcgcctattcggttaaccagcagaacgactgggaatcgaccgatcccgccttccgcgaagcgaacgtgcagggtaaaaacctgattgaatggctgccgggctctaccatctgggccggtaagcgcttctatcagcgtcatgacgtacacatgatcgacttctactactgggatatttcaggtcctggcgcgggtatcgaaaatatcgatctgggcttcggtaagctttcgctggcggcgacccggtctactgaagcgggcggctcttacaccttcagcagccagaatatttatgatgaagtaaaagataccgctaacgacgtctttgacgtacgtctggctggtctgcaaacgaacccggacggcgtactggagctgggcgttgactacggtcgcgccaatacgaccgatggttataagctggcggatggggcatcgaaagacggctggatgttcaccgccgaacacacgcaaagcatgttgaaaggctataacaagtttgtcgtgcaatatgccaccgatgccatgaccacgcagggtaaaggccaggcgcgcggttccgacggttcttcatctttcactgaagaattgcctgatggaaccaaaattaattacgccaataaggtcatcaataataatggcaatatgtggcgtattttggatcatggcgccatctcgcttggtgataaatgggatttgatgtacgtcggtatgtaccagaatatcgattgggataataacctgggtactgagtggtggaccgtgggcgtacgtccaatgtacaagtggacgccaatcatgagtaccctgctggaagtcggctacgacaacgtgaaatctcagcagaccggcgatcgtaacaatcaatataaaatcaccctggcgcaacagtggcaggcgggcgacagcatctggtcgcgtccggctatccgtattttcgccacctacgcgaaatgggatgagaaatggggctatatcaaagacggcgataacatttcccgttatgccgcagcgactaactccggcatttccaccaacagccgtggcgatagcgatgagtggaccttcggcgcccagatggaaatctggtggtaa

SEQ ID NO: 373302 - DNA, 918 bp, Salmonella enterica
atgaaaatgaagaaaagtctcgtcgccctctgtttaaccgcagggctgttcgccagcgtgccgggtatcagcctggcggaagtgaactatgtaccgcaaaataccagcgccgcgcccgctattcctgctgctgcgctacagcaattaacctggacgcctgtagatcagtcaaaaacgcagtctacccaactggcgacgggtggccagcgccttgacgtcgccggcattaccggcccggtcgccgcttatagcgttccggcgaatatcggcgagctgacattaactctgaccagcgaggtcaataagcaagccagcgtttttgcgccaaacgtgttgattcttgaccaaaatatgacaccttcggcgttcttccccagcagttactttacttatcagcagccgggcgtcatgagcgcagaccggctggaaggcgtgatgcgcctgacgcctgcgttggggcagcagaaactctatgttctggtgtttacgaccgaaaaagatcttcagcaaaccactacgctgctcgatccggcaaaagcctatgccaaaggcgtcggtaactctatcccggatattcccgatccagttgctcgccataccactgacggcgtggtgaaactgaaggtgaaaaccaacagcagctccagcgtattggtcgggccgttgtttggctcgtccggtaccgggccggtaacggtaggcaataccgccgcgccggtcgctgcgccagcgccagtcgcgccgaagaaaagcgaaccgatgttgaacgatacggaaagctactttaataaagcgattaaggatgccgtagcgaaaggcgacgtcgataaagcgctgaaactgcttgatgaggccgaacgtctgggatcgacatctgcccgttccacctttatcagcagtgtaaaaggcaaggggtaa

SEQ ID NO: 373303 - DNA, 498 bp, Salmonella enterica
atgtcacaccctgcgttaacgcgactgcgtgcgctgcgctattttgatgcgattcctgcgcttgaaccccatttgctggactggctgttgctggaagattctatgactaaacgttttgagcagcagggaaagcgggtaagcgtgacgctgattcgggaagcgtttgtcggccaaagtgaggtcgaggaagcatcaggtttactgccatccgaatcccgctactggttacgtgagatactgctttgcgctgacggcgagccctggcttgccggacgtaccgtggtaccggaatccacgctgtgcggacctgaacaggtcttacaacatctgggtaaaaccccgcttggacgttatctatttacatcatcgacactgacccgcgattttattgaaattggacgcgatgcaacgctgtgggggcgccgctctcgactgcggttgagcggaaagccactgttgcttaccgagctttttttacctgcatcgccgctgtactga

SEQ ID NO: 373304 - DNA, 873 bp, Salmonella enterica
atggagtggagtctgacgcagagtaagctgctggcgtttcaccgtttgatgcgtacagataagcctattggcgcgttgctgctgctctggccgacgctttgggcgctatgggtggcgacgccgggtatgcctcaactgtggattttggcggtttttgtcgctggcgtgtggttaatgcgcgcggcgggctgcgtggtgaatgattacgccgatcgtaaatttgacggacatgtaaaacgtacggtcaaccggcctttacccagcggcgccgtgacagagaaagaagcgcgcaacctgtttgtggtgctggtgctgctggcgtttctgttggtgctgacgctgaacgccatgacgattctgctttccgtggcggcgctggcgttggcctgggtttatccctttatgaaacgctatacccacctgccgcaggtcgtgctgggggccgctttcggctggtcaatccccatggcgttcgccgcggtgagcgaatccctgccgttgagctgctggctaatgttcctcgccaatattctctgggcagtggcttacgatacgcaatatgcgatggtcgacagagatgatgatatcaagataggcattaaatcgacggcgatcttgtttggtcgttatgacacattgattatcgggattctgcagcttggcgtcatggcgttaatggcgctgatcggctggttgaatggtctgggatggggatattactgggctgtgctggtggcgggcgcgctgtttgtctaccagcaaaaactgattgcgaaccgtgagcgtgaagcctgctttaaagcctttatgaacaataactacgttggcctggtgctatttttagggctggcgatgagttactggcacttctga

SEQ ID NO: 373305 - DNA, 1203 bp, Salmonella enterica
atgaaaattacgtctattgaagtttttgactgtgaattaaaaaaaagagatcaaacgatgtcctcctataatccagtacttatccgggtgaataccgactcaggattaagtggtattggcgaagtaggactggcctatggcgcaggcgctaaagctggcgtagggatcatcagagatctggcgccattgattgtgggtgaagatccattaaatatcgaaaaaatttgggagttctttttcagaaagactttttgggggatggggggcgggaacgttttttatgccggaatgagcgctattgatattgctctttgggatatcaaaggtaaatatttaggtgtacctgtttatcagctccttggcgggaaaactaatgaaaaattaagaacctatgctagtcagttacaatttggttggggggataaacgccagatattagtgacacctgaggaatatgctgaggcggcgcgtgcggctcttgacgatggatatgatgcgattaaagtggatccactcgaaatcgatcgtaatggcgatgactgtgtttttcagaataaaaatcgtaactattcaggattgttactggccgatcaattaaaaatgggggaagcgcgaattgccgctatgcgtgaagcaatgggggatgatgctgatattatcgtggaaatccattctcttctcggtacaaactcagctattcaatttgcgaaggcgatagaaaagtatcgtatctttctttatgaagaaccgattcatccattaaattctgataatatgcagaaagtttcccgttcaacaacgattccaatcgccactggcgagcgttcctacacaagatggggatacagggaattactggagaagcagtctattgccgtagcgcaacctgatttgtgtctctgcggcggaattaccgaaggaaagaaaatctgtgactatgctaatatttatgacaccactgtacaggtgcatgtttgcggcggtcctgtctccacggtagccgcgctgcatatggaaacagcaattcccaactttattattcatgagcatcataccaatgcgatgaaagcatctattcgggaactttgtacccacgattatcagccggaaaatggctattatgtcgcgccggaacagcccggattgggtcaggaattaaacgatgaggtagtgaaagaatacctggcctatgtgattaaatag

SEQ ID NO: 373306 - DNA, 606 bp, Salmonella enterica
atgaatagtctgttgccgccgggttcgtcgccgcttgagcgccgactggcgcagacctgcagcgggatttccgatctgcagatatcgctgcgtgatttgtggaacccggcaacctgcccgatcagattcctgccttatctggcctgggcgttttccgttgaccgctgggatgaaagctggacagaaaatgtcaaacgccgtgtggtgcaggatgctttctatatccatcagcataaaggaacaaccagcgccgtgcggcgtgtggttgagccgttcggcttcctgatccgcatcattgagtggtggcagaccggcgaaacgccggggacgttccgtctggatattggcatacaggatcatggtatcaccgaagacacctatctggagcttgagcgcctgataagcgatgccaaaccatgcagccgccacatgacaggtatgtccattaatatgcagaccagcggcccttactgggttggcgcagccagctaccttggcgaagaaatcacggtatatccgtatatcaatgaaacgattgtttccggcggcaccgcatatgaaggcggggcagtccatgttattgacacaatgagagtgaatccatga

SEQ ID NO: 373307 - DNA, 909 bp, Salmonella enterica
atggcagtgattgacctttcccggctgcccgcgccgcagatagtggacgtgccggattttgagacgctgctggctgagcgcaaggccgcttttgtggctctttatcctgtggatgaacaggacgcggtgcggcgcacgctggcgctggaatctgaacccgtcaccaagctgctgcaggaaagcacataccgcgaaatcctgctgcgccagcgtattaacgaggctgcgcaggcggtgatggtggcctattcgatgggaaatgatcttgagcagctggcagccaactgcaacgtgaaacgcctgacggtagtgcctgctgataaggatgcagtaccgccggtcgccgcagtgatggaagatgatgaggcgctacgccagcgcatccctgctgcgtttgaggggttgtcggttgctggcccgacgggagcctatgaatttcacgccagaagtgcggacggacgtgtggcagatgccagcgcaaccagtccggctcctgcagaggtggtacttaccgtactgagccgggagggtgacggtacagcagtaaaagatctgctggatgtggttgaaaaagccctgaacagtgagagtgtacgcccggtggctgaccgtctgacggttcgtagtgcggagatcataccgtaccgggtggaggctaccatttttctttatccggggccggaagcggagcctgttatggtggcggcaaaagccagcctgcagaggtacatcgccagtcagacgcggctgggacgtgatatccgccgcagcgccatttatgccgcgttgcacgtggagggcgtccagcgtgtggagctgacgtcccctctggaggatgtggtgctggataagacacaggcggcatcctgtaccgaatggagcgttaccaacgggggtacggatgaatag

SEQ ID NO: 373308 - DNA, 360 bp, Salmonella enterica
atgacgttgtatatcggtatgagcaggaatgacgggcaggtcattgcagataccgaccatctgcgccagtcggtgcgggatattctgctgacgccgcagggcagtcgtcttgctcgccgggaatatggctccctactgtcagccctgattgaccagccgcagaacccggcactgcgcctgcagattatgtctgcagtctatgtggcgctgaaccgctgggagccgcgccttacgctggactccatcaccatcaacggcaattttgacggctctatggtggttgagcttaccgggcagcgcaacaacggcgcgccggtttcactttcggtaactacaggagcagacaatggcagtgattga

SEQ ID NO: 373309 - DNA, 579 bp, Salmonella enterica
atgaacgcacaactgaccgaaatcatgcgccttatcaccaacctgatccgcaccggcaccgtgaccgaagtggacagggaaaactggctgtgccgggtgaaagtgggtgagcttgaaactaactggattaactggctgacgctgcgtgccggtagtgcccgtacatggtggtgcccgtcgccggatgagcaggtggtggtgctgagcatgggcggcaatctggaaaccgcttttgtgctgcccgccatctactccaatcagtttgcgccaccgtcggattctgtggacggctgcgtgacggagtacccggacgggggctggtttgagtacgaacccgccaccgggaggtggcatgtccggggtatcaaatccatggtgatcgaggcggcggacaatatcaccctaaaaaccggtgagtttgtggtggaggctgacacaacacgcattaacagcgaggtggtgatcaacggcggcgtcacccagggcggcggcgcaatgagttctaacggggtcgtgatggataaacacggtcacactggcgttaagtcaggcggggatacatcgggaggtccggtatga

SEQ ID NO: 373310 - DNA, 561 bp, Salmonella enterica
atggaggcaaaagcaaaagaggggtctctaaagaaaacaatcatcaggtctggtgttgcgatatcatattcccattgggaaggttttgtcaaaaacgcaaccgagtattttttgaatttccttaattatcaaaaaatacatgtggagtccttgaaattagtttatatgacccatgcccttaaaaaagagattcatggattttctgaaactaaggatgttgatacatgtataaggtttttaactgcattgatagagaaaaagactaatatagcagtgataaggcatgaaaactatgttgataccgagtctaatttaagttctaaagttttcgataacatcgctaagtctattggtatcgacactcatcaatacaaggccttttatccttatattgatgagtcaatagtgagtgcgaggaacaatattgcacacggggagcgcttgattgttgagcaggttagttttgaacaactaactgaaaaagtactcgctctaatgaatatgtacaaaaatgatattgaaaatatagttgttacaaaggaatacttaatatccatttag

SEQ ID NO: 373311 - DNA, 1092 bp, Salmonella enterica
atggggttgcaggatgaattaaatctagcaaagaaagaaatatctaaagatagctttgatatgtcagttggggagctgagtcgtatttatgaaagaaatgaagttataattaatccaaattatcaaaggttgtttagatgggatgaatcacagaaaactcgttttattgagtcattattgttaggtattcctattcctcctatatttgtatttaccgatgagagtgggagatgggaggttattgatggcttgcaaaggctgtctactatatttgagttttcaggtgtgttaaaaaaagacgatgggacttgtcatcctcagttcattccttctggaacaagactgctaccttcccttgatggtatgaagtgggaaaaagaatcagaagacgatgaaaaggttattcctttatctattcgtttggattttgaacgttctcggttgcgagtggaaatacttaaaaaggaaagtgatgaaaagactaaatatgagttatttgaaaggttaaatacaggtggttctagactcacagatcaagaagtgcgtaattgcatcatggttatgcttaatccggaattattcgaaaaacttaataaactaagtcagtatgctagcttcaaggaagtaacccttcaaactgaaaaatctatatcagaacagaagccattggatcttacgttgcgttttcttgcctatagatactctccttttgataaaagcgtagatataaatgaatggttaaataatatttctcgaaatattgcatcggataaaaattataacatagatgctgagagtgatttatttaagagaacgtttgatgttttagctaaaactacaggtcagaattcgtttaagaaatatgatggcaataacttctcaagaggttttttaatttctgcttatgaggttattacacagggtattgctgcgaatattgataagtatgaaaagcagtcagcggattatgtcgaagagaaaatcaaagcaatctggaataatcctgaatttacaaactatgctcgggctggagttaatgcgccaagtcgtttgattaataccctgcctaaagctccagtttggtttgactaa

SEQ ID NO: 373312 - DNA, 447 bp, Salmonella enterica
gtggatgagctgcagaaggtggatgactggctgacggcgctgctggcgaatctggagcctgccgcacgcaaccgtatgatgcggcaactggcgcaacagttgcgccggacgcagcagcagaacatcaggctgcagcgtaatcccgacggcagcggctatgagccacgcagggtgacagcccgtagcaagaagggacgtatcaaacgccagatgtttgccaaattgcgcacaactaaatatcttaaaaccgccgcaactgcggactctgccagcgttgagtttgctgggcaggtgcagcgtattgcccgtgtacaccactacggcctgcgcgacagaattacaaaattaggtcccttaaaaaagtatcctgaacggagactgcttggacataccaacaatactgtagaattagttaaaagcattatgttagattatatgaaacgttaa

SEQ ID NO: 373313 - DNA, 432 bp, Salmonella enterica
gtgaacaaaccgcagtccttacgcagcgccctgaataaagcggttgcctatgtccgggacaacccggacaagctgcaccttttcgttgataacggctcactggtggcaacaggagccagttccatgtcatgggaataccgctacaccctgaacgtggtgatcgaggatttcagcggcgaccagaatctgctgatggccccagtcctgctgtggctcagtaccagccagccggacgccatcaacaacccggatctacgcgaaaaactgttcacctttgaagtggatattctgcgaaacgatgtgtgcgatatcagcatgaacctgcaactgactgagcgtgtgctggtcagcactgacggcagcgtatcgagcgttgaagcggtgccggagccggacgaacccgaagaaatgtggacggtgaaacgtggatga

SEQ ID NO: 373314 - DNA, 426 bp, Salmonella enterica
atgcgtgcgctggcggtagtgctggcgctggcacttgcggcgctgggctggcagtcgtggcggttaaacaatgccagccacaccatcgaaacgcagggcgcggcgctgaaaagcaaaacgcaggagctgacgaagaaaaacagccagctgatcggcctgtccattctgaccgaaaccaacagccgggagcagacgcggctttatgcggcagcggaacagaccaccgcactgctgcgaagccgtcagcgccggatcgaggaactgaaacgtgaaaacgaggatttgcgccgctgggctgacactcctttgcctgctgacattatccggctgcgggagcgtccggccctcgccggaggtgcagcttaccgtgagtggctgtcccagagtgacgcagtgccgcctggaaaggtcagcgccgagcagtaa

SEQ ID NO: 373315 - DNA, 378 bp, Salmonella enterica
atgaaaaagaaagtcatgagcgtttttttccagttggcatgggctgcgctgttggtaatcagcctgctgtatccgcgcagcggtgcgccggttctggttggtgcgtctgtctgggtgtcatgcttcctcgcctggctgcttgctgcgctgtgcgctgtcgggtggttcgccggagatcgggcgcgcgatgaggtcagggcggcattaatcaaattcagggcgcaccccgtaaaacccgtgcgtacatgggctatcaggctgcttattgttctgtgcctggcgttttcgggatgggtgatcaccctggtgttttacctgctgacgctggttttgtatcagattgcccgctcacagcttcatgagccgatggcggcctga

SEQ ID NO: 373316 - DNA, 510 bp, Salmonella enterica
atgaatccttcaatcgttaagcgctgccttgtcggggcggtgctggctatcgcagccacgctgcccggatttcagtcgcttcatacctccgttgaggggctgaaactgatcgccgattacgagggatgccgcctgcagccttatcagtgcagtgcgggcgtctggactgacgggatcggcaatacgtccggtgtggtgcctggaaaaaccatcacggaacggcaggcggcgcagggacttatcaccaacgtgctgcgcgtggagcgagcactggataaatgtgtggtgcagccgatgccgcaaaaggtctatgacgcggtggtgtcgtttgctttcaacgtgggcaccggcaacgcctgcagctccacgctggttaagttgctgaaccagcggcgctgggcggatgcctgccatcagctgccgcgctgggtatatgtcaaaggtgtgtttaatcaggggctggacaaccgccgcgcgcgggaaatggcctggtgcttaaaaggagcataa

SEQ ID NO: 373317 - DNA, 216 bp, Salmonella enterica
atgacgcttgaacgaatcagcgcctttatcacttactgcattgccgtgctgctggcatggctgggcgatctgtcgctcaaggatgcgtcaacggttggcggcgtactgattggtgtgctgatggtggctatcaactggtactacaaacaccagtctttcaaattgttacgtggcggcaagatttcgcggggggaatatgaatccttcaatcgttaa

SEQ ID NO: 373318 - DNA, 204 bp, Salmonella enterica
atgaaagtgcgtgcgcatcagtatgacacggtggacgcgctttgctggcgtcattacgggcgcacgcagggtgtcactgagcaggttctgcaggcaaatccggggctggctgagtacggcccacttttaccgcacgggctgcaggtggagctgccggacattacggcgtcaaccacggcgcagaccgtccagctatgggactga

SEQ ID NO: 373319 - DNA, 465 bp, Salmonella enterica
atgaagtttgttgcgcccgaacaggcaccggaacaggcggaggtcatcaaaaatacgccgttctggcctgatgtggacctgtcggaatttcgcagtgtgatgcgcactgacggcacggtgacgcagccgcgtttaaagcaggtcgtgctgacggcgatctctgaggttaacgctgagctgtacgacttccgcaaccgtcagcagatgcagggctggcggacacttgctgaggttcccgcagaaatgctggacggtaaaagcgagcgtatccggcactaccacaacgctgttttttgctgggcgcgcgctgtgcttaatgagcgttatcaggactatgacgccacggcgtcaggcgtgaagcgaggggaggagctggcggaggccagcggcgatctgtggcgtgatgcccgctgggccatcagccgggtgcaggatgcaccgcactgtacggtggagcttatctga

SEQ ID NO: 373320 - DNA, 651 bp, Salmonella enterica
atgagcctgagtcccgcacggcagcaccgcctgcgcattcaggccgaacaggccgcccgtgagggcggcagtgttcgccatgcgtcgggctatgacctgatgctgctgcagctggcagaagaccgccgccgcctcaagggcgtccagtccacggtgaaaaaggcggaaatcaaggtggagctgctgccgaaatattccgcctgggcggagggcgtgctggctgccggaggtgcgcagcaggatgacgtgctgatgtacgtgatgctgtggcgtatcgatgccggtgattatgccggtgcgctggaaatcgggcgtcatgcgctgcgtcatggctgggtgatgccgctgggcaaccgtaacgtgcagaccgtgctggcagaagaaatggcagacgcggcgcaaggcgctctgctagccgcagccggttttgatgccgatctgcttttgcagacactggacctgacaaccgatctggatatgccggaccagtcgcgggcgcgtctgcataaagccatcggcgctgtactgagcgaaagcaacccggcatctgccctgaatcaccttacccatgcgctgcagctcgatccccgctgcggtgtgaaaaaagaaaagcagcagctggagcgcagactgcgcaatgacagccgctaa

SEQ ID NO: 373321 - DNA, 1065 bp, Salmonella enterica
atgaaaaagaaaacccgctttgcctttaacgcttacctgcagcagttggcgcgcctgaacagtgtggaggttgaagaactctccagcaagtttaccgtggagccgtccgtgcagcagacgctggaagaccagatccagcagtccgccgctttcctgacgctgattaacatcacgccggtcactgagcagtcagggcagttgctggggctgggcgttggcagcaccattgccggaaccaccgataccaccaccaaagagcgcgagcctaccgatccgacgctgatggaagacgtggaatacaaatgcgagcagaccaactttgatacggtgctgacctacgcaaaactggacctgtgggcgaaattccaggacttccaggtgcgtatccgcaacgctatcgtcaaacgtcaggcgctggaccgcatcatgattggctttaacggcgtgaagcgcgccaaaacctccaatcgtgctgaaaacccgctgctgcaggacgtcaataaaggctggctgcagaaaatccgcgaagacgcgccggatcacgtcatgggcagcaaaaccacagaagacggcaccactactgcggaaccggtaaaagtaggtctgggtggtaagtatgtaaatcttgacgcggtggtgatggataccgtcaacgagctgatcgatgtggagtatcaggatgatgacgaactggttgttgtctgtggtcgtgaattgctttctgacaagtatttcccgctagtcaacaaagagcaggacaacagcgagaaaatcgccgccgatctgatcatcagccagaaacgcatgggcggcctgcaggctgtgcgcgcgcctttcttcccggcaaatgccctgctgatcacccgtctggataacctgtccatctactggcaggaagacacccgccgtcgttctgttatcgacaacccgaaacgtgaccggattgaaaactttgaatccgtcaacgaggcgtatgtggtcgaggactaccgctgcgcggcgctggtagaaaacatcgaaatcggtgatttcagcgcgcctgccgcaccggaaggtggggaataa

SEQ ID NO: 373322 - DNA, 834 bp, Salmonella enterica
atgacagtgaaagcaaagcgtttccgcatcggggtggaaggtgccaccactgacgggcgcgagatccagcgtgaatggctggtacagatggctgccagctacaacccgacggtctataccgcgctgattaaccttgagcacatcaagtcttatctgccggagagcacttttaaccgctatggcagggtgacggggctggttgcagaagaaattcaggacggcccgctggcgggcaagatggcactttatgccgatatcgaacccactgacgccctggtggaactggtgaaaaaaggccagaagcttttcacctccatggaggtcagcacgaagtttgccgacaccggcaaagcctaccttgtggggctgggtgcgacggacgatcctgcgagccttggtaccgaaatgctggctttcagcgccagcgccgcacataacccgctggcaaaccgtaagcagaaccctgaaaacctgttttcggaagctgtcgaaacgctgatcgaactggaagaggtccaggacgaaaagccgtccctctttgcccgcgtcaccgcgctgttcaccaaaaaagagcagaccgatgaggcgcgtttctccgatgtgcataaagccgtggaactggtcgcctccgagcagcagaacctgagcgagcgcactgataaatccctgtccgaacaggacaagcgcctttctgagctggagtcctccctgcaggaacagctggccgcctttgccgagcttgagcagaagcttagcagcgaagacagccgtaaagactaccgccagcgcgcgccgggcggtgacgcaccggcaggcactctgaccaattgctga

SEQ ID NO: 373323 - DNA, 1719 bp, Salmonella enterica
atgctgctgtactttcagggataccgcgtagcccgcattgctgaaatgctgggcgaaaaagttgcaaccgttcacagctggaaaaaacgcgacaagtggggcgactatgggccgctggatcagatgcagctcaccaccgccgcacgctactgccagctcattatgaaggagcagaaagaagggaaagacttcaaggaaattgacctgctggcgcgccagtcagagcgtcacgcccggatcggaaaatttaacgacggcgggaacgaagcagatttaaacccgaaagtagccaaccgtaacaaaggtccgcgcaggcagccggaaaagaacgttttctccgacgaacagatcgaaaagctggaagaagtcttccacgcctcaatgttcgactatcagcgtcactggtttgaagcaggaaaaacaaaccgcatccgtaatctgctcaagtcgcgccagattggcgccacgttttattttgcccgtgaagcattgattgacgccctgctgaccggacgcaaccagattttcctttctgccagtaaggcacaggcgcacgtctttaagcagtacatcatcgactttgccaaagaagttgaggtggagctgaaaggcgatcctatggtgctacccaatggcgcagcattgtactttctcggcaccaacgcccgtacggcgcagagctaccacggcaacctgtaccttgatgaatatttctggataccgaaattccaggaactgcgcaaggtggcctccggtatggccattcacaagaaatggcgacaaacctacttttccacgccgtccagcctgacccacagtgcctatccgttctggtccggcgcgctgtttaaccggggccgtgccaaagcggacaaggtggatattgacctgacccacagcaaccttgcgcgcggcctgctctgccctgacgggcagtaccgccagatcgtcaccgtggaggatgcggtgcgcggcggctgtaacctgttcgacctcgaccagctgcgcatggagtacagcccggacgaataccagaacctgctgatgtgtgagttcgtggacgatctcgcgtccgtgttcccgctcagcgagctgcaggcgtgcatggtggacagctgggaagtctggaccgattttcaggcgctggcgctgcgcccgtttggctggcgcgaagtgtggatcggttatgacccggcaaaaggtacgcagaacggtgacagcgcaggctgcgtggttatggcacctccaactgtacctggcgggaagttccgaattctggagcgtcatcagtggcgcgggatggactttcgcgcccaggctgatgctatcaaaaaactgacgcagcagtacaacgtgacctatatcggcatcgactcgaccggcgtcgggcacggtgtttatgagaacgtaaaagcgttctttcctgccgtgcgggagtttgtctacaaccctaacgtcaaaaatgccctagtgctcaaggcgtacgacattatcagccaccgccgtctggagtttgacgccgggcacaccgacattgcgcagtcctttatggctatccgccgcgccaccaccgccagcggcaaccgtccaacctatgaagccagccgcagcgaagaggccagccacgcagatttggcctgggcaacgatgcacgcactgtttaacgaaccgctgcagggcgaatccgccaataccagcaacattgtggagattttttga

SEQ ID NO: 373324 - DNA, 1041 bp, Salmonella enterica
atgagtgagctcgaagccttaaccagcacaacgccaacagaagatatggcgcctaaaaacgcagacgtaactgccgaggctttcagctttggtgatccaatcccggtgctggaccgccgcgagctgctggactatgtggaatgcgtgcagatggaccgctggtatgagccgccagtaagctttgacgggctggcgcgaacctaccgtgccgcagtgcatcacagctctcccattgcggtaaaacgcaacattctgaccagcacctttatcccgcatccacttcttagccagcaggcgttcagccggtttgtgcaggactatctggtattcggtaatgcctatctggagaagcgcaccaaccgactcggcggcattctgtcgctggagccatcactggcgaaatacacccgccgcgggatcgatttagacacctactggtttgtgcaatacggcctaaccacgcagccctacgagttcaccaaaggcagcatctttcacctgatggagccggatttaaaccaggagatttacggtctgccggaatatctgtcagctatcccttccgccctgctgaatgagtccgcaacactgttccgccggaagtactacattaacggtagccacgcaggcttcatcatgtacatgactgacgccgcgcagaaccaggaggacgtgaacaacatccgccaggccatgaaaagcgccaaagggccgggcaacttccgcaacctgtttatgtactcgcccaacggtaaaaaggacggcatccaaatcattccactttcggaggttgcagctaaggatgagtttttgaacatcaagaacgtgagccgcgatgacatgatggcagcacaccgcgtgccgccacagatgatggggattatgcctaataatgttggagggtttggggatgtggaaaaggccagccgcgtttttgtgcgaaatgagttaattcctttacaaaagcgacttgaagaacttaacgaatggttaggtgaaccaataatatcttttgacccctaccagttgaacgctgaatag

SEQ ID NO: 373325 - DNA, 546 bp, Salmonella enterica
atggatgctattactggattattggatttttttagaaagattccaacggcacttcttgtagctattacatgtggtttaagtttgatcctttttttgccagaatctttagcttctaaagttgcggttgatggtttccgtaaagaatatagaaatttcataggaccagcatttttactggctgtctcttttttagttgcaagagtatatcagttttttcatgacctatatggcgatagacaaagacacaaagtacgtatctcttatttggagaagctaactcctgaggagaagggatacctctggtcttatattattgatggcgaaaactcactaatgtgtggtcctgaagatggtgttatggggggattggttgctaagcgcataacctatagagctgcaaacgtgggcagtatgattgacggattcgctttcaatttgcagccgtgggctcgcgagcatttacagaacaacactcatttattagaaggagcggtcggtagggcaatgacaccgggtgagaaactaggatttaggcgtagattttaa

SEQ ID NO: 373326 - DNA, 336 bp, Salmonella enterica
atgaacaatattccccctataccgcagttagggatttatgtctcaaaaatcgatcccaccctacgtatcactgtaaccgacgttgatattgttgatggcgatgatgattctcctgatgatgaattgttttatttagtccactggatcgagggggaagatgaaagtgatatgacagcaatggaatttgagctagacccagtagagtggcaggctttcgttgaatctgagcaattagtttttgagcgtgatccttacatggattcaattcccgaaaattcaaacctcgcaaagattcgggatttactcatgaagactaaacagaatgaccattcgtaa

SEQ ID NO: 373327 - DNA, 384 bp, Salmonella enterica
gtggacactttatctattaacgggatttttgaagttttcgttaacaattgggttcctggtatcttcaccttctttctaggtatcctttactcaaatatcgttgaaaaaaagaaacttaaacagaagctaaaaaacgatattcttgagatcttcataccagtcttcaatgtaggggacgagatctcattcgaaatggcggagaatgcttgcaggaagatgaaaggtacctttcaggtatacaagagaatatatccaggtatcttcaacaaagaggtagagagtgagcttgaagagctactaaaagatggattcctcataaatggtgaagttaatccgcattactttgaaccagccaacattgagaacctgattaatagattgtag

SEQ ID NO: 373328 - DNA, 420 bp, Salmonella enterica
atggacattcaagtagttcataaagttactgaatatgatagagaagaactcttagcgtggctaagaagctataatgctcagtttatcgattttagtaaaaatggacagatcggtgtctactgcagaaatgaaatcggagagatggtaggtggattaattgcggacaggaaaggtccatggctgtgtattgattatctttgggtgagtgaatcagcacggagtggcggtttgggtagcaaacttatgagcatcgctgagaaagaaggtgtgatgaacgggtgtattcatggccttgtcgatacatttagcttccaggctctccccttttatgaaaaacagggttatatacttcaaatgtcattacctgatttccctaaagcaggggcacaaaggcattatctaataaaaactaatttatag

SEQ ID NO: 373329 - DNA, 189 bp, Salmonella enterica
atgcaggactattttttggagtctttgaagctccagcgcattgatttttttcttaagcttgtagcggctagtgagtgtagtgatgaagagaaggggctggctctgcagtgggtttctgaactgactgatgaactcatggcaaaaattagaacccacgaatataaccactcaatggatgtcgttaactga

SEQ ID NO: 373330 - DNA, 2400 bp, Salmonella enterica
atgagtcatgacgatatgagcaactctagcggctttaacgaggccgctgcagcattttcatggaacggcccgaaaaaggccattaacccttatctggacccggcggaagttgcgtcggagtctgcactttcaaacatgatcactctgtacgctgccgataacgagcaggaacagctgcgtcgcgatgcactgagtgagcaggtctgggagcgttatttctttaatgaatcccgtgatcctgtccagcgcgaaatggagcaggataagctcattagccgcgcaaagcttgcgcatgagcagcagctttttaacccagacatggtcattctggcagatgtcagcgcccagcccacctacatcagcaagccgctgatgcaacatatcgaatacttcagcagcctgggcaggccaaaggcttattcccgctatttgcgtgagacgattaagccatgtctggagcgactggattgtgtacgcgacagtcagctatctgcttctttccgttttatggcaagccatcaagggctggacggtctgctgatcctgcctgaaatgagtcaggatcaggtgaaacgcctgtccgccctggttgcggcgcatatgagcatgtgtcttgaggccgcttgtggtgatttgtatgccaccgatgacgttaagccagaagaaatccgcaagacatgggaaaaggtggcagcggaaaccctgcgtctggatgttatcccgcctgcgtttgagaaacttcgtcggaaaagaaaccgccgcaaacccgtgccctatgaactcataccggggtcgctggcgcgtatgttgtgcgccgactggtggtaccggaaattatggaagatgcgttgcgaatggcgggaagagcagttgcgcgctgtctgcctggtcagcaaaaaagcatctccttatgtcagctatgaagccgtgatgcataaacgtgagcagcgccgtaagtcgctggagtttttccgttctcatgaactggtgaacgaagacggcgacacgctggacatggaggatgtggtaaacgccagcagcagcaaccctgcgcatcgccgcaatgagatgatggcctgtgttaaaggtctggaacttatcgcggaaatgcgcggtgactgcgccgttttctacaccatcacctgtccgtcacgtttccattccacgctaaataacggcaggcccaacccgaactggacaaatgcgacggtaagacaaagcagtgattatttggtcggcatgtttgctgcatttcgtaaggcgatgcacaaagccggattgcgctggtatggcgtgcgggtggctgagccgcatcatgacggtacagttcactggcacctgttgtgttttatgcgcaaaaaagaccgccgcgccatcactgcattactgcgtaagtttgccatccgtgaagaccgcgaggagctgggcaataacacggggccgcgctttaagtctgagttgattaacccgcgcaaaggaacgccgacaagctacatcgcgaaatatatcagtaagaacattgacgggcgtggtctggctggcgagatcagcaaggaaacgggtaaatccctgcgtgataacgctgaatacgtgaatgcctgggcgtctctgcatcgtgttcagcaattccgcttctttggcattccggggcgtcaggcttaccgtgaactgcgattgctggctggtcaggcggcaaggcaacagggtgacaaaaaagcaggtgcgccggtactggataacccgcgccttgatgcaatcctggctgctgctgatgctggttgttttgccacctacatcatgaagcagggcggcgtactggttccccgtaaatatcacctcatcagaactgcttatgaaatcaacgaagagccgaccgcctatggcgatcacggcattcgtatttatggcatctggtcacctattgcagagagcaagatctgcactcatgccgtgaagtggaaaatggttcgtaaggccgttgacgttcaggaggcggcagccgaccagggcgcttgcgccccttggactcgtggcaataactgtccccttgctgaaaatttgaaccaacatgagaaagacaaatcagcggatagggattccagaacggacattacccgcatggatgacaaggagttgcacgattatttgcacagtatgagcaaaaaagagcgccgtgaattggcagcaaggttacgcctggttaaaccgaaacggcgtaaagactacaaacagcgaattacagagcatcagcgccagctgctcgtctataaactgaagtccagaggatttgatggcagcgagaaagaggtcgatttactccttcacggtggcagtattccgtcaggagctggcttgcgtattttctatcggagccaacgtttgcaggaggatgataagtga

SEQ ID NO: 373331 - DNA, 858 bp, Salmonella enterica
atgagcaccatgctgaaatgggcgggaaataaaaccgccataatgtccgaactgaaaaaacatcttcctgctggcccgcgactggttgaacctttcgcgggttcctgtgctgtgatgatggagacggattatcccagctatctggttgcggatattaatcttgatttaatcaacctctataaaaaggttgccgctgattgtgaatcgtttatatctcgtgccagagttttatttgagatcgcaaacagggaggtggcttattacaacataaggcaggagtttaattactcaactgaaattactgatttcatgaaagcggtatatttcctgtatctcaatcgtcacggctaccgtggtttatgtcgctataacaagagcgggcatttcaacattccctacggtaattataaaaatccgtatttccctgaaaaagaaattcgcgcatttgcagaaaaaacccagcgagcaacgtttatctgcgccagctttgatgaaacgctggcgatgttgaaggcgggggatgtggtgtattgcgatccgccgtatgacggtacgttttccggctatcacactgatggtttcactgaagatgaccagtatcacctggcatccgttcttgaacatcggtcatcagaaggacatccggtcattgtttctaacagtgacacatccctgatccgttcgctgtatcgcaattttactcaccactatatcaaggtaaaacgcagcatcggtgtggcggctggcgagggtaaatcagcaacagaaatcattgctgtttccgggccgcgctgctgggtgggatttgaaccttcacgtggcgtggatagttctgctgtgtacgaggtgcgtgtatga

SEQ ID NO: 373332 - DNA, 228 bp, Salmonella enterica
atggctgatgcaatggatctcgtacagcagcgcgttgaagaagaacgccagcgtcatgtccgtgctgcccgtgccaaaacgccgggcgtgtcccgtgtgctttgcgttgagtgtgaagcgccaattccgccagcacgccgccgtgccattccgggtgtgcagctttgcattacctgtcaggaaatcgcagagctgaaaggcaaacattacaacggaggtgctgtatga

SEQ ID NO: 373333 - DNA, 234 bp, Salmonella enterica
atgcgtaatattgaaaccctcacgactaaaaccggaccggatgacgcagggcttaatattttactgacagaggctcgtctggaagaacgccgggcaagggctgaagcaatggcagctcgccttgacagcctggcgtgtcatatcacatcccgcaagctaaaccacgtcgaagcggcagagctgctgcgtgtgaatgctgaagcaatccagaacgaagcgcaggagatccactga

SEQ ID NO: 373334 - DNA, 342 bp, Salmonella enterica
atggctattgaaggcgctgcggcgactgttccattaagccccggtgaacgcctgaatggacttaatcacattgcggaattaagggcgaaagtatttggcctgaatattgagtcagagcttgagcggtttattaaagatatgcgtgatccacgggatatcaataacgaacaaaataaacgagcactggctgccatattttttatggcaaaaattccagctgaacgtcacagcatcagcattaatgagctgaccactgatgaaaagcgggaattgattaaagcaatgaatcattttcgtgcagtggtgagcttatttcccagacggctaaccatgccgaattaa

SEQ ID NO: 373335 - DNA, 201 bp, Salmonella enterica
atgattacgaaagaaccatcatttgcatcgctgctggttaaacaaagcccggcaatgcattacggtcacggctggatcatgggtgaggatggtaaacgctggcatccgtgccgttcacaagatgaattgctggcagaactatctacgaaaaaacgggggaacaaatggctattgaaggcgctgcggcgactgttccattaa

SEQ ID NO: 373336 - DNA, 510 bp, Salmonella enterica
atgtttgattacaagatttccaaacatccgcattttgatgaagcctgtagagcttttgcactacgtcacaatatggcgaagctggcagaacgtgcaggaatgaatgttcagacactgcgaaacaaactcaacccagatcaaccgcatcagctcaccgcaccagaaatctggctgcttaccgatctaactgaagattcaacgctggtagatggctttctggcacagattcactgcctgccatgtgtaccaattaatgaggtggcaaaagagaaactgccgcattacgtcatgagtgcaactgcagagataggtcgtgtcgcggcaggtgcggtttctggcgatgtaaaaaccagtgcaggccgtcgtgatgcgatcagcagcattaactctgttacacgactgatggcgctggctgctgtttcattgcaggcccgtttacaggctaatcctgcgatggcgagtgcagttgataccatgactggccttggtgcttcattcggtttgctgtga

SEQ ID NO: 373337 - DNA, 243 bp, Salmonella enterica
atgagtactgatatttcaattcgtgtaccaaaagagatggctacgcctgcagagttcgcagagtgggagggtatttcccgcggctctgtttaccaaaaaattcaccatggtcaacttgctaagtacatggtcaagaaagaaaaaaacaaaggtcgtgtaagcctgcgttatctgatgtacaaaaccgatcaggtccgcgaatccctcggacattccaacttccgcgtcattgttggtaagtaa

SEQ ID NO: 373338 - DNA, 633 bp, Salmonella enterica
atgttaaatatcagaatgggttccgatacgggaggtaaggcagctattgagaggctgcttgaggcttatggattcacaactaagcaggcattaagcgagcacctgaatgtctcaaaaagcactatggcaaacagagtgttacgtgatagctttcctgctgactggataattcagtgtgcactagaaaccggtgtttcgttgctttggttagctacaggacagggaagcatgacaggaggatgtgagcctgagaaaagatctcataatgagaacatacaagcaattaaaccgttatccaaactcataactccatctattcctaaaggaatcttggagaatggacgactcagtattgatgaagagattttcctagaccacagcatattacctgcagactatgaagaatcgatgttcttagaaacccctactgattgttatctcatcgataaatcagttaaacaagtcagcaatggattctggcttatcaatattgatggaatgtttattattgcaaaaatcatgcggattcccggcaataagattgtagtaaatcaagatgaagcgtctttcgagtgctctgctgatgatgtggaagttattgggcgtgcagtcaaagtaataaagagtatctaa

SEQ ID NO: 373339 - DNA, 1014 bp, Salmonella enterica
atgactgtcagaaaacagccaaacggtaaatggttgtgcgagtgctatcccaatggacgcaatggcaagcgcgtgcgtaagcaatttgctaccaaaggcgaagccattgcttttgaaagcttcacaatggaagaagtgaacaaaaaaccatggctgggggaaaaggaagatcggcgacacctatcagaattaattgagctgtggtattcactgtatggtcaaacactcgcagaccccaaacgcctgatggcgaaacttagaattatctgtactggtctgggcgatcctatcgcctcagagctgacagccggtgattttactaaataccgagaagcgcggctaaaaggtgaagtgcgaaatgaagatggcacgcttatgtcgcccgttaagccccgcactgtaaaccttgaacagcgcaacctatcatctgtttttggcacactgaaaaagttgggccactggtcagcccccaatccgcttgccgggctgccaacatttaaaattgctgagggtgaactggcgttcctgaccccggaagaaattaaacgtctgctggatgcctgtgctgattctcaaagccccagtctacttttaattgcaaaaatatgcctggccaccggcgcacgctggagcgaagccgaaaacctgcagagtcatcaggtatcaaaataccgtatcacttataccaagactaaaggtaagaaaaaccggacagtgcctatttctaagggtttatatgaagaactacctaagaacaggggaaaattattcacaccttgtagaaaagcctttgaacgcgcggtaaaacgagctggcatcgagctaccagaagggcaatgcacacatgtattacgacatacatttgccagtcactttatgatgaatggcggaaacatattggtgttacgtgatatccttggacactcagatataaagatgactatggtttacgcccatttttctccagaacacttagaagatgcagtatataaaaaccctttgaataatttataa

SEQ ID NO: 373340 - DNA, 1662 bp, Salmonella enterica; identical to SEQ ID NO: 368139

SEQ ID NO: 373341 - DNA, 1863 bp, Salmonella enterica
ttgtttaaatgcgggaaagacgctgaggcgttaaaagaagtttttaccaattcaaataatgtcgccggtaagaaagcgataatggagtttgccgggctctttcgttcagcgctcaacgccaccagtgattctcctgaggcgaagacgctactgatgaaggtgggggcagagtataccgcgcaaatcataaaagatggcctgaaagaaaagtcagcttttgggccatggctgccagaaacaaagaaagcggaagcgaagctggaaaacctggaaaagcagctgttagatattatcaaaaataacactggtggtgaattaagtaaattatcgacgaatcttgttatgcaggaggtgatgccctatattgccagctgcattgaacataactttggctgtacgttagatccgttaacccgcagcaatcttacgcaccttgttgacaaagcggcggcgaaggcggttgaggcgcttgatatgtgccaccaaaaattaacgcaagagcagggtaccagcgtaggacgggaagcccggcaccttgaaatgcaaacgttgatacccctgctgctacgtaatgtttttgcacaaattcctgcagataaactgcctgaccctaaaattccggagcctgcggctggaccagtacctgatggtgggaaaaaagcagaacctacgggtattaatatcaatattaatattgatagcagtaaccatagcgtggataacagtaagcatattaacaatagccgaagccatgtcgataatagccagcgccatatcgataatagcaaccatgataatagccggaagacgattgataatagccgaacatttattgataacagccaacgccatggcgagtcacaccattcgactaacagcagcaacgtaagtcatagtcattcgcgtgtggattcgactacgcatcaaacggagacggcacacagcgccagcacaggggcaattgaccatggcatcgcgggtaaaattgacgtcacggctcatgcgacggcagaggctgtgaccaacgcttcatccgaaagtaaaaatggaaaggtggtcacgtcagaaaagggcactacgggtgaaacaccctcttttgatgaagtcgatggcgtaaccagcaagagcattatcggcaagccggtacaggccacggtgcacggcgttgatgataataaacagcaaagccagacggcagagattgtgaatgtgaagccgcttgccagtcaactggctggcgtcgagaatgttaaaaccgataccttacaatcagacacgacggtaattacaggtaataaagccggtacgaccgataatgataatagtcagacagataagactggcccattttctggtttgaagtttaagcaaaatagtttcctctcaacagtaccgagcgttacgaatatgcattcaatgcatttcgacgcccgtgagacgtttttgggtgtgatacgtaaagccctggagccagatacctccacaccgttccctgtacgcagagcgtttgacggcttgcgtgcggaaatattacccaatgacacgataaagagtgcagcgttgaaagcgcaatgtagcgatattgacaagcacccagaattgaaagcgaaaatggagactctcaaagaggtcattactcatcatccacaaaaagaaaaactggctgagattgcactgcagtttgccagagaggcggggctgaccaggctaaaaggggaaactgactatgtgttaagtaatgtgctggacggacttatcggagacggtagctggcgagctggcccggcttacgagtcatacctgaataaacctggcgtggatcgggttattactaccgttgatggcttgcacatgcagcgttaa

SEQ ID NO: 373342 - DNA, 510 bp, Salmonella enterica
atgaaaaaatggatgttagccatctgcctgatgtttataaatgagatctgccaggccactgattgctttgatcttgcaggccgggattacaaaatagatcctgatttactgagagcaatatcatggaaagaatcccgttaccgagttaatgccatcggtattaatccggtaacgggatatggcagcggactgatgcaggtagattcccagcattttaacgaactggcccgctacggaattaagccagaacatctgacaacagatccctgcatgaacatttataccggtgcttattatctggcaatagcatttaaaaaatggggcgtcacctgggaggccgttggtgcatacaatgccggattcaggaaaaccgaacgccagaaccagagacgtcttgcctacgcatcagatgtttaccggatttatactgggataaaaagcagtaaaggtatccggcttccggccacgaagaaatcacttccggaaattaacagcgtgcagaacaattaa

SEQ ID NO: 373343 - DNA, 822 bp, Salmonella enterica
atgcgattagcttcccgttttggtcggtataattccatccgccgtgaacgtcctttaacggatgatgaattaatgcagttcgtgccttcggtattttccggtgataaacatgagtcccggagtgaacattatacgtatattccaacaatcaatatcatcaataagttacgtgatgaaggtttccagccattctttgcctatcagagtcgggttcgtgatttgggacgtcgcgaatacagtaaacatatgttacgtcttcgcagggaagggcatattaacggacaggaagttcctgaaattatcctgcttaattcacatgatggttcatccagttatcagatgatccccggaatttttcgttttgtctgcacaaatggcctggtgtgcggaaataattttggcgaaatccgcgctccacataaaggtgatattgtcgggcaggttatcgagggagcgtatgaagtgctcggtgtctttgataaggtcactgataatatggaggcgatgaaagaaattcatcttaacagtgacgagcaacatttatttggcagagctgcactgatggtcaggtatgaagatgaaaataaaacgccagtgacacctgaacagataattactccccgtcgtcgggaagacaaacagaacgatctctggacaacctggcagcgggttcaggagaatatgataaaaggtggattatcggggcgaagtgcctccgggaaaaatactaggacaagagccattacaggtattgatggtgatataagaatcaacaaggcgttatgggtgattgccgaacagttcagaaagtggaagtcatga

SEQ ID NO: 373344 - DNA, 141 bp, Salmonella enterica
atggccttcagttatagctacgcgctcagtcagggtgtggataagcagttccgccatatcaacattgcggaagccgatcacttcaaacagttcctgcgtcagattaagcgtgccggcctcgatatccgggcgatctgctga

SEQ ID NO: 373345 - DNA, 210 bp, Salmonella enterica
atgcctgtcagcccgcgccgggaaaaaacgcgcgccggtggcgctgaaaggggccgcgctcacgcgccgcccctttcattacgcggacgttctgatgggggcttctgtttcttcatgcctgtcatttgtctgttactgatgatgttgttgttcctgctactgctactgctactgctactgctactgttcttctttttcctgctgctctga

SEQ ID NO: 373346 - DNA, 564 bp, Salmonella enterica
atgcacagtcagttaagagaacgtatccggctgatgcgcgcaaggctggataacgccgcgccggttgctgaaatccgggctgaatctcagctttttgtgactcctgccccggtctgtgatcgcctggtgatgctggcggagatcagcaaccgtgatcacattctggaaccctctgccggcaccggggccatactgcgggcgattcgggataccgcgccgggggccatgtgtgatgcggtggaaatcaacagcgggctggtccggtatctgcgggaaaattttaacggtgtcagggttcagtgtggcgacttcatggaatggcagccagtgcagtattacagccgggttatcatgaatccgccgttcagccacgggcaggatatccggcatatcctgcgggccttttccctgttgcgtccgggtggagtgctggtcgccgtctgtctcaacggaccacgccagcaggagaagctgttaccgttttctgacgtccgcgaggagctgccgcgcggcacgtttgcttataccgatgtcccgacgatgattattcgtctgcgtgcctga

SEQ ID NO: 373347 - DNA, 1362 bp, Salmonella enterica
atgacattagcagcaatcaccatgaccgccccggaagccgccagccctgtgcagatgtaccgcgcgacctactcaccggatgacaacaaactgcgcctgtatgccgtgtcacgtcttgactcggagacgtataaaaaagtgcatgatgccggtttccgctgggcaccaaaacaggcgctgtttgtcgcgccagcatggacaccgggccgggaagacgtgctcctctcacttgccggagagattgaggatgaagacagcacgctcgctgaacgtcaggaagcacgggcggagcggtttaccggatacagcggaaagcgggccagtgaatccgcacaggcacttgatgaagtggaaagactggccgcgatgatcccgcccggtcagcccattcttgtggggcatcacagcgaacgccgcgcccgtcgtgatgcgcagcgtattgaaaacggcatgaaacgagccgtgatgctctttgaacgtgcggaatactgggaagagcgggcgcggtcggcactgcttcacgcgaagtataaagaacgtccggacgttcgctggcgtcgtatcaaaaaaatcgaagctgatttgcgcaaggctgaaaagaccatcgcgcagtcgcagaaatatctgacgatgtggcgggctgaatcgctggatctgaatatggcaaaactcatcagcagtcatgaccatatcagcgcctgtttcccgctggatacgtatccgcgcccggcagaaaaaagccagtatgaaggaagtcgatcgttatggtcggccctggatgatgacatcatcaccacggagcaggcccgcgaaattgcgatccgctgtcatgaacggcagattcagcatcaacaacgctgggttaaccactatcagaaccgcctgatctatgagcgtgccatgctggacgaaagcggcggcgtggttacccggacacaggattttgagccgggcggacaggttttcagccggggcgagtggctgaccatcatccgtgtgaacaaaagcaacggggcggtgagttcagtcacaacgccaaattacagttttctcgggtacagcggcacgatgaaagtgacgcccgatcgcatcacggactacaaagcaccatcggcagaagaggctgccgtcgctagtcaggccgcgaagcgtccgccggtagtcaactatccgggggaaggtttccgggaaatgacaaaggcacagtgggccgccctgccccgggactgtaaggccgtgcgcagtgtggcagaagcagaagaccacggggcataccggtaccgccgcacaatggacaataatttccgcctggtgaatgtgtatatcaccgacatgaaaatcacggaaatcccacagaaataa

SEQ ID NO: 373348 - DNA, 231 bp, Salmonella enterica; identical to SEQ ID NO: 7907

SEQ ID NO: 373349 - DNA, 192 bp, Salmonella enterica
atgaatatcagcacagaaacccgcgaaattctgcgtaattacagggccgtgattaatgcgcggcgtcgtgaaatggggcagaaaccgctcaccaccgcgcagattgttgatgaaatctgcgattttgtggtgaatcagcaggcggttttcctgggcggtcactacatcttacagggtagcagaaacaggtga

SEQ ID NO: 373350 - DNA, 423 bp, Salmonella enterica
atgtactgtactgttaaagaaattatccgcgaagtgctggatacagacgtgccggacagtgaatgcgtttttgccgtagtgctgacccgtggggatgtgcgtcacatagcccaggactggagtctgacagacgatgagctggaaaccgtcatgcagcggctggacgatgcctttgaatatggtgcggatgtcagcgttgttcacggcgttgttcgtgaactgatggaagaaaagcgcgccagccgtcaggtgacagtcccggcggtgatgctggaaaaagtgatggcgctggcaggcagtgaaatgaagcgcctgtatgccgtcgggagtgagaacgggggcgacggtgacgcattcgtcagggaggaacgcgaagcaatggacgttgtgttaaaggcgctggacggggagacgatgtcatga

SEQ ID NO: 373351 - DNA, 426 bp, Salmonella enterica
atgcaatatgcgaaacctgtcactctgaatgttgaagagtgcgaccgtctctcctttctgccgtatctgtttggcaacgattttctgtatgccgaggcgtatgtgtacgcgctggcgcaaaaaatgatgccggaatatcagggaggcttctggcacttcatccgcctgccggacggtggcggttacatgatgccggatggcgaccgtttccacatggtgaacggtgcaaactggtttgaccgtaccgtgagtgctgatgccgcaggcatcatcctgacctcccttgtgattaaccgccagttgtggctgtaccacgacagcggggatgcaggactgacccagctttaccggatgcgcgatgcgcagttgtggcgtcacatcgaatttcacctcgaatgcaacgcgatttacgcggctctggactga

SEQ ID NO: 373352 - DNA, 771 bp, Salmonella enterica
atgaacgaaacgctgaatgcactgatttgtcgccacgcccgtaacctgctgctggcgcagggctggccggaagagacggatgttgaccagcgaaatccgaaccatccgggctggatcagcatttacgtgcggctggatgcgccccggctggcgacgttacttatcaaccgtcacggcggcgtactgccgccgcacctggcctctgccattcagaaactgaccggaaccggggcggaacttgttctgtccggcagtcagtggcagtcgctgccggtacttccggcagacggaacgcaggtgtctttcccgtatgccggtgagtggctggcagaagacgaaatcagggctgtacttgcggcggtgcgcgatgcaatacgaagcatctgttaccaggtggcagacgatgcgcggcgtatccgggcggcgctgaccaccaccggtcagacgttgctgacccgccagacgcgccgctttcgtctggttgtgaaggaaagcgatcacccctgctggctcgatgaagatgacgaaaacctgcccgtggtgctcgatgccatcgtgaaccggggagcacgtttttcgtcggtggaaatgtacctggtcagcgattgtattgagcatatcctgtccagtgggctggcctgcgatgtgctgcgtataccggatgaaccgccccgccgctggtttgaccgtggtgttctgcgggaggtggtccggaaagcccgggccgaaatccgcagcatggcggatgccctggcaaaaatccggaaatga

SEQ ID NO: 373353 - DNA, 435 bp, Salmonella enterica
atgtacggaacatgcgaaacgctatgccgggagctggcagtaaagtatccgggagacatgccgctgatgctggttatctggtccccggaagagattcaggccctcgctgacggaatggatatttccctgtccgatcatgaaatcagaaccgtcctggcgcgcctggaggacatcccggaagaccagcggactgaatccggtatttcttccggcgtggcgatggagatcatcaataacgtgagcgaaaaccgccaggtgaccgtccctgctgaactgctggcgtccctgattcagaccgctgaacaggcattgtggaaacgtgaatgggccgcccgggatcatggcctcgccgtcccggaatgcgtcacccgccgtcaggcggtgattaatcaggcccgcaccctgctgaaaaacaacacacgcgaaaacgactga

SEQ ID NO: 373354 - DNA, 222 bp, Salmonella enterica
atgaactatgccggacacgaaaaactgcgcgccgaagtggcggaggtggccaatgccatgtgcgacctgcgtacaaccatgaatgagatggagcagcggtacagctttaatgccgacaccctgccggaacgtctggtgcgtcagacgctgtttcgcgcaaaccgcctcctgatggaggcatataccgaaattctggaactggatgcgtgctttaaagattga

SEQ ID NO: 373355 - DNA, 684 bp, Salmonella enterica
atgtcccgttttatcctgggtgactgcgtgcgagttatggccacgtttccggacaatgctgtcgatttcatcctcaccgacccgccgtatctcgtcggtttccgtgaccgttccgggcgtaccattgccggcgataaaaccgatgaatggctgcaaccggcctgtattgaaatgtttcgcgtactcaaaaaagatgcgctgatggtcagcttctacggctggaaccgcgtcgatcgctttatggccgcctggaaaaatgcgggattcagcgttgttggtcacctggtcttcaccaaaaactacacatcgaaggccgcatatgtgggctatcgccacgaatgcgcctacatcctggcaaaaggccgtccacgtctgccaccaaacccgctgccggacgtgctgggctggaaatattcgggcaatcgtcatcacccgacggaaaagcccgttaccagcctgcaaccgctgattgagagcttcacacacccgaacgcaattgtgctggacccgtttgcaggcagcggctcaacctgcgtcgccgccctccagtccggacgccggtatatcggtatcgagctgcttgagcagtatcaccgtgccgggcagcaacgccttgccgccgtgcaacgggccatgcagcagggggccgcgaatgatgactggtttatgccggaggctgcgtaa

SEQ ID NO: 373356 - DNA, 927 bp, Salmonella enterica
atgccaaactggtgctcaaatcgtatgcatttttctggtgaaccagcacagatcgctgagattaaacgactggccagcggtgcagtcacaccgctttatcgccgcgccacagatgaaggtattcagctgtttctggccggtagtgccggacttctgcagaccactgaagatgtgcggtttgaaccatgccccggactgacggctgccgggcgtggtgttgtatcgccggagaatatcgcgttcacccgctggctgacacacctgcagaacggtgtgctactggatgaacaaaactgcctgatgctgcatgaactctggctgcagagtggtactggccagcgtcgctgggaaggattaccggatgaggtcagggaaaccatcaccgtgcatttcaccgccaaaagaggtgactggtgtggcttctggagtaacgaggatgtatcggtgtggtggaaccgtctgtgtgacaatgtactgccggaaaaaaccatgccgtttgacctgctgacggttctgcccacccgcctggatgttgaagtgaatggctttaacggtggtgttctgaacggtgttccttctgcgtatcactggtatacggaacagtatggcgtgaagtggcctgtggggtatgaggtgaatatcagcagtcagggagacaacttcattcaggttgatttcgacacgccgtggtgtcagccggaaagcgacgttattgcagaattaagccgccgtttcagttgcacactggagcactggtatgccgagcagggctgcaatttctgtggctggcagcgatatgagcgtggagagcttgttgatgtcctgtggggggaactggaatggtcttccccgacagatgacgatgagctgccggaagtcaccggacctgcgtggattgtcgacaaggtggcgcattacggtggatga

SEQ ID NO: 373357 - DNA, 972 bp, Salmonella enterica; identical to SEQ ID NO: 224829

SEQ ID NO: 373358 - DNA, 1167 bp, Salmonella enterica; identical to SEQ ID NO: 224830

SEQ ID NO: 373359 - DNA, 756 bp, Salmonella enterica; identical to SEQ ID NO: 7912

SEQ ID NO: 373360 - DNA, 807 bp, Salmonella enterica; identical to SEQ ID NO: 224831

SEQ ID NO: 373361 - DNA, 306 bp, Salmonella enterica; identical to SEQ ID NO: 224832

SEQ ID NO: 373362 - DNA, 219 bp, Salmonella enterica; identical to SEQ ID NO: 224833

SEQ ID NO: 373363 - DNA, 231 bp, Salmonella enterica; identical to SEQ ID NO: 7663

SEQ ID NO: 373364 - DNA, 417 bp, Salmonella enterica; identical to SEQ ID NO: 16762

SEQ ID NO: 373365 - DNA, 1566 bp, Salmonella enterica; identical to SEQ ID NO: 7664

SEQ ID NO: 373366 - DNA, 1023 bp, Salmonella enterica; identical to SEQ ID NO: 7665

SEQ ID NO: 373367 - DNA, 342 bp, Salmonella enterica
atggtagatcgcactaaaaccattattaaaaatgaaaccaacagtattggtgaggacagaaacaccacggtaacgaagaatgacggcctttccgtaaaactggcgcagacgatcaatatcggcaccacttatcgtttagatgttggcgatcaattcacgcttcgctgcggcaatgcggcgcttgttttacataaggacggctccattgagttttgtggcaagcaactgatgttacataccagcgatgtcatgcaactgattggtaaaggtattgatatgaacccggatggcggcacagccgtaaccgccgatgatattgccccccttcccacctctgagtga

SEQ ID NO: 373368 - DNA, 447 bp, Salmonella enterica
atggatcgaccataccgcatacaggaagggtgttttgtcctgcctgaaacatttacggatcgcagcgtcaatatttttatcctggagggcaatgaacgaacatcgcccagcctgaatatttcccgcgatacgctaaaacctgatgaagacctgcccgcctatattgaccgccagattgcgctgatgaaaaaaaatctcggtcagcaccgggtattgtcgcgagcgcctgcacaggcaggaacgggcaatgatgcccttatgggggaacaaattgccgccacccataaatccgggaaaacggaagtgtaccagcgtcaggccgggtttattgcaacccctggcaaggtactggtcttcaccctgaccagttcccgtccttttgatgataaagcagacctactctggaacacttggctggcaggctttcagccggataaaaacgaataa

SEQ ID NO: 373369 - DNA, 4089 bp, Salmonella enterica
atgtatgaagcagcccgtgtggatgatcctatctaccacaccagcgcgctcgccgggtttcttatcggcgctatcatcggcatcgccattatcgcgcttgccgcctttgccttctttagctgcggttttcttgccgggctgattctgggttttatggccgatcaaatagcctccggggtattgcaactgggcgaggccatcgggcgctccatccaccacacggcaggaaaaatcctcaccggttcggagaatgtcagcaccaacagtcgcccggcggcccgcgcggtactgagtacggtgaaatgcgataaccatatcgcagaaaaacgcatcgcccaggggtcggaaaatatctacatcaacagccagcctgccgcccgtaaggatgaccacaccgaatgcgatgcggtgattgaagacggttcgccgaatgtgtttctcggcggcggcacacagacggtactggaaatcagttctgaaattccggactggctgcgcaaggtggtggatgtattgtttgtcgtggcgagtctgctcggtgggctggccggggcgtggcggcaggcggcaaagctggggacgaaatttggcactaaatgtgccgctaagtttatcggcggggagcttaccgggatggccgtgagtgaggctatcagcgggctgttcagcaatccggtggatgtgaccaccgggcagaaaatcctgctgccggaaacggacttcaccctgcccggtcgcctgccggtcacctgctcgcgtttttacgccagccacctggaaactgtgggactgttgggacggggctggcggctgaactgggaaaccagcctgcgcgatgacgatgaacacatcacgctgaccggcgtacaggggcgggaactgcgttacccgaaaacgatgctgacgcccggccaccagatatttgacccggaagaacagttatacctcagccgcctgcatgacgggcgttacgtgctgcattacaccgatcgcagctattacgtatttggtgattttgacagtgacggcatggcatacctgctgtttatggagacgccgcaccgccagcgcattgtcttcgggcacgaaggaggcagactggtacggatagcctccagcagcgggcatcacctgttactgcaccgcacacagaccccggcaggggagcggctgtcgcgaattgaactggtgcagggcggcacccgtggcaatctggtggagtaccggtatgacgataacggtcaactgaccggcgtggtgaaccgggcgggaacgcaggtgcggcagtttgcttatgaaaacgggctgatgacggcgcacagcaatgcggcggggttcacctgccgctaccgctggcaggaactcgacggcgcgccgcgcgtgacggagcacgacaccagtgacggcgaacattaccgctttgactatgattttgccgcaggcaccaccaccgtcaccggcaggcagggggagtcatggcagtggtggtacgacagggagacgtatatcaccgcgcaccggacgccgggcggtggaatgtaccgcttcacgtacaacgaagaccacttccctgtcaacattgagctgcccggcggtcgcacggtggcgtatgaatatgacatccagaaccgggtggtgaagacgacagatccggaaggccgggtgacgcagacgcagtggaacggcgagttcgacgaaatcacgcgcacggcgctggacgatgacgctgtctggaaaacgcagtacaacgcccacggccagccagtgcaggagacggacccggaagggcgggtgacgcagtacgcttacgatgaacaggggcagatgtgcagccggacggatgcggcgggcggcacggtggtgacggcgttcgacagccgggggcagatgacgcggtacaccgactgttcagggcgcagcacaggatatgaccacgatgaggacggcaacctgacgcgggtgacggacgcggaagggaaggtggtacgcatcagctacaaccgacttgggttgccggagacggtaaactcaccggggaaacagcaggacaggtatacctggaatgcgctggggctgatgagcagccaccggcgcatcacggggagcgtggagagctggcggtatacgccgcgcggtctgctggcggcgcacacggatgaggagaagcgcgagacgcgctggcagtacacgccggaaggccgggtggcagcgctgaccaacggcaacggggcgcagtaccggttcagtcacgatgcggacggcaggctggtgcgtgaggttcgcccggacggactgagccgtacttttatcctggatgacagcggttatctgacggcgatacagaccacgggcacgcagggcggcgtgcggcgggagacgcagcagcgggatgcgctgggccgtctgttacggacggagaatgaacacggccagcggacgttcagctacaaccggctggaccagataacggcagtgacgctcacgcccacggaggcggggcaacagcagcaccggatgcaggccgacacggtgcgttttgagtatgaccgcagcggctggctgacggcggagcacgcggggaacggcagcatacgttatcagcgcgacgcgctgggcaacccgacggacatcacgctgccggacgggcagcacctgacgcatctgtattacgggagcgggcatctgttacagacggcgctggacggcctgacggtgagcgagtatgagcgcgacagcctgcaccgtcagataatgcgcacgcaggggcagcttgcgacgtacagcggctatgacgacgacgggctgctgagctggcagcgcagtctggcgtccggcagtgcccctgttcttcccggtcagcgcccggcgcggcagggctgcgtgacgtcgagggactattactggaacaaccacggcgaggtgggcacgattgacgacagcctgcgtggcagcgtggtgtacagctatgacagaagcggttacctgaccgggcgttccgggcagatgtatgaccacgaccgttattattacgataaggcgggcaacctgctggataacgaagggcagggagcggtgatgagcaaccggctgccgggctgtggtcgtgaccgttacggctataacgagtggggcgagctgaccacgcggcgcgaccagcaactggagtggaacgcgcaggggcagctgacgcgggtcatcagcggcaacacggagacgcactacggctacgatgcgctggggaggcgaacccgcaaggcgacgtacgggcggcacacgggtcatacggcgcggagccggacggactttgtgtgggaggggttcaggctgttgcaggagaacgtgcagcagcagggctggcggacctatctgtacgatgcggaacagccgtacacgccggtggcgagcgtgacggggcggggagaaagcaggcaggtgtggtattaccacacggacgtgacgggcacgccgcaggaggtgacggcggcagacggaacgctggtatgggcggggtatatcagggggtttggagaaaatgcggcggacatcagcaacagcggggcgtactttcaccagccgctgcggctgccggggcagtattttgacgacgagacagggctgcattacaatctgttcagatattatgcaccggagtgtgggcggttcgtcagtcaggatccgattgggctagtgggtggtattaacttatatcaatatgggtctaatccgttaagctggatcgatccatggggattgacagggacatatattttcactgacggtactacatattatattggcaaagggcctgaatccagaatgtatgattcgatggactatcgtataggtggtagggctaatgcgatacaatttgcgcatatggattttggtgatgataaattaggttttatggtcgagcatcgtttaatggaaaaatataatgctcggtattctcctgatttcgcgaatagcgaacgtataagctcacctggtaagagattatatgatgctgccgatgctaagacacaaagaaaagttaatcgattagctaataaattagatagtaaatatagagcatctaagggttgttaa

SEQ ID NO: 373370 - DNA, 846 bp, Salmonella enterica
atgaattcaatttattataacgagaatacaggcgatcttgaaataccgttggatattctatccaagggaatatcttatgctgcaaaaaagaaattacataacataaaaatagtcagcccaataaaaaaaagcaatgacaaacttgatttatcgccattgactgaaaatgataatattcattcacttcatattattgatgatatcgatctaaaaaaaattgacttatcgccattatatgaaatgaaaaatataaaaaaaataacaatgaagtatttaaaaggaagtattgatttttctaaatttcagaagttggaaactctttatataacaaaggccgatgccgaaatagatattttaaatatcgataccctggtagatcttttactggtttcaataaaaaacactaattgtgaatttatatcttcgcttaggagcttgaatacgctgagaataagtagtgtcagtatagaaactctatctgggatagagcttctcagtaatttaaagtcattaaaaattacctactcccccaacgttattgatatatcaagtataaataaaataaaaaccttatcttatctgcatgttgagaagtgtaaaaaattaactgaattttctttcctaagggataacgaatctatatgtgatctttttttgtcagatgttgattcactctcttttattccagaaatgaaaagtattaaaaatcttaaattttggaacttaaaagatggagatttaagctatttgcttaactcttcgacacttaaaactgttgattttcaccccgataaaaaaagttatagtcacaggaaagacgaaataaataagaaaataggtaaatga

SEQ ID NO: 373371 - DNA, 1221 bp, Salmonella enterica
atggcgtttctcaccccggtacgccgcctgcgtggcagcgtggtgtacagctatgacagaagcggttacctgaccggacgctcaggtcagatgtatgaccacgaccgttattattacgataaggcgggcaacctgctggataacgaagggcagggagcggtgatgagcaaccggctgccgggctgtggtcgtgaccgttacggctataacgagtggggcgagctgaccacgcggcgcgaccagcaactggagtggaacgcgcaggggcagctgacgcgggtcatcagcggcaacacggagacgcactacggctacgatgcgctggggaggcgaacccgcaaggcgacgtacgggcggcacacgggtcatacggcgcggagccggacggactttgtgtgggaggggttcaggctgttgcaggagaacgtgcagcagcagggctggcggacatatctgtacgatgcggaacagccgtacacgccggtggcgagcgtgacgggaaagggagaaagcaggcaggtgtggtattaccacacggatgtgacgggcacgccgcaggaggtgacggcggcggacggaacgctggtgtgggcggggtatatcagggggtttggagaaaatgcggcggacatcagcaacagcggggcgtactttcaccagccgctgcggctgccggggcagtattttgacgatgagacagggctgcattacaatctgttcagatattatgcaccggagtgtgggcggttcgtcagtcaggatccgatcgggctaaggggcgggataaacctttatcagtatgcgccgaatccgattagatggatcgatccattaggacttgattatacaacctggcaaattcattcccctggttatggtgatgttgttcaaaaaggacttcatttttatgcccctggtggtgttgaattatctgtaagacctgataataaaggtggtataacatttacaaatgcaatcccaaatgaagcaggaagtccaaaagtaacaaaagcaattgcattggctaaagaacattttgaaaaagatgtcagattcagaaatgatatactgaataaggaaaatgaagcggtgcaatctgttcttgatcatgcaaaaagagaaactggatctttgcgtgatttggctaatggtcgatcaagagagtttcgtgatattgcccgaaacgtggaaagacataatacacgtggagggtgtgtatga

SEQ ID NO: 373372 - DNA, 426 bp, Salmonella enterica
atgaaacataataaatggaatcctgcatttaaattggatgtaatgaatgttattaaagatctttctattaaaggtttatgtgttggctcatctattgctcaacttcatgaaataatgggagagccagaactaccagtggcaagaatgggtaagaaatcaaaaatatattattggctttatggtaatgttagtttcctttccgaaggagactatgtgatagctatagatattgattttcatagcaatagagaacgggtgattacgtttgataagacaatgaattgggagatcaatgattggttaaatttagcgaatgaaaatgaatttgacataaataatgataataaattgttttatttaactcatgatggcatttcaatttgtttatctcaaaatggtaggctgggcatggtttctcttcggtga

SEQ ID NO: 373373 - DNA, 234 bp, Salmonella enterica
atgccgcaggcggggtttattaacgggatgcccgtcaaggtgcgggtaatgagggattgcatcgtgatcacgccgcagcatacccacggactctttgtctgtattgaagggatgggcgtgacttttattaatcaaaagaaggtgaaagcgtggctaaaaacctttccgggggcgctgaacgataccggggatattccggtgattaagcggagcaggctcgaaggcgggatttga

SEQ ID NO: 373374 - DNA, 132 bp, Salmonella enterica
atggtaaatttttgttatgacatcataacattctggatgtgcgactttaacttagttttaacgaggtgttttttcaatgaaaaacataaaaaaattaattatcgcaagcgtgttgagcatgataactgctag

SEQ ID NO: 373375 - DNA, 180 bp, Salmonella enterica
atgaaaaacataaaaaaattaattatcgcaagcgtgttgagcatgataactgctagttgttatgctggttcaatcgtggtgggctcagagcaacaaagttcagtggatattggctttgcctctccccagcagttgagcgtaacatttgctccagtggcgggcttagttgtgctggggtga

SEQ ID NO: 373376 - DNA, 498 bp, Salmonella enterica
atgaaaaacataaaagatttaattatcgcaagcgcattgagcattatggctgctagttgttatgctggctcgctcgtgccgaatacaagcactggcgtgtcggcggatgtaagcttcagcaatcctggacaactacaagcacagcttactccagtggctggcttgatggctgggcagcatggcaatggtgatgttattgctcaacttaaggtaagcggttcgatcaaacaattcgcggtaacgggagattattctaaacctgaaacagtgggcaacaacagcgatgtgtggaaggtaaaaggtaaaaatggtaataccattacagttagctttcaggggacaaagtgggcctcaaaaggttcattagtggatggttctgcgcataagtggtggatatataacatgggagacggaatcgatgtgatcttgtctggagcacaaacggtaaatgctgatatttatccagtgacgttaaacgtagcggcgtatcaggcttaa

SEQ ID NO: 373377 - DNA, 2511 bp, Salmonella enterica
atgaagttcaaacatcctgccttgctactgtttatcgcgggagtggttcactgcgcaaatgcgcacgcttacacattcgatgcatcaatgttgggcgatgcagcgaaaggggttgatatgtcgctctttaaccagggggtacaacagcctgggacttatcgagtggacgtgatggtgaatggtaaacgtgtcgacacccgtgatgtggtgttcaaattggaaaaggatgggcaaggaacgcctgttctggctccttgtttgacggtcagtcagctttcacgctacggcgtaaaaacggaagattaccctcagttgtggaaagcagcaaagaccccagatgagtgtgcggatctgaccgccattccacaggctaaagcggtactggatatcaataatcagcaactgcaactgagtattcctcaggtggcgttgcgtccggaatttaaggggatcgctcctgaagctctctgggatgatggtattccggcgtttctgatgaactacagtgcgaggacaacgcagacggattacaaaatggatatggagaggcgtgacaactcttcctgggtacaactgcaaccgggaatcaatataggtgcgtggcgtgtccgcaatgcgaccagctggcagcggagtggtcaactgtcggggaagtggcaggcagcatatacctatgctgagcgtggactgtactcactaaaaagtcgtctgactctggggcaaaagacttcgcagggggagatatttgatagtgtgccatttaccggtgtgatgttggcatcggatgacaacatggtgccctacagtgagcggcagtttgctccggtagtgcgtgggattgcccgcacgcaggctcgggtggaggtcaaacagaatggttacaccatttacaacaccactgtggcgcccggaccgtttgcactgcgggatctgtcggtaacagacagtagtggtgatctgcatgtcaccgtgtgggaggccgatggcagtacacaaatgtttgtggtgccgtatcagaccccggcgatagcactgcaccagggatatttgaagtacagcctgttggcgggccgataccgatcgtcagactctgcaacggataaggcgcagatcgcgcaggctacgttgatgtatggtctgccgtggaatctcactgcatacggcggtatacagagtgcaacgcactatcaagctgcattgcttggtttggggggatctctcgggcggtgggggagtttatctgtcgatggaagcgacacacacagtcagcgtcagggggaggcagtacagcaaggagcctcctggcgactgcgttacagcaaccagctgactgcgacggggacaaatttttttctgacgagatggcagtatgcctcacagggctataacaccctatccgatgtgctcgacagttatcgacatgatggcaaccatctatggtcgtggcgggaaaatttgcagccgagctcgcgtaccaccctgatgttgagtcagtcatgggggaggcatttgggcaatctgagtttaaccggttcccgtaccgactggcgtaatcgccccggtcatgatgacagctacggactgagttggggaacctctattggagggggctcgctgtcattgaactggaatcaaaacagaacgctgtggcgcaatggcgcgcaccgtaaagagaacataaccagcctgtggttcagtatgccattaaggtgctggacggggaataatgtaagtgctagttggcagatgacttcaccatcacacggtggtcagacgcaacaagtgggggtcaacggagaggcattcagtcagcaactggattgggaggtgcgtcagagttaccgtgccgatgccccgccaggtggtggtaataacagcgcattgcacttggcatggaatggggcttacggcctgttaggtggtgactatagctacagccgggcgatgcgccagatgggagtcaatatcgcgggaggtatagttatccaccatcatggtgtgacgctggggcaacctttgcaaggctcagtggcgctggttgaagcgccaggggcctcgggggtgccagttggcggctggcctggcgttaagacggattttcgtggcgacaccacagtgggcaacctgagcgtctatcaggagaatacagtcagtctcgatccgtcgcaactaccggatgacgcagaggtcacacaaaccgatgtgcgcgtggtgccaaccgaaggggcggtggtggaagcgaagtttcatactcgcatcggggccagggcactgatgacgctgaaacgggaagatggtagcgccattcctttcggggcgcaggttatagtcaatgggcaggatggcagcgctgatctggtggatactgatagccaggtttatctcactggtctggcggataagggcgaactgacggtgaaatggggagcacagcaatgtcgggttaactaccacctacctgcccacaagggaatcgcgtccttgtatcaaatgagcggtctctgcagatag

SEQ ID NO: 373378 - DNA, 822 bp, Salmonella enterica
atgtcttatgcacgacatttaccggtattaatgtatcaccatgtcagtgataaacccggacagataaccttatctccctgtacgttccgggcgcagatgaaatggctggctgaatctggctggaaaaccgttaccgcagcagaggtggaagctttttatcatggtgcaagattgcctcgtaaaagcgtcatgctgacctttgatggcggctggctggataactggttgcaggtttttccggtgctgcaggagtttaatctgcatgcgcatctctttcttgtgaccagtttgatcagtgacggaccggtccgtattcctgcaggcgaaccggtgtactctcatgatgagtgtcagatgctggttaaacaaggccgggctgatgaggtcatgctgcgctggtcagaggtccgggagatgcacctcagtggccttgttgagtttcactcgcacacgcacacccaccgacgctgggaccagaagcctgtgtcccgtaatccgtcggatttgcttcgtgtcgatattcttcttagtcgtaagcggatgagggagatgctgggttattgcagtcagcatctgtgctggcctgagggctggtattgttctgactatattcatgtggctgaagagttggggttcacatacctgtataccacagaaaggcgtatgaacaatccagtcatcggttcacagcgtattggtcgtatcaacgcaaaggagcgaaagaatgtgggctggctgaaacgtcgtctgttttatcacaccacgcccggattttcttcgctgctggcccggcataagggggcacgtcggatagctgactga

SEQ ID NO: 373379 - DNA, 1302 bp, Salmonella enterica
  misc_feature (26)..(35): n is a, c, g, or t
atgaaggggcgtcaaacaacacctannnnnnnnnnttctcgtaacgagaaaatggtgggatacagtttcgagcatggcttcaacgacacctttaccgtgcgccagaatttacgttttgtcgaaatgaaaaccgcgcaaaaaagcgtctatggcacggggattgcggcggacggacatacgcttaaccgcggtactatcgttgacaacgagcgtttacagaatttcagcgtagatacacaactggaaagtaaattcgcgaccggcgatattgatcatacgttgctgacgggtgtcgatttcatgcgtatgcgtaatgatattaacgcgacgtttggtagcgcgccgtcaatcgatctctataacaattaccatcctgaatactttgctttcggcggcgctgagccgtaccagatgaacgaaagtaaacaaacaggcctctatgttcaggatcaggcggaatggaataagtgggtatttactctcggcggccgctatgactggtctaaacaagcgacaacggtgcgtcagaattccactacgccgacagaaggatatattgaacgtaatgaccaccagttcacctggcgcggtggcgtaaactacgtattcgataatggaatttcaccttacttcagctatagccaatctttcgagccaagcgccttcgatttgtggagcaccccacgcgtttcttacaagccgtcaaaaggcgagcaatatgaagcaggggtgaaatatgtaccgaaagacatgccggttgttgttacgggtgccgtttatcagctgaccaaaaccaataacctgaccgccgatccaaccaacccattagcgcaggtgccggcaggcgaaattcgtgcgcgaggtgtagagctggaagccaaagcagcattgacggctaacatcaatatgacggcgtcttacacttatactgatgctgaatacacgaaagacactaatctgaaagggaatacgccagagcaggtgcctgaacacatggcgtcgttgtggggcgattacaccttcaacgaaggtccgttgtcaggtttaacgctgggaacaggcggtcgttttattggttccagttacggcgatccggctaatagcttcaaggtaggcagcgcagcggtgatggatgcggtcgtcaagtacgatctggcgcgttttggtatggcgggctccagcattgcggttaacgttaataatctgctcgaccgcgaatacgtcgccagctgcttccagacctacggctgtttctggggcgcagaacgtcaggtcgttgcaacggcaaccttccgtttctaa

SEQ ID NO: 373380 - DNA, 915 bp, Salmonella enterica; identical to SEQ ID NO: 14950

SEQ ID NO: 373381 - DNA, 828 bp, Salmonella enterica; identical to SEQ ID NO: 107019

SEQ ID NO: 373382 - DNA, 858 bp, Salmonella enterica
atgaacgcgctactggaacccttcagctatgaatatatgctcaatgcgatgtgggtctcggcgatggtcggcggtctctgcgctttcctgtcatgctatctgatgctaaaaggctggtcgctgattggcgatgcgctgtcgcactctattgtcccgggtgttgcgggggcatatatgctggggcttccgttttctctgggagccttcttttccggcggactggcagcgggcagcatgctgtttcttaaccaactcactcgcttaaaagaagatgccatcatcggcctgatcttctcgtccttttttggcctggggctgtttatggtgtcattgaacccgacatccgtgaacattcagaccatcgtcctgggcaatattctggcaatcgatccggcggatatcctgcaactcactatcattggcattctctcgatcatcgtgctttttttcaaatggaaagatcttatggtgacctttttcgacgagaatcacgcccgtgctattggattgcatccgggcagattaaaaatcctcttcttcaccctgctgtcggtttcgaccgttgcggcgctgcaaacggttggtgcctttctggtgatctgtctggtggtgactcccggtgcaacagcatggttgttaaccgatcgttttccccgcctgctcatgattgctgtaactattggcagtgtgaccagtttcctcggcgcgtgggtcagttactttctggacggcgcgacaggtggaatcatcgtggtggcgcagacactgctgtttcttttagcatttgtctttgcgcccacccatgggcttttggcaaatcgtcggcgtgcgcataaagcgctggaggatcgctcatga

SEQ ID NO: 373383 - DNA, 858 bp, Salmonella enterica
atgatggcattattactggagccactgcagttcacctttatgagtcacgcactgctgatttcactggtagtttccataccctgtgcgctgctgtcggtctttctggtcctgaaaagttgggcactgatgggtgacgcgatgagtcatgcggtttttcctggcatcgtgcttgcctggattctggggttacctctggctacaggggcattcgtcgccggagtattctgtgcggtggcgacgggatacctgaaagacaacagccgaatcaagcaagatacagtgatggggattgttttttctggcatgtttgccgcaggtctgatcttgtatattgcagtcaaaccagacgtacatcttgatcatattcttttcggcgacatgctcgggataaccatcggcgatataatccagacggtgattattgccggactggttacacttgttattagcgtaaaatggcgggattttttgctgttcagctttgattatcaacaggcgcaggcaagcggtttgcatacgagatggctgcattatgggctgctgtgcatggtctccctgaccattgtggcgacgctgaaagcggtaggtatcattctctctatttctcttctcattgcgcctggtgccattgcggtactcctgacacaacgctttcatattgcgctcctgctggcaactggcatatcgatattggtctcaatgactggtgtctggctgtccttttttatcgacagcgcgccagctccgacaattgttgtcttattcgcggtcatgttcatcatgacgtttaccgttaccagcatcaacgcacgcacaaaggaaaatgccgaaccacgggatttgttatcatccgattag

SEQ ID NO: 373384 - DNA, 435 bp, Salmonella enterica; identical to SEQ ID NO: 5187

SEQ ID NO: 373385 - DNA, 216 bp, Salmonella enterica; identical to SEQ ID NO: 5188

SEQ ID NO: 373386 - DNA, 381 bp, Salmonella enterica; identical to SEQ ID NO: 5189

SEQ ID NO: 373387 - DNA, 1194 bp, Salmonella enterica; identical to SEQ ID NO: 5190

SEQ ID NO: 373388 - DNA, 1725 bp, Salmonella enterica; identical to SEQ ID NO: 5191

SEQ ID NO: 373389 - DNA, 948 bp, Salmonella enterica
atgtctggggcaaacattgttcacagcggatatggactgcgctgtgaaaaactcgacaagcctctgaatcttggctgggggctggacaatagcgcggtgttgcactggcccggggagctgccaacagggtggctgtgcgacgcgctggatcagatatttatcgccgcaccacaactttcagcagtggttcttccctggtccgaatggtgtgaggagccacaggcgctgacgcttttcggacaggtacaaagcgacattatccatcgttccgctttctggcagttaccgttatggctgagttctccggcaaaccgggcctccggtgaaatggtttttgatgcagagcgtgagatttatttcccgcagcgccccccccgtccgcagggtgaagtttatcgtcgttacgatccacgcattcgcaggatgctgagtttccgcattgccgatcccgtttctgatgcagaacgtttcactcgctggatgaacgatccgcgcgttgagtatttctgggagcaaagtggctcactggaggtacagatcgcctatctggaacgccagctcaccagtaaacatgcattcccgctgattggttgtttcgacgatcggccgttcagttatttcgaaatctactgggcggcggaagaccgcattggtcgccactattcgtggcagccctttgaccgtggcctgcatctgctggttggtgaacagcaatggcgcggagcccactatgtgcaaagctggctgcgcggggtgacacattacctgctgctgaatgagccacgtacgcagcgcacagtactggagccacgcaccgataaccagcgcctgttccgccatcttgagcctgcgggataccggacaattaaagagttcgacttcccacataaacgctcgcgcatggtgatggcggatcgtcatcacttcttcacggaggtcggtctgtaa

SEQ ID NO: 373390 - DNA, 1743 bp, Salmonella enterica; identical to SEQ ID NO: 5193

SEQ ID NO: 373391 - DNA, 1278 bp, Salmonella enterica; identical to SEQ ID NO: 5194

SEQ ID NO: 373392 - DNA, 2202 bp, Salmonella enterica; identical to SEQ ID NO: 224848

SEQ ID NO: 373393 - DNA, 366 bp, Salmonella enterica; identical to SEQ ID NO: 10065

SEQ ID NO: 373394 - DNA, 900 bp, Salmonella enterica
gtggatagcgcacgcgcccttattgcccggggatggggagtaagcttagtcagccgttgtctccgggtgtcgcgtgcgcagttgcacgtcattctcagacgaaccgatgactggatggatggccgccgcagtcgtcacactgatgatacggatgtgcttctccgtatacaccatgttatcggagagctgcccacgtatggttatcgtcgggtatgggcgctgcttcgcagacaggcagaacttgatggtatgcctgcgatcaatgccaaacgtgtttaccggatcatgcgccagaatgcgctgttgcttgagcgaaaacctgctgtaccgccatcgaaacgggcacatacaggcagagtggccgtgaaagaaagcaatcagcgatggtgctctgacgggttcgagttctgctgtgataacggagagagactgcgtgtcacgttcgcgctggactgctgtgatcgtgaggcactgcactgggcggtcactaccggcggcttcaacagtgaaacagtacaggacgtcatgctgggagcggtggaacgccgcttcggcaacgatcttccgtcgtctccagtggagtggctgacggataatggttcatgctaccgggctaatgaaacacgccagttcgcccggatgttgggacttgaaccgaagaacacggcggtgcggagtccggagagtaacggaatagcagagagcttcgtgaaaacgataaagcgtgactacatcagtatcatgcccaaaccagacgggttaacggcagcaaagaaccttgcagaggcgttcgagcattataacgaatggcatccgcatagtgcgctgggttatcgctcgccacgggaatatctgcggcagcgggcttgtaatgggttaagtgataacagatgtcggtga

SEQ ID NO: 373395 - DNA, 11475 bp, Salmonella enterica
atgcgtctactcgccgtggtttcgaaattgactggcgtctccaccactgtggaatcctcagcggtcactcttaacgccccgtcaattgttaaattatcagtggcccgggaggaaattagtcaacttacgcgcattaatcaggatctggtggtgaggctccattccggcgaaacgatcacgattaaaaacttttacgttaccaacgatctgggcgcaagccagctggtactggcggaaaacgatggcacgttatggtgggtagaaaatccgcaagccgggctacattttgaacaaatcgctgatattaatgagctgatggtcacttctggcgcttcccatgaagcaggcggcgccgtttggccgtgggtactggctggtgcggtggcggctggcggcattgccgctatcgcgtcttccggcggcggcgattcccaccatcattcggatggcgataatccgccccccgataacaccaatcctgacggtaatccccctgataacagcaatcccggcggcagtacccccaacggcaatactccaggtagcagtaatcctgtagatactaccccgcctctcgctcccggcgaattgttgatttcagcggacggaaaaacggtgagcggcgaggccgaagcgggcagtaccattaccatcaaagatccttcaggcaacgtcgttggcgagggcaaagcggatagcgacggtaaatttagtattgatctgacagcgccacagattagcggcgaacaacttaccgtgaccgcgactgacgatgccggcaataccggcccatcggcaaccattgatgcgcccaacgttcctctccccgatacaccagctatcaccgccgctatcgatgatgccgctcccctcaccggcacgctgagcaataaccagtttacgaacgacaatacccccacactggagggcaccggcagtacaggcacagtcatccatatttacgccaatggtcaggaaataggctccacaacggttgatgccagcggaaactggcattttgccattaccagcgcgctagcggatggggaaaatcatttcaccgccattgcgactaacgttaaaggcgaaagtagcgaatcagcccgctttacgctgactatcgacacactcagccccgatgccccacgcgttgaactgattgccgataacaccggtttgctcaccgggccgctacagaataatgaccggactgacgaggcaaaaccgctattttccgggcagggagagacaggcaataccatcacgattaaagagggttcaaccgttatcggcagcgctaccgtagacgaaaatggacgctggacctttacgccgactacgccgttaagagatggcgaacatacctttaccgtcgaacaaagcgacaaagccggaaacacgagccgcgtgacgacaacgcctactatcattgtggacaccacgccaccggacgccgctatcattgataatgttgcgaaagacggcacaaccgttagcggcaccgctgaagctggcagtactgtgtcgatctatgacccggcgggaaattacctgggctccacgattaccggagaaaataaccacttcagcatcacgctgaatccggctcagacccacggcgagcgtctggaagcgcgtattcaggacgccgtcggtaacatcggccccgccacggagtttaccgcttctgactcacagtatcctgccaagccgactatccttaccgtgacggatgacgctggcgtcgttaccgggctgctgaaaaatggcgatgccacagatgataaccgcccaaccctcagcggtactgctgaaccaggcagtacgatatcgattaacgataatggctttcctgtagcgacctttccgcccattgtcgccgacgctgacggcaaatggagctttaccccctcgctggcgcttgccgatggcgaccatgtctttaccgctaccgcgaccaacgatcgcggcaccagcgggcagtccgtctcctttaccattgatatcgacacgcagccgccggtgctggaaggcctggcggttagcgacgtcggcgacagactcaccggcactacggaagctggcagtactgtggttatcaaagacagcctgggaaatacgctcgggagtggaacggcaggcgacgacggtaccttctcaataggtattagcccggcgaaaattaacggcgaaacattaagcattagcgttaccgataaagccgcgaatagcggcccggtagaaacgctgaacgcgccggataaaactgcgcctgcggcaccggacggtcttaccgtggcgaccgacggtctgtccgtaagcggtcaggcggaagccggggcaacggtcactatccgcgacagtagcaacaccgtacttggcagcgccgtcgctaatggcaacggacaatttatcgttccgctgaatacggcgcagactaacggccaggcgcttatcgctaccgccaccgatgtcgcgaaaaacgaaagcgccgccgcgacggttatcgcgccggacagtaccgcgccggaaatgccaaaaaacgtggtaattagtgaggatggcaccagtatcagcggcaccgccgaaccgggtagcgccatcacgatcgccacgccggacggcaagccgcttggcagcggcaaagcagatggcgaaggtcattttacccttcccctcgtccccgcacagaccaacggcgaacaggttaccgtcaccgccaccgacagcgccaacaatgtcagcccgccaactacagcgcaagcgcccgatatcaccgccccggataagcccattatcactcaggtgctggacgatgttgaaagcttcaccgggccgctggttaacggacaaaccaccaatgacaaccgccccacccttagcggtacggcggaggctggcgcgcgtgtcgaaatttttgataacggtgtttcgctgggactcgccacgctacagcccaacggcacctggacgtttacgccgtcgcaaaatttaggtgaaggcgcgcatcgactgaccgtaatcgcaaccgacgctaaaggcaatgccagtccggccgcgtcattcgacctggtggtcgatacgcaatcgccgcagcaaccggtaatcaccttcattacagatgatgcgccgggtattctcggtagcgtcgcgcatctggggctcactaacgacagcacgccaacgattaacggtacaggtgaaccgggttccacagtacacctgtatcagaatggcgcccggatagcagatattatcgtcggtaattccggcgtctggagctacgcctacaccacgacctcgccactggcggacgacacctacacctttaccgtgacggccagcgacagtaacggcaacaccacgcctttttcgaccgattttacgattaccattgatacccaggcccctgccgcccccggcgttatcggcgtagctgacggcgacggaaatacgattgataccaatcagattacccaggaatcccagccccggttgagcggtagcggcaccgcaggcgacacaatcatcctttacgataacggcaatgccataggtcaggcgctggtcggcacggacgggcgctggcagtttacgccgcctgccgcgctgggcgacggcgaccaccttctgaccgctcgcgccaacgatccggcggggaacgaaagtcccgaatccctcagctttaccctgcgcgtcgatacccaggcgccggatgcgccgcagatcgtgtcagccgccatcaccggcggagaaggcgaggtgctactggcaaacggcagtattaccaatcagcgtatgccgaccctcagcggcaccggcgaacccggcgccatcatcaccctgtacaataacggcgtagaactggctaccgtccaggtcaatccacagggtagctggacctatccgctaacccgtaatctgagcgaaggattaaacatcctgacggccaccgccacggatgccgcaggcaatagtagccccacctccggcgttttctccgttacccttgatacccagcctccagcgcagcctgacgcgccgctaatcagcgataacgtcgcgccggttatcggcaacatcggcaataatggcgcaacgaacgataccacaccgaccttcagcggcacgggagagatcggcagcacgattattctctacaataatggcagtgaaattggtcgcacaacggtaggcgataacggaagctggagctttacgcctgcggcactgacgccagaaacctataccattaccgtcacggaaaccgatatagcgggcaatatcagtccaccttccgcctcagtcacttttacgctagacaccactgcgcccgccaatccggttatcacttttgccgaagataacgtcggcgaagtccaggatactattgtcagcggcgcaaccactgacgacaatacaccggtcattcacggcactggcgacatcggcagcgtgatcacgctctataacggcagtagtgtcgtgggcgtagtcaccgtcgatgagaccggtacctggacgctgccggtgaccagcgcgttgccggatggcgtctacaccctgactgccattgccgccgatgcagccggaaacagcagcggcgtatcgaacagctttaccttcaccgtcgacaccgttccgttgcagccgcccgtcgtcaatgagatcctcgacgatgttgcaccagtgaccgggccattaaccgatggcgcctttactaacgatcggacgctgactattaacggcagcggcgaaaacggcagcaccgtcacgatttacgacaatggcgtggcaatagggacggcgctcgtcaccgacggggtctggacattcaatacgcccgaattatcagaagtcagccatgcgctaaccttcagcgcgactgacgacgctggaaataccacggcgcaaacccaaccgatcaccattaccgtggatatcaccgccccgcccgcgccaacagtccagacggtggatgacgatggcacgcgcgtcgccggacttgccgatccttacgctaccgttgaaattcaccatgccgatggcaccctggtcggcagcgctgtcgctaatggcaccggtgaattcgtcgttacgctcagtccggcgcaaaccgatggcggtacgctgacggcaattgctatcgatcgcgcggggaataacggcccggctacgaattttcctgcttccgacagcggtctgcccgccgtcccggccatcacggcgattgaagatgatgtcgggagcgtacaggggaatattgcggcgggcggcgccacggacgacaccacgccgacgctgcgcggcaccacggatatcggctctaccgttgaagtcttcattgatggcgattcggcaggctttgccaccgttgacgccagcgggaactggatctttgagatcgcgacgccattaagcgaaagcacacattacttcaccgtccaggcaaccaatgcgaatggcccgggcggcctgtccgcaccggtcgggatcactgtcgatcttagcgcgccggcgcaaccggttattaccagcgcaacggatgatgtccccggcatgaccggtacgctggataacggcgcgctcaccaatgattcacgcccgacgctcaacggaacgggagaagcaggcgccacgatccgcattctggataacggcgtagaaatcggttccgccacggtagatcaaagcggcaactggcgcttcaccccgaacgcgccgctggagagcatcgcacacatctttaccgccgtggcgaccgatcccgctggcaatagcggccagccttcggacggctttacgctgaacattgacgcgctggcgccagatgtgccggttatcacctccgtgattgacgataacaatcaaccgaccgtcccggtgttaccggggcaatccaccgacgatcgacagccaatactgaacggaactggcgaacctggcgcgacaatcaccatttttgataacggtacgccgcttggcacggctcaggtaggcgaaaacggtagctggaccttcccggtgccccgcaatttgtcagagggaagccataatctgacggttagcgctaccgatccggcgggcaataccagcgcggtctccgcgccgtggacgatcgtggtcgatattacgcctccggcgatcccggttctcacctccgtcgtggatgaccagcccggtattaccggcaacctggttagcgggcagctaacgaacgatgcgacgcccaccctgaacgggcgcggagaggcaggtgcgacgattaatgtctatcttgacggtaattccgcgtccatcggtaccacgacggtgaatagcgacggcacgtggagtttcacgccgcagacgccgcttgcaaacggtagccacacgttcacccttagcgccaccgatccggcgggtaatagcagcgcggtgtccagcggatttgtgctgacgattgacgccacaccgcccgccgcgccggttatcgccagcgtggcagacaatacggcgccggtgacgggcatcgtccccaacggcggctcgacgaacgaaacccgaccaacactctcgggtaccggtgaggcgggtacaaccatctcgatttataatggcagcgcgctggtcggcacggcgcaagttcaggccaacggtagctggagctttacaccgtctacctcgctgggcgcgggcgtctggaacctgacggcgacagcaaccgatgcggcaggcaataccagcgccgcgtccgaaatacgctcgtttactattgataccacggctcccgccgcgcctgttattgatacggtctacgacggtacgggccccattaccggcaatctgagttcagggcagatcacagacgaggcgcgccctgtcattagcggcacccgtgaagccaacacaactattcgtctctacgataacggcacgctgctggctgaaattcccgccgacaatagcaatagctggcgctacacgcccgatgcctcgctggcgacgggcaaccatgtaattaccgtcattgccgttgatgccgcaggcaacgccagccccgtttcggacagcgttaatttcgtcgtcgatactacgccgccgctgacgccggtaatcacatcagtcagtgacgatcaggcgccaggcctcggcacgatcgcgaacggccaaaataccaacgatcctacgccaaccttcagcggcaccgcagaagccggcgccacgatcacgctctatgaaaatggtacggtcattggcacgacaacggctcagcctgacggcgcgtggagcgtctccacctcaacgctggcaagcggaacgcacgtcatcaccgccgtcgccaccgatgccgcaggaaacagcagcccgaacagtacggctttcaccctgacggtcgataccaccgcgccgcaaacgccaatcctgacgtccgtggtggatgacgtcgcgggtggggtcacaggaaatctcgctaatggtcagataaccaatgataaccgccccacgctgaacggcactgccgaagcgggcaacgtggtcagtatctatgatggcgacactctgcttggcgtcacctcggctaacgcgagcggcgcgtggagcttcacgccgacgacagggttaaacgacggcacgcgcacattaacagtgaccgccaccgacccggcaggcaacgttagcccggccaccagcgggtttactatcgtggtcgatacccttgcgccaacggttccgcttataaccagcatcgttgatgatgtcccgaacaacactggcgccattggcaatggacaatcgaccaacgacacacagccgacgctcaacggtactgcggaagccaacagcgcggtaagcatcttcgataatggcgcgctggtcgcgaccgtgaacgccaatgccagcggcaactggagctggacgccaaccgccgcgctcggccagggaggtcacgcctatagcgttagcgccgccgatgcggctggtaacgttagcgccgcttcgccatcgataacgattatcgtggataccattgcgcccggcgcgcccggcaacctggtcatcaatgctaccggtaatcgggtaacgggcaccgcggaagcaggcagtacagtgacgattacctctgatactggtgtggtactgggaaccgccaccgccgacggtacaggcagcttcaccgccacactcacgcccgcgcagaccaatggtcagccgctactggcatttgcccaggataaagcaggcaacacaggcattgccgccggatttaccgcgcccgatacgcgtgtgccggaagcaccgatcatcaccaacgtagtagatgatgtgggtatttataccggcgctatcgccaacggccaggtcactaatgacgcacaacccacattgaatggtaccgctcaggcgggcgccacggtgagcatttataacaacggggcgctgctcggcaccaccacggcgaacgccagcggaaactggagctttaccccgacaggcaatttgaccgaaggcagccacgccttcaccgccaccgcgactaacgccaacggtacaggcagcgtctccaccgccgcgacggtgattgtcgatacgctggcgcccggtacgccgtcaggtacgctcagcgccgatggcggttcactttccgggctggcagaggcaaacagcaccgtaaccgtcacgctgacggggggcgtgacgctcaccaccaccgctggcagcaacggcgcatggtctctcaccttgccgacaaaacaaattgaaggtcaactcattaacgtgacggcgactgacgctgcgggtaacgcctctggcacgttaggcattaccgcgccggttctgccgctggcggcaagggataacatcaccagtcttgatctgacctcgaccgccgtcaccagcacgcaaaactattcggattacggcctgctgctggttggcgcgcttggcaatgtcgcctcggttttgggtaacgataccgctcaggttgagttcaccattgctgaaggtggtacgggcgacgtcaccatcgatgccgccgcaacgggaatcgtgctttcgctgctcagtactcaggagattgtggtacagcgctacgacaccagcctcggcgcctggacgacgatcgtcaacaccgccgttggcgacttcgcgaatttgcttaccctgaccgggagcggcgttactctgaacctgagcggcctgggcgaaggccagtaccgggtactcacttataacaccagtctgctcgccaccgggtcatataccagcctggatgtcgatgtacaccagaccagcgcaggtattattagcgggccaaccatcagtaccggcaacgtcatggctgatgataccgcgccgacgggcaccacggtcaccgccatcaccaacgccaacggcgtcagtacgccggtcggcgcgggtggcgtggatatccagggacaatacggcacgctgcacattaatcaggatggcagttacacctacacgctgactaagcccacggcaggatacggacataaagagagcttcacctacaccatcacccagaatggcgtcggtagcagcgccgcgcaactggttatcaatctgggtcccgcgcctgtaccgggcagcgtgatagcgacagacaataacgcctcgctggtctttgatactcacgttagctacgtcaacaacggtccctcgacacaaagcggcgtcacggtattaagcgtcggacttggtaatgtactgaacgcgaatctgcttgatgatatgactaatccgatcatctttaacgttgaagaaggcgctacgcgaaccatgacgttacagggaaccgtcggcggcgtctcactggtttccacgttcgatctgtacgtttatcgcttcaacgatgccattcagcaatatgagcagttccgggtggaaaagggctggattaacaccctgctgttagccggacagtcccagccgctgaccctgacgttgcctggcggcgaatacctgttcgtgctgaataccgccagcggcattagcgtcctcactggctatacgttggcgatttcccaggaccacacctacgccgttgacagtatcaccgccaacaccaccggcaacgtactgaccaatgatgtcgtccctacggacgccctcctcactgaagtaaacggcgtggcgattgcggcgaccggcacaacggaggtaaacgggctgtatggctcgctcatcattgacgcaagaggcaactatacctacacgctgaagaacggcgtcggcgccgacagcattaaaacgccggacagctttatctatacggtcaaagcgccaaacggcgataccgatacggcctcgctcaatatcacgccaaccgccagggcgctggatgcgattaatgatgtcagcgatacccttagcgtcgccacgcttcaggataccgctgcctggctggactccagcgtcggcagcgccagttgggggctactcggcaaatcgggcagcgggagcggcacctttgacgttgcaacgggcaccgtacttaaaggcgcgtcactggtttttgatgtctccacgctcattacgctgggcaatctgaatattagctgggccattcaggagaacgggaccgtcatacgcaacggaaccgttccggtggcgaatatcacgctgggcagcgcgacggtgaccgttaacctgagcggcctggagctggatgccggaacgtacacgcttaacttcaccggcaccaataccctggccggggcggcgacaatcacgccacgcgtcatcggcaccaccgtcgatctggataattttgaaacgtccggaacgcataccgttcccggcaatatttttgacggcagcgatgcggcgggggcgatggatcagcttaatacggtgaatacccgcctgagcattagcgggtataacggcagcgccgccacgctggacgccgcggcgaataccaccagcgccacgattcagggacattacggcacattgcaaattaaccttgatggcgcctacacctacaccctgaataatggcgtcgcgatgtcgtccatcaccagtaaagaggtctttacctatcaactggatgacaagatgggtcatacggatagcgccacattgaccattgatatggcgccgcaaatcgtcagtaccaaccaaaacgatgttctcatcggctccgcctatggcgatacgctgatttaccacctgttaaacggcgcggacgcgaccggcggcaacggcgccgatcgctggcaaaacttctccaccgcgcagggcgacaagatcgatatccacgaactgctgaccggctgggatcaccaggcggcgacgctgggtaactttgtgcaggttcataccagcggtaccaatacggtgatatccgtcgatcgcgacggcgccggtagcgcgtttaaatccactgaccttgtcacgctggagaatgtgcagctcacgttaaatgatctgttgcagaacaaccacctgataaccggcggttga

SEQ ID NO: 373396 - DNA, 1410 bp, Salmonella enterica
atgggaagagtcgcgcctgtcgccatcgtactggcatttgctttgtttcatcaccagccccggggcgcagaagcgctgccaattatcacatccgaaggattagcaacggaccagatgcttccttcgctggatggctccgccgctgagttgccgctcagcgccgccgcgccgggcaacctgacgctcaatgacgcggtcaatcgcgccgttaactggcatccttctattcgcgaagccatcggcaaactgctcgcacagaatgaacaaatagaggtcgccaaatcgaaatattatccgcaagtcagcgctggcgtgaacaatgggtacagcaatacctacaccgatcacgggtatagcccctcgctagtgctgtcggtatcgcaaatgctttatgacttcggcaaagtggcaagccaggttcgcgccgaaaccgcaggcgcagcgcagcaacaggccaatgtgttgctcagtattgataccgtcgcgcacgaaaccgccaacgccattgtacaaacgcagagctggcagcaaatggtagaagcggcggaagaacagctcgtcgcgctggacagcatcggtaaacttatccggcagcgcagcgatgaaggcgctacgtcgctctctgacgtggtgcaaaccgaagccagaatcgaatccgcccgctcgcaactggcgcagtatcaggccaatctcgatagtgcgaaagcctcactgatgagctggctgggctggaattcgcttaacggcatcaataatgacttcccggcgaaactcgctcgcagctgtgagacggcgactcccgacgatcgactggtgcccgcggtactggccgcctgggcgcaggccaacgttgcgcgggcgaatctggactatgccagcgcgcaaatgacgccgacgatttcgctcgaaccttctgtacaacattatcttaatgataaatatcccagtcatgaagtgctggataaaacccagtattccacctgggtgaaagttgagatgccgctttaccagggcggagggctgactgcccgacgcaacgccgccagccatgcggtagacgcggctcagtcgaccattcagcgcacccggcttgatgtccgccagaaactgatggaggcgcgcagccaggcaatgagtcttgccagcgcgttacaaatccttcgtcggcaacagcagcttagcgaacgtacgcgcgaactgtatcagcagcaataccttgacctcggttcccgcccgctgctcgacgtgcttaatgcggagcaggaagtttaccaggcgcgttttgccgaactgcaaacggaaagccagttgcatcagttgcaactgaactgtctgtataacaccggcgcgcttcgtcaggcgttcgcgttaaatcatcgcagcattcaatccgtggagatccagccatga

SEQ ID NO: 373397 - DNA, 2181 bp, Salmonella enterica
atgacccgcgccgcccccgatgtagaagaggtactcagtgagcgcgcgctaagccaatgggcgcaggccatcagccatgtcgccggtcattatcgcgttgcctgttctcccggttcaattcaggccaacgcccggtggtttaggggtaaaagcagaacgaccgccttaacgcagctcgcgcggcaggcgggtttatcctttcatgcgccggacatagacaaaacggcatttagtcagtggcgattgccgttggttgtcgagctccgggacgggcagttattggtcatcgaacatgttaatgacgaagatgcggtagacgtttttgtgattgaagaagagagtcagcgtaaccgcctgacgctcagcgagttattgccggagatcctctatgttgccgcgctacgcccgctatcggcgctcaaggatagccgcgtcgaccgctatatctcccgctttaaacccgactggatgcgcgagctggttctgcaggatattcgcccttatttaccggtaatggtcgccgcctttctgattaacgtgctgtcgctggccgggattgtgttctctatgcaggtttacgatcgggtgatccccgctcagtcatatcctaccctgtacgttctctccttcggcgtgctggtagcggtgctgttcggttttctgctgcgtgaagcgcgtacgcacattatggatgtgctcggtaaacgcgccgatatgcgcatttccgatcgggtattcggtcatgcgttaaggctgcgcaacagcgctatcccccgttccaccggcagttttatctcgcagttacgcgaactggagcagatccgcgagatgattacctcttcaacgctggcgaccattgtcgatctgcctttctttttcctgtttatgatagtcctggcgattattgccccaccgctggcatggatagcgcccgtggcggctctgctgatgatcctgccgggcgtcgcactgcaaaaaaaactggctgtcctcgccaaccaggccgcccacgaagcgacgctacgcaatgcagtcttggtcgaaagcgttcaggggctggaagatattaaactgatgcaggcggagaaccgctttcttcagcagtggaatagctatatccgtattaccggcgagtcgggtctacgcacccgcaaactcacgcaagggcttatcagttgggggatgtcggtacaaagtctggtgtatgccgcagtgattatgttcggcgcgccgatggtcattgaaggcagtatgactaccggcgccgtggtcgccgcgtcgatgctcggctcgcggatgatcgcgccaatggctaacctgtgcggcgtgctggcgcgctggcagcaggtgaaagcggcgaagatgggtctcgacaacattatgcaactgcccaccgagacacagcatgacgatagcctgatacaccgcgacatcctccacgggcattacctatttgaaaacgctcagtttcgttaccataacgacgatcaacgcataccgttgcgcctcgtacgtctggagatcatgccaggcgagcggattgcgatactggggcgtaacggcgcgggtaaatccacacttttacaggcgatggcgggcggcctggagatgattcagggagatgcccggcttgataatctcagcttgtcgcacatcgatatggcggatttacgccgcaacatcggctttcttagccagaacgcgcggcttttcttcggcaccctacgagagaacctgacgctcggcgcgccgcacgccaacgatgaacagatttttgacgcgctcgaagtcagcggcggcgccgtcttcgtcaggcggctggcaaaagggttggatcatcccattatggagggtggtaacggcctgtccggcgggcagcgtcagtccctgttgctggcgagaatgctgctgcgctcccccaatattgtgctacttgacgaacccagcgcctcgctggacgagcatacggaacgagagtttattcagcggttacatcagtggcttggcaatcgaaccctggtcgtcgcgacgcaccgggtaccaatactggagctggttgagcgtgtcgttgtcctgaaagaaggacaactggtgatggatgcgccaaaagcgcaggcgcttaacgcggatcggatgcaaagtcaccgtcgggagtggaaaaatgaaaatcaatcagcatga

SEQ ID NO: 373398 - DNA, 1053 bp, Salmonella enterica
atggagcgttcactcgatagtctggctggtatggctaaatctgcttttggcgcggggacttctgctgctatgcggcaagctacctcgcccaaaaccattctggaatatatcattaacttttttacctgtggtgggatacgtcggagaaatgaaacacaatatcaggaattgatagagactatggctgagacattgaaaagtacaatgcctgacagaggtgctccgttgccagaaaacatcatcctggatgatatggatgggtgtcgtgtcgaatttaatcttcctggtgagaataacgaagctggacaagttattgtacgagtcagtaaaggcgaccattctgagacaagagaaattccgcttgtctcttttgaaaaaatatgtcgagctttactattcagatgcgaattttctctccctcaggattctgtaatattaactgcccagggaggcatgaatcttaaaggcgctgtccttaccggagcaaatctgacgtcagaaaatttatgtgacgcagacttaagcggcgcaaatttagagggggcagtgctgtttatggcggattgtgaaggtgcaaattttaagggcgcaaatctatcgggaacatcactaggcgacagtaatttcaagaacgcctgtctggaagatagcattatgtgtggcgctaccctcgatcacgctaatcttactggcgccaatttacaacacgcgagtctgttaggctgtagcatgatagaatgtaattgctccggtgcaaatatggatcacactaatctttcaggcgcaacccttatacgtgctgatatgagcggtgcgacattacagggtgctactataatggctgcaattatggaagacgctgtcttaacccgggcaaatctgcgaaaggcgagtttcatttctacgaacctggacggggctgatttggctgaggctaatttaaacaatacctgttttaaagattgtacactaacccatttgcgtaccgaagacgccacaatgtctacaagtacacaaacactctttaacgaattttatagtgaaaatatttag

SEQ ID NO: 373399 - DNA, 144 bp, Salmonella enterica
atgcgggggatactgccaaaaatggcaaatatgaagttaccgttgatagtgctacaggggctgtatcattcggtgctaccccaactaaatctactgttacaggtgataccgctgttactaaggtacaggttaatgctcctgtag

SEQ ID NO: 373400 - DNA, 135 bp, Salmonella enterica
atgcgcttaaagctggcgataagtattacgccgcagattacgatgaagcgacaggagcagttaaagctaaaaccacaagttatactgctgctgacggcactaccaaaacagcggctaaccaactgggtggcgtag

SEQ ID NO: 373401 - DNA, 297 bp, Salmonella enterica
  misc_feature (170)..(179): n is a, c, g, or t
ttgaatatttctgatatgagcgtagtgcctgtaagcactcaatcttatgtaaagtcctctgcagaaccgagccaggagcaaattaatttttttgaacaattgctgaaagatgaagcatccaccagtaacgccagtgctttattaccgcaggttatgctgaccagacaaannnnnnnnnngcaggttatgttgaccagacaaatggattatatgcagttaacggtaggcgtcgattatcttgccagaatatcaggcgcagcatcgcaagcgcttaataagctggataacatggcatga

SEQ ID NO: 373402 - DNA, 690 bp, Salmonella enterica
atgaaacctgttagcccaaatgctcaggtagcagggcaacgtcctgttaacgcgcctgaggaatcacctccatgtccttcattgccacatccggaaaccaatatggagagtggtagaataggacctcaacaaggaaaagagcgggtattggccggacttgcgaaacgagtgatagagtgttttccaaaagaaatttttagttggcaaacggttattttgggcggacagattttatgctgttccgctggaatagcattaacagtgctaagtggtggaggcgcgccgctcgtagccctggcagggattggccttgctattgccatcgcggatgtcgcctgtcttatctaccatcataaacatcatttgcctatggctcacgacagtataggcaatgccgttttttatattgctaattgtttcgccaatcaacgcaaaagtatggcgattgctaaagccgtctccctgggcggtagattagccttaaccgcgacggtaatgactcattcatactggagtggtagtttgggactacagcctcatttattagagcgtcttaatgatattacctatggactaatgagttttactcgcttcggtatggatgggatggcaatgaccggtatgcaggtcagcagcccattatatcgtttgctggctcaggtaacgccagaacaacgtgcgccggagtaa

SEQ ID NO: 373403 - DNA, 1509 bp, Salmonella enterica
  misc_feature (703)..(712): n is a, c, g, or t
atggtagtaaataaacgtttaatcttaattttactatttatactcaatacagcaaagagtgatgagttatcatggaaaggtaatgacttcaccctttatgccagacaaatgccattagcagaggttttacatctgctctcagagaactatgatacggctattactattagcccattgataacagctacatttagtggaaaaattccgcctggaccaccggtcgatattttgaataacctggcagcacaatatgatttgcttacctggtttgatggcagcatgttatatgtatatcctgcatcgttattaaaacatcaggttatcactttcaatattttatctactggacggttcattcattacttacgcagccagaatatcctttcatcaccgggatgcgaggttaaagaaattaccggtaccaaagctgtggaggtgagcggtgttcccagctgcctgactcgtattagtcaattagcttcagtgctggataatgcgttaatcaaacgaaaagacagtgcggtgagtgtaagtatatacacgcttaagtatgccactgcgatggatacccaataccaatatcgcgatcagtccgtcgtggttccaggggtcgtgagtgtattgcgtgagatgagtaaaaccagcgtaccggcgtcatcgacgaacaatggttcacccgctacacaggcattgcccatgtttnnnnnnnnnntgtttgctgccgacccacgccagaatgcagtgatcgttcgtgattatgcggccaatatggccgggtatcggaaacttatcacagaattagatcaacgccagcagatgatagagatttcggtgaaaattatcgatgttaatgctggagatattaaccagttaggcatcgactggggaacggcagtgtcgctgggtggcaagaaaattgcgttcaatacaggtttgaatgacggtggtgctagcggtttttcaacggtaatcagcgatacctcaaactttatggtgcgtttgaatgccctggaaaaaagctctcaggcttatgtactttcccagccatctgtggtgactttaaataatatccaggctgtgctggataaaaatattactttctataccaaactgcagggagaaaaagtggctaaacttgaatccatcactacgggttctttgttgcgcgttacacctcgcttgttaaatgataatggcacgcaaaaaataatgcttaatcttaatattcaggatggacaacaaagtgatacgcaaagcgaaacagacccgctgcccgaagtgcaaaattctgaaattgcttcgcaggccacattattggccgggcaaagtctattgctgggaggatttaaacaaggtaaacaaatccactcgcaaaataaaattcctttattgggcgatattcctgtcgtaggtcatttgtttcgcaatgatacgactcaagtacatagtgtaatcaggctttttttgattaaagcctcagtagtaaataatggcatatctcatggttaa

SEQ ID NO: 373404 - DNA, 2886 bp, Salmonella enterica; identical to SEQ ID NO: 25667

SEQ ID NO: 373405 - DNA, 876 bp, Salmonella enterica; identical to SEQ ID NO: 39017

SEQ ID NO: 373406 - DNA, 816 bp, Salmonella enterica
atgagccatattcaacgggaaacgtcttgctcgaggccgcgattaaattccaacctggatgctgatttatatgggtataaatgggctcgcgataatgtcgggcaatcaggtgcgacaatctatcgattgtatgggaagcccgatgcgccagagttgtttctgaaacatggcaaaggtagcgttgccaatgatgttacagatgagatggtcagactaaactggctgacggcatttatgcctcttccgaccatcaagcattttatccgtactcctgatgatgcatggttactcaccactgcgctccccgggaaaacagcattccaggtattagaagaatatcctgattcaggtgaaaatattgttgatgcgctggcagcgttcctgcgccggttgcattcgattcctgttagtaattgtccttttaacagcgatcgcgtatttcgtctcgctcaggcgcaatcacgaatgaataacggtttggttgatgcgagtgattttgatgacgagcgtaatggctggcctgttgaacaagtctggaaagaaatgcataagcttttgccattctcaccggattcagtcgtcactcatggtgatttctcacttgataaccttatttttgacgaggggaaattaataggttgtattgatgttggacgagtcggaatcgcagaccgataccaggatcttgccatcctatggaactgcctcggtgaattttctccttcattacagaaacggctttttcaaaaatatggtattgataatcctgatatgaataaattgcagtttcatttgatgctcgatgagtttttctga

SEQ ID NO: 373407 - DNA, 837 bp, Salmonella enterica; identical to SEQ ID NO: 22759

SEQ ID NO: 373408 - DNA, 804 bp, Salmonella enterica; identical to SEQ ID NO: 19906

SEQ ID NO: 373409 - DNA, 540 bp, Salmonella enterica
atgctgattatctgtattgttgttggtggctatatcagtgcattgtttaaagatacttttctgcaactgcctacttttgtctggtgtttatttgtcggtattattatccgtaatacactgactcatgtatttaaacacgaagtgtttgagccgaccgtcgatgtattaggtagcgttgctttatcgcttttcttggcaatggcgttaatgtcattaaaatttggtcaattggcaagcatggcagggccagtattaattatcattgctgtacaaactgttgtcatggtgctatttgcctgctttgtcaccttcaaaatgatgggcaaagattatgatgctgtcgtgatcagcgcgggtcactgtggctttggtatgggagcaacaccaacagcaattgcgaatatgcaaacagtcacaaaagcatttggaccatcacataaagctttccttgtcgttcctatggtcggtgcctttattgttgatatttcaaacagtatcttaattaaaatatttattgaaattggtacatactttacctaa

SEQ ID NO: 373410 - DNA, 675 bp, Salmonella enterica
  misc_feature (582)..(591): n is a, c, g, or t
atgatcctagatgccagttatacattattagtcgcatgtatcgcgctactcataggaatgtttgtcgtaaaatttaccccgttcctacaaaaaaaccacataccagaagccgtcgttggtggctttattgttgcaattgttctgttaattattgataaaacatcaggttattcgtttacttttgatgcttcattgcaaagtttattaatgctcacattcttttcctctatcgggctaagttctgacttttctcgactgattaaaggaggaaagccgttagttctattaactattgcagtaacgatcctaatcgccattcaaaatactgtcggcatgagtatggctgtcatgatgaatgaaagtccatttattggcttaattgcaggttcaattactctaacaggtggtcatggtaatgccggagcatggggccctattctcgctgataaatatggtgtaacaggcgccgttgaattagcgatggcttgtgcaacacttggattagtgttgggtggtttagttggcggccctgttgcccgtcatcttttgaaaaaggtctctattcctaaaacaaccgagcannnnnnnnnnacactatcgttgaagcttttgagcaaccaagcgtcaaaagaaaaatcaatgcaaataacgttattgaaaccatttcaatgctga

SEQ ID NO: 373411 - DNA, 1041 bp, Salmonella enterica
atgcgcgcgcttatttcgttcttttttttgataatcatcgtctcgaatgtagaaacggcatcagccgaaaccgggttgctacactggacgcgcgccgatcgggcgattccctggcggcaaacgtcagtcaatgcgagtaaaccctggaaactgtgcgcattataccccagcctgaaagattcttactggttgtccgtcaactacgggatgcaaaaagcggccaaattgtatggcgttgatttaaaagtgctggaagcgaatggctatcggcaactggcgacgcaacaacagcaaatgacgcagtgccgggagtggggcgccgacgctattctgcttggtagcagtaccgatcgtttcccggaactggaacggtatgccggtaatgtgccggttattgaactggtgaacatgattcacgatgccagcgtcgcaacccgcattggtctgccgtggtttcagatggggtatctgccgggacgtttcctggtgcagtggagcaaaggaaaaacgcttaacgttttactcttcccggggccggaagaagccggcggcagtcaggagatggcggcgggttttcgtcaggcaattaaaggcagcgccatcaacattgtggatatcgcctggggcgataacgacattgaagtgcagcgaaacttactccaggaaatgctggagcgccatccggacgccaatgtagtcgccgggtcggcgatagcggcggaggcggcgatgggcgaagggcgaaatttgacgactccgctcacgattgtctcattttatctgacgcatcaggtttatcgcggtttaaaacgcggccatatcctgatggcgctcagcgatcagatggcctggcagggagaattagcgataacgcagtcgattaaggtcttacaggggcaaccggtgcctgaaaatatcagcccgccggtgcttattttgacgcataacaacgccgacagcgcgcgcgttcgtcgttcgctatcgcctccgggatttcggcccgtctatttgtatcaatacacctccgaggctaaaaagtag

SEQ ID NO: 373412 - DNA, 2931 bp, Salmonella enterica
atgctggatgccaacggcgcatttgagcttgcgaacgtcaccacccatagcggcgccactaccgcgctggcggcgggcagcaccctttacgcgagccagcttactcaggaaaacggcagtacgttaagtattgacctcggcgcggccaccgacgacgccatgattaccgccgacagcgtcacgctgggcggcacgctgaatgttaccggcatcggcagcgttacggacagttggacgcctgaggcatacacctacacgctgattgacagcgacagcgccattacgagcgatttcgacgatctgaccattgcagggatgaaccgcgaagatgttgacttcctgactatcgacggaaaagtcgatgaaacggacaacacccactatgatctgacggcctccctctcctggtatgcggacagagacaacgccactaccgacgcccacggcacctttaccctgagcgaccctgacggcagctttaacgttgcggctacactgacagatgttgatgatacgctggatccgggtagcagatgggacggtaaatcgctgaccaaagaaggcgcaggcacgctgatcctctccggcgacaacgactacagcggcggcaccaccatcaatgaaggtacgctggtcgccgccagtacgacggcgctgggcaccggtctggtagacaataacgccacgctggtgctggacgcagacggtgaagtcagcgcggtgggcggcatcaccactcatagcggcgcgacgacccaactggcgcttggcacctcgttggatctcggcgacagtgcgttaattcagcaagatggcagtacgctgaacgttgagctgaatagtgactcagtgcaaccgctgatcaccggcggcagcgccacgcttggcggcgatttggtcgtcagcgacgccagcctgcaagcgcgcgcctccgacgcggagttccagtcctttaaactgatggatatggacagcgatatcagcggcgattttaccagcctgacgatgaacctcactgaccagccggactatctgaccgtaaccgggacaatcaatcctgaagatgcgtcagaatatctgcttaccgaagggctgagctggaatgcgaccgccacgtcagcgacgccagcacacggcacgtttactctgggcgcaggcgacagttttgaagtcaccagcgtactgggcgataaaaccggcaacggcgactgggacggtaaatcgctgaccaaactgggcgcgggtaaattgacgctgagcggcgcgaacacctacaccggcgatactaacgtacaggaaggcacgctgtggctggccggagacggtacgattggcgaagtgggcagccagcaggcggtgaacgtcgcttccgacgcgacctttggcggcagcaatggtacgaccgttaacggtagggtgaccaacgaagggacgctggtcttcggcgacagcgaggagacaggcgctatcttcaccctcaatggcgatctgatcaacatggggacaataaccagcggtagcagcgccagcacgcctggcaatacgctttatgttgacggcgattataccggtaacggcggctcgctttacctgaataccgtcctgggcgacgatgattcggcgaccgataagctggtgattaccggcgatgcctccggcaccaccgatctgtacatcaacggcatcggcgatggagcacagaccactaacggtattgaagtggtggatgttggcggcgtatcgaccagcgatgcgtttgtgttaaaaaatgaagttaacgccggtctgtatacctaccgtctgtactggaatgaaagtgacaacgactggtatctggcgtcaaaagcacagtctgatgatgacgacagcggcggtgatgacacgccttcggatggcggtgacgatggcggtaatgtcacgcctccggacgacggcggcgatggcggtaatgtcacgcctccggacgacggcggcgatgtcgcaccgcagtaccgtgcggatatcggcgcgtacatgggcaaccagtggatggcgcgcaacctgcaaatgcagaccctctatgaccgcgagggcagccagtatcgtaacgcagatggcagcgtatgggcgcgcttcaaagcgggtaaagcagaatcagaggctgtcagcggcaatatcgatatggacagcaactactcccagttccagttaggcggcgacattctggcctggggcaacggccagcagagcgttaccgttggcgtcatggcgagctacatcaacgccgataccgacagcaccggtaaccgtggcgcggacggtagccagttcaccagtagcggcaacgtagacggctataaccttggcgtctatgccacctggtttgccgatgcccaaacgcatagcggcgcgtatgtcgacagctggtaccaatatggtttctacaacaacagcgtagagagcggtgatgcgggatctgaatcttatgattcaaccgctaacgccgtctcgctggaaactggttatcgctacgatattgcgcttagcaacggtaatactgtcagtctgacgccgcaggcgcaggttgtctggcagaattactcagcggatagcgtgaaggataactacggcacccggatcgatggtcaggatggcgacagttggacaacgcgtctgggtctgcgtgttgacggcaagctgtacaaaggcagccgtacggttatccagccgtttgctgaagctaactggctgcacaccagcgatgatgtgtcggtatcgtttgatgatgctacggtgaaacaggatcttccggctaaccgtgcggagctgaaagtgggtctgcaggcagatatcgataagcagtggagcgttcgcgctcaggttgccgggcagactggcagcaatgactttggcgatctgaacggtagcctcaatctgcgctataactggtaa

SEQ ID NO: 373413 - DNA, 204 bp, Salmonella enterica
atggcgcgggtggaagcgcacttcgcggaagaggcgcaggcagtggaccgcacggacggtctcagcatgtcgttcgccaactggcgtttcaacctgcgctcgtcaaacaccgaaccggtggtgcgcctgaatgtggaatcacgcggcgatattccgctgatggaagcgcgaacacgcactctgctggcgctgctgaatcagtaa

SEQ ID NO: 373414 - DNA, 321 bp, Salmonella enterica; identical to SEQ ID NO: 67344

SEQ ID NO: 373415 - DNA, 387 bp, Salmonella enterica; identical to SEQ ID NO: 10354

SEQ ID NO: 373416 - DNA, 624 bp, Salmonella enterica; identical to SEQ ID NO: 10353

SEQ ID NO: 373417 - DNA, 624 bp, Salmonella enterica; identical to SEQ ID NO: 10352

SEQ ID NO: 373418 - DNA, 1206 bp, Salmonella enterica
atgaatagttcgacaaagatcgcattggtaattacgttattcgatgccatggggattggccttatcatgccagtcttgccaacgttattacgtgaatttattgcttcggaagatatcgctaaccactttggcgtattgcttgcactttatgcgttaatgcaggttatctttgctccttggcttggaaaaatgtctgaccgatttggtcggcgcccagtgctgttgttgtcattaataggcgcatcgctggattacttattgctggctttttcaagtgcgctttggatgctgtatttaggccgtttgctttcagggatcacaggagctactggggctgtcgcggcatcggtcattgccgataccacctcagcttctcaacgcgtgaagtggttcggttggttaggggcaagttttgggcttggtttaatagcggggcctattattggtggttttgcaggagagatttcaccgcatagtcccttttttatcgctgcgttgctaaatattgtcactttccttgtggttatgttttggttccgtgaaaccaaaaatacacgtgataatacagataccgaagtaggggttgagacgcaatcgaattcggtatacatcactttatttaaaacgatgcccattttgttgattatttatttttcagcgcaattgataggccaaattcccgcaacggtgtgggtgctatttaccgaaaatcgttttggatggaatagcatgatggttggcttttcattagcgggtcttggtcttttacactcagtattccaagcctttgtggcaggaagaatagccactaaatggggcgaaaaaacggcagtactgctcggatttattgcagatagtagtgcatttgcctttttagcgtttatatctgaaggttggttagttttccctgttttaattttattggctggtggtgggatcgctttacctgcattacagggagtgatgtctatccaaacaaagagtcatcagcaaggtgctttacagggattattggtgagccttaccaatgcaaccggtgttattggcccattactgtttgctgttatttataatcattcactaccaatttgggatggctggatttggattattggtttagcgttttactgtattattatcctgctatcgatgaccttcatgttaacccctcaagctcaggggagtaaacaggagacaagtgcttag

SEQ ID NO: 373419 - DNA, 594 bp, Salmonella enterica; identical to SEQ ID NO: 10350

SEQ ID NO: 373420 - DNA, 363 bp, Salmonella enterica
atgtatattgaacagcattctcgctatcaaaataaagctaataacatccaattaagatatgatgataagcagtttcatacaacggttatcaaagatgttctattatggattgaacataatttagatcagtctttactgcttgatgatgtggcgaataaagcgggttataccaagtggtattttcagcggctgttcaaaaaagtaacaggggtcacactggctagctatattcgtgctcgtcgtttgacgaaagcggctgttgagttgaggttgacgaaaaaaactatccttgagatcgcattaaaatatcaatttgattcccaacaatcttttacacgtcgggtaatgactccaacttactga

SEQ ID NO: 373421 - DNA, 267 bp, Salmonella enterica; identical to SEQ ID NO: 292197

SEQ ID NO: 373422 - DNA, 1434 bp, Salmonella enterica
atgtctgaatttgaattactggcgcaggatctgcttgagaaagcagaagcggaagaacaactgcgacaggaaaatgataaaaagctgctcgggcaggtgctggaaatctatgaccagaagtacgtggctgaactgcttagaaaagttggtaaaaatgagtggagtcgcgagactcttaatcgctggattaatggtaagtgctcacctaagacgctgacgtcagccgaagaggaacttctacgaaaaatgcttccggaagcgcctgcacatcaccctaactatgccttccggtttattgacctgtttgctgggattggaggtatacggaagggcttcgaaaccatcggtggccagtgcgtttttaccagtgaatggaataaagaggctgtgcgcacatataaagctaactggtttaacgatgctcaggaacacactttcaatctcgatattcgggaagtcacgctcagtgataaacctgaagtacctgaaaacgatgcctatgcttacattaatgagcatgtgccggatcatgatgtacttctagcaggtttcccctgtcaaccgttcagccttgcgggcgtaagcaagaaaaactcgctcgggcgcgcgcatggtttcgaatgtgaggctcagggaacacttttcttcgatgtggcgcgtattatccgcgcaaaaaaacctgccatctttgttcttgaaaacgttaaaaacctgaagagccatgacaagggtaaaacctttaaagtcatcatggataccctcgacgaactgggctatgaagttgcggatgcagctgagatgggcaaaaacgatcctaaagttatcgacggaaagcactttttacctcagcaccgagaacgtatcgttttggtcggtttccgtcgtgatctgaacattcaccagggctttaccctgcgcgatattagtcgtttttatccggaacagcgtccgtcatttggcgaactgctggaacccgtggttgacagcaaatatatactgacgccgaaactctgggagtatctctataactacgccaaaaagcacgcagctaagggtaacggattcggttttggcctcgttaatcctgaaaataaagaaagcattgcccgtacgctttctgctcgctatcacaaagacgggtctgaaattctgatagaccgtggctgggatatggccacaggtgaaacagacttcgcgaacgaagaaaatcaggcgcatcggccccgtaggctgactccacgagagtgcgcgcgccttatgggttttgaaaaagtagatggcaggccttttcgcattcctgtgtcagacactcagtcgtacaggcagttcggtaactccgtagtggtgcccgtgtttgaagccgtagccaaactgcttgaaccttatatcctgaaagcggttaatgccgattcgtgcaaggttgaacgaatctga

SEQ ID NO: 373423 - DNA, 1215 bp, Salmonella enterica
atgtttatgtcggttttccacaactggctactcgagatcgcatgtgagaattacttcgtctacatcaaacgcctttccgccaacgataccggcgcaacaggtggtcaccaggtaggactttatatcccttcaggtatcgttgaaaaactctttccgtctatcaaccatacccgtgaactgaacccttcggtttttctcaccgcacatgtgtcatcgcatgattgccctgacagcgaagcccgggcaatttattataacagccgtcattttggtaaaacccggaatgaaaaaaggattacccgctggggtagaggcagcccacttcagaatcctgaaaatacaggtgctctgacgctcctagctttcaagcttgatgagcaagggggggactgtaaggaagtaaatatttgggtatgcgccagcactgatgaagaggacgtcattgagaccgctattggtgaagttatacccggagcgcttatatccggccccgcaggacagattctaggcggactatctctacagcaagcgccagtaaatcataaatatattctacctgaagactggcacctgcgctttccgtcgggaagtgaaattattcagtatgcagccagccattatgtgaaaaattcccttgatccggatgagcaacttcttgaccgccggcgcgtggagtacgacatatttctattggttgaggaactgcatgttctggatatcatccggaaaggatttggctctgtggatgaatttattgcgctggccaattctgtcagcaatcgccgtaaatccagagccgggaagtcgctggaactgcacctggagcatctattcattgagcacggcctgcgacacttttcgacgcaggccatcacagaaggtaataaaaaacccgatttccttttcccttccgcaggggcttaccacgatactgagtttcccgtagaaaatctgcgcatgctggcagtcaagactacctgtaaggatcgctggcgtcagatactgaatgaggccgataaaattcatcaggtgcatctgtttacactccaggagggagtttctctggctcaatatcgggagatgcgggagtcgggtgtcagattggtcgtgccatcatctctgcacaaaaaatacccggaggcggtgagagctgagctaatgacgctaggtgcgtttattgctgagctgacagagctttacgcagatattccatag

SEQ ID NO: 373424 - DNA, 558 bp, Salmonella enterica
gtgcaaattggctatgtacgggtgtcaacaaatgaccagaatactgatttacagcgaaacgcgctgaattgcgcaggatgtgaactgatttttgaagacaaaataagcgggaccaaatcagaaaggcccggattaaaaaagttgctcaggacgttatcagaaggggacacactagttgtatggaagcttgatcgcctggggcgcagtatgcgtcatctggtcgttctggtagaggagctacgggagcgtggcattaatttccgcagtcttacggatagcatagatacttccacaccaatggggcgtttctttttccatatcatgggcgcactcgctgaaatggagagggaattaattgtggaaaggacccgcgccggacttgccgctgcgagggcgcaagggcgagtcggtggcaggcgtccaaagctcactccggagcaatgggagcaggccggacggttgcttgccgccggtgaaactcgtcatcgtgttggattactttttgatgttagcatttccactctttacaagaaattccctgtaaatcagtcgcgttga

SEQ ID NO: 373425 - DNA, 1173 bp, Salmonella enterica
atggctcaggattaccaccacggggtgcgcgttgttgaaatcaacgagggcacccgacctattaccacggtgagcactgccatcgtgggcatggtctgcaccggcgatgatgctgatgcgtccgtgttccccctcaataagccggtcctgctgactgatgtgctcaccgccagcggtaaagcgggggagtccggcacgctggcccgctcgctggacgcgattgcagatcaggcaaaacccgtgactgtcgttgtgcgtgtggcgcagggagaaaccgaagcggaaaccacctccaatattatcggcggcgtaacttccgacggtaagaaaacgggcatgaaagcgctactgtcggcgcagtcgcagctcggtgtcaagccgcgcattcttggggtgccgggacatgacactcaggccgttgctactgaactgctgggcgtggcgcaaagcttgcgcgggtttgcctaccttgctgctaatggctgcaaaacggtggaggaagctattgcctatcgcgagaatttcagtcagcgcgagggaatgctgatctggcctgatttcatcaactttgacaccgtgctgaaagcagacgcgacggcttacgcctccgcccgtgcgctcggcctgcgtgccaaaatcgacgagcagatcggctggcataaaaccctgtccaatgtgggggtgaacggtgtcaccggcatttccgctgatgtgttctgggatctgcaggacccggcaaccgatgcgggactgctgaacaaaaatgacgtcaccacattgatccgcaaagacggcttccgcttctggggttcccgttgtctcagtgacgatccgctgtttgcctttgagaactacacccgcacggcgcaggtgctggctgacactatggcggaggcgcacatgtgggcggtggatggcgtgcttaatccgtcgctggcccgcgacattattgaaggactacgcgccaagatgcgcagtctggtcaaccagggatacctgattggtggtgactgctggctggatgagtctgttaacgataaagacacccttaaagccgggaaactgaccatcgattatgactacacgccggtgcctccgcttgaaaacctgatgctgcgccagcgcatcaccgatcgttacctggtcgattttgccagccgtgtcgctgcataa

SEQ ID NO: 373426 - DNA, 516 bp, Salmonella enterica
atggctttaccacgcaagttaaaacacctgaacctgttcaacgacgggaacaactggcaggggatcgttgagtctctgaccctgccgaaatttacccgcaagtttgagaagtatcgcggcggcggtatgccgggcgcagtggatgtggacatggggctggatgacggtgcactggacacggaattttcaatcggcggtaccgagctgctgttattcaagcagatgggcaaggcaaccgttgacggcatccagctgcgtttcaccggttccattcagcgtgacgataccggcgaagtgcaggccgttgagctggttgtgcgcgggcgtcataaagaagtggattccggcgagtggaaaaccggcgagagcagcagcaccaaagtcagcagtaccaacagctacgcgaagctgaccattaatggtgaagtgctctatgaggtcgatctggtcaacatggtagaaatcgttggcggcgtggacctgatggaagaacaccgtaatgccctcggcctctga

SEQ ID NO: 373427 - DNA, 303 bp, Salmonella enterica
atgagcgacaagctgactgaaaagaccgtaaaactggatacccccatcatgcgcggtaaaactgaaattaccgaaattgtgctgcgcaagcctcagtccggcgcactgcgtggcacacgcctgcaggccattatggatatggacgtgggggcaatgatgacagtgatcccgcgaatctccaccccgacgctgaccgcgcaggaaatggcagagctggaccccgccgatctcaccgcgctgtcggtagaggtggtgacttttttgttgaagaagtcggtgcttgccggtttaccgacagcctga

SEQ ID NO: 373428 - DNA, 2808 bp, Salmonella enterica
atgagtgacaataacctgcgtctgcaggtgattcttaatgcggttgacaagctcacccgcccatttcgatccgcgcaggccagctcaaaagagctggctacagtgattcagcaaagccgcgcccgtttaaaagaattagatgctcaggcgggccgcattgacggtttccgcaaggccagcgcgcatctggcagtcaccggtaacagcctgaaagccgcacgcgaagaagctgcgaaacttgccacgcaattctctgctaccaaccgcccgacggcggcgcaggcacggctgcttgagcaggcaaaaaaccgcgttacggagttacagagcaaatataacggtctacgtcagtcggtgcagcgccagcgtcttgcgctcaatgaagccggactggacacgaaaaagctcagtagtgtgcagcgggaactgcggcagaatgccgacgaaacccggcaggccctggaccggcagcagaaatcccttaaacgcctgggcgaacagcaggcgcgaatgaacgccgtccgcgatcagtattcacgccgtcttgaggtgcgggatcgcatcgccggggcaggggctaccactacggctgcaggggtggcaatgggcgcacctgttgtggcggcagttaagagctacgccagcatggaagatgccatgaaaggcgtggcaaagcaggtaaacgggctgcgggacgataatggcaaccgcacaaaacagttttatgacatgcaggatgccatcaaggccgccagcgaacagctgccgatggagaacggcgctatagactatgccgcgctggttgaaggtggtgctcgcatgggggtgaccaatcaggacgatccttacgaagagcagaaacgtgacctgctggcttttgcatccacggcggcaaaagcggcaacggcctttgagctgcccgcagatgaactggctgaagggctggggaaaatcgcgcagctctataaagttccgacgcgcaatattgaacaactgggcgatgcgctgaactacctggacgataacgccatgtcaaagggtggggacattatcaacgtcctgcagcgtatgggaggcgtggctgaccgccttgacttccgaaaggccgcggcgctgggttcaacattcctttctcttggggctgccccggaaatcgccgccagcgcctctaatgccatggtgcgtgaactgtccattgccaccatgcaaagtaaacgattttttgaaggcatgaatctgttgcaactcaatccggcggagattgaaaagcagatgaccaccgatgccatgggcacaattcagcgggttctggagaaggtcaacaatctgccgcaggataaacgtctgtcagccatgacaatgatttttggcaaagagtttggcgatgatgcggcaaagctggctaacaacctgccggagctgcaacgccagctgaaactcacatcaggtagtggtgctaatggctccatgcagaaagaatccgacattaacaaggattcattgtctgcgcagtggttgctggttaagacgggcgcgcagaacgctttcagcagcctgggggaaacgttgcgccagccgctgatggatattatgggcatggttaagcgcgtgaccggggcgttgcgtcgctgggttgaacagaatcccgtgctggctggctcgctgatgaaagtggcggcagctacggcagccattactgttgggttgggggcgctggcagtggcggtggctgcggtactagggccgctggcggttatccggtttggcctgtcaatgctgtcagttaaagcgttaccttctgcagccgccgctgccacacgtacaggtagcgtgctgcgtttgttgatctctggtccgctggctttgctgcgcgtggcattatttgctgttggtagcctgctgggtgcgctgctcagtcctgtagggctggttgtggctgcactggcaggcgtggcgctggttatctggaaatactggcagcccattagtgcatttctggggggcgtggtggaagggttcagagccgctgctgcgcccatcagcgccgcctttgagccgctcagacccgtgtttcagtggattggtgacagggtgcaggccttgtggggctggttcaatgatttacttaccccggttaaatccactgccgaagaactgaacagcgcagctgcaacggggcgtcggtttggtgaggcgctggcggaaggtctgaatatggtgatgcacccacttgagtcacttaaatccggtgtgtcatggctgctggaaaagctcggtattgttagtaaggaggcggcaaaggcgaaactacctgcgcaggttacgcagcagcagtccgccacagtgaacagtgacggcaaagtggtgctgccgccaggcgggttcccggcttacgcggggatgtacgacacgggcgggatcattccacgcgggcagtttggcattgtcggagaaaatggccctgaaattgtgaacggaccggcaaatgttaccagcaggcggcgcactgctgcgctggcctctgtcgttgctggcgtgatgggggtagctgcgacacctgcagaagcggctccgcttcatccgttcagtttgcctgcgagggcataccagcccccgcttgctaaggcagatagcccgccgccggttattcgttatgagataaatgcgcccattcatattgtcgctcagcctgggcagaacgcgcaggatattgcccgtgaagtggcacgccagcttgacgaacgggagcgccgggccagggcaaaagcacgcagcaatttcagcgatcagggggggtatgaatcatga

SEQ ID NO: 373429 - DNA, 486 bp, Salmonella enterica
atgatgatggtactgggtttatatgtatttatgctgcgcactgtcccttatcaggaactgcagtatcagcgcagctggcgacacgccgccaacagccgggtgaaccgccgtccgtcaacgcagtttcttggccaggataacgattcactgacactgtccggggttctgctgccggaagtgaccggcggcagactgtcattactggcgcttgaacaaatggctgaactgggcaaggcatggcctttgattgaaggtagtggaaccatttacggcatgtttgttattgagagtctgagccagacaaagacggagttttttgccagcggaatgcccaggcgcattgagtttacgatcaccctcaaacgggttgatgagtcgctctctgacatgttcgggagcctgagtgaccagctcagcaacctgcaggactccgcagcatctgctattggggggattaaaaacacggctggaggattgctgcagtga

SEQ ID NO: 373430 - DNA, 1101 bp, Salmonella enterica
gtgaacgttaattctgatctcctgaatctgaacagcaaaagcccggctttcagtatcaccatcgaaggcaaagacgtgacgacggtgatggatacccgcctgatgagtctgacactgacggataaccggggctttgaagcggaccagcttgatctggagctggacgacgccgacgggctgatcgccctgccgcgacgtggggctgtgattcagctggcgctgggctggaaaggccagccgcttttccctaaaggggcttttaccgtagatgaaattgaacacagcggtgcgcctgaccggctgaccatcagggcgcgtagcgcagatttccgtgaaaccctcaatacacggcgcgaaaaatcatggcatcagacaacggtgggggaggtggtaaaggaaatcgccgcccggcataacctcaaagtggcgctgggtaaggacctgacggataaggcgctggatcatatggaccagaccaatgaaagcgatgcaagttttctgatgaaactggcgaggcagtatggggcgattgcttccgttaaagacgggaacctgctatttatccggcagggacagggaagaacggcaagcggcaagccgctgccggttatcaccatcacgcgcaaagccggtgacggtcatcggttcacccttgctgatcgtggtgcctataccggtgttattgccagctggttgcatacgcgtgaacccaggaaaaaagagacaaccagtgttaagcgtcgtcgaaagaaagccaccacacccaaagagccggaagcaaaacagggtgattatctggtgggaacggatgaaaacgtgttggttcttaatcgtacctacgccaaccggagcaatgcagagcgcgcagcaaaaatgcagtgggaacgcctgcagcgcggggttgcttcattttccctgcagctcgctgaggggcgggctgatctctatacggaaatgccggtgaaggtgacgggatttaagcagccgattgatgatgcagaatggaccattaccaccctgacgcattctgtcagcccggataatggatttacgaccagcatggagcttgaagtaaagattgatggtcttgaaatcgaataa

SEQ ID NO: 373431 - DNA, 252 bp, Salmonella enterica; identical to SEQ ID NO: 5211

SEQ ID NO: 373432 - DNA, 357 bp, Salmonella enterica; identical to SEQ ID NO: 5210

SEQ ID NO: 373433 - DNA, 978 bp, Salmonella enterica
gtggataagtcgtccggtgagctggtgacactgacaccaaacaataacaacaccgtacaacctgtggcgctgatgcgtctgggcgtctttgtaccgacccttaagtcactgaagaacagtaaaaaaaatacactgtcacgcaccgatgccacggaagaactgacacgtctttccctggcccgtgcagaaggattcgataaggttgagatcaccggcccccggctggatatggataacgatttcaagacctgggtggggatcattcattcctttgcccgccataacgtgattggtgacaaagttgaactgccttttgttgagtttgcaaaactgtgtggtataccttcaagccagtcatcccgcaggctgcgtgagcgcatcagcccttccctgaagcgcattgccggtaccgtgatctcgttttcccgtaccgatgagaagcacacccgggaatacatcacccatctggtacagtcagcctactacgatactgagcgggatattgtgcagttacaggccgatccccgcctgtttgaactgtaccagtttgacagaaaagtccttctccagcttaaggcgattaatgccctgaagcgacgggagtccgcccaggcactctacacctttatagagagcctgccccgggatccggcaccgatatcgctggcgcggctgcgtgcacgcctcaatctgaagtctcctgtattttcccagaaccagacggtcagacgggcaatggagcagctgcgcgagattggatatcttgattacacggagatccagcgggggcggacaaaactcttctgcattcactaccggcgtccccggttaaaagcaccgaatgatgagagtaaggaaaatccgttgccaccttcacctgcggaaaaagtcagtccggagatggcggagaagcttgccctgcttgaaaaactgggcatcacgctggatgacctggaaaaactcttcaaatcccgctga

SEQ ID NO: 373434 - DNA, 741 bp, Salmonella enterica
atgaacaatgtcattcccctgcagaattcaccagaacgcgtctccctgttacccattgcgccgggggtggattttgcaacagcgctctccctgagaagaatggccacttccacaggggccacaccggcctacctgctggccccggaagtgagtgcccttcttttctatatgccggatcagcgtcaccatatgctgttcgccaccctctggaataccggaatgcgtattggcgaagcccggatgctgacaccggaatcatttgacctggatggagtaagaccgtttgtgcggatcctgtccgaaaaagtgcgtgcgcgacgcggacgcccgccaaaagatgaagtccgcctggttccgctgacggatataagctatgtcaggcagatggaaagctggatgatcaccacccggccccgtcgtcgtgaaccattatgggccgtgaccgacgaaaccatgcgcaactggctgaagcaggctgtcagacgggccgaagctgacggagtacacttttcgattccggtcacaccacacaccttccggcacagctatatcatgcacatgctctatcaccgccagccccggaaagtcatccaggcactggctggtcacagggatccacgttctatggaggtttataccagagtgtttgcactggatatggcagccacgctggcagtgcctttcacaggtgacgggcgggatgctgcggagatcctgcgtacactgcctcccctgaagtaa

SEQ ID NO: 373435 - DNA, 1170 bp, Salmonella enterica; identical to SEQ ID NO: 5939

SEQ ID NO: 373436 - DNA, 567 bp, Salmonella enterica
ttgacggaagcaggatgctgggctcatgcgcggcgcaaaatccacgatgtatatatcagtaccaaaagcgcgacggcggaagaagcactgaaactaatcggcgaactgtacgccattgagcacgaaatacgcgggttgccggtgtctgaacgcctggcggtcaggcaaatgcagagtaaaccgctactgacttccctgtataagctgatgcaggagaaagaacacacgttatcgaaaaaatgccgtctgagagatgcgttccggtatatcaggaagcactgggttgcgttgtgcaacttctgtgatgacggtctggcggaggcggacaataacacagcggaaagagcgcttcgtgcagtctgtctcggaaagaaaaattacgtgttcttcggtagcgatcacggcggcgagcgtggtgcactgttgtacgggctgatcggcacctgccggttgaatggtatcgatccggaagcgtatctgcgccatatcctgagcgtactgccggaatggccttccaaccgagttgacgaactcctgccatggaacgtagtactcactaataaataa

SEQ ID NO: 373437 - DNA, 522 bp, Salmonella enterica
  misc_feature (499)..(508): n is a, c, g, or t
atgagtcgtatattaaatacagaaattatcattccggttatcgaaaaacttgtaaaaaaagcttgttatgaactggatgataatctcatgtgttcttttcgtaaagcatatgataaagaagagtcaaagatcggcaaggaaactattaagatattaattgataatggagagtatgcaaaaaaagaacaacttgcatgctgccatgataccggcacttgtatcgttataatggaaattggacaacatgtatgctgggaaggtaagccgcttaaagatcaggtgaaccagggtgttcgccagggctatgaaaatggatacttaagaaaatccatggttgcagatccattagaacgtattaatactaatgataatactcctgcaattttacatactgaaattgttgatggtgaccgagtgacaattaccgttatgccaaagggcggcggtagcgaaaatatgggaacttttaaaacattgcttcccggcgatggtattgatnnnnnnnnnntattgatggtataa

SEQ ID NO: 373438 - DNA, 213 bp, Salmonella enterica; identical to SEQ ID NO: 5358

SEQ ID NO: 373439 - DNA, 852 bp, Salmonella enterica; identical to SEQ ID NO: 5508

SEQ ID NO: 373440 - DNA, 522 bp, Salmonella enterica; identical to SEQ ID NO: 5509

SEQ ID NO: 373441 - DNA, 720 bp, Salmonella enterica
atgagcgcacgttcacaggcactggttcctctcagcacagagcaacaggccgcatggcgggcggtggcggagaccgaaaaacgccgccatcagggtaacacgctggctgaatatccgtatgcgggggcgtttttccgctgtctgaacggaagccgcaggatatcgctgtctgacctgcgatttttcatgccgtccctgaccgcagaagaactgcacggcaaccgtcttcagtggctgtatgccatcgatgtgctgattgaaacacagggcgaggtctgcctccttccccttcccggtgatgcagcagagcgcttgttcccgtcggtgcggtttcgtgtcagggaacgcagtcgccataaatccgcgctggtcatgcagaagtacagccgccagcaggcgagggaggcagagcagaaagcccgtgcgtaccaggcgctggtcgctcaggctgaaatcgaactggcattccattcgccggaaacagtcggaagctggcatgcacgctggagtgaccgggtggcagagcatgacctggaaaccctgttctggcagtggggcgagcgttttccgtcactggccggaatggaacgctggcagtggcaggatatgccattctggcaggtcatcgcagaggctggtatggcggcaagggtggtcggtcatgctgttcgtgagatggagcggtggatggtgccgaacaaactccgggaggcagcgtga

SEQ ID NO: 373442 - DNA, 435 bp, Salmonella enterica
atgaaaactgaactgaccctgaatgtcctgcagaccatgaacgcacaggaatatgaagatatccgggctgccggaagtgatgaacgccgtgaactgactcacgccgtgatgcgggagctggatgtgccggataactggacgatgaacggcgagtacggcagcgagtttggcggctttttccccgtccaggtccgtttcacgcctgcccacgaacgttttcacctggcgttatgttcaccgggcgatgtctctcaggtctgggtgctggttctggtgaatgccggtggtgagccgtttgcggtggttcaggtgcagcggcggtttgcaccggaagccgtcagccattcactggcactggcagcgtcactggacgcgcaggggtacagcgtcagtgacatcatccatatcctgatggcggaaggaggtcaggcatga

SEQ ID NO: 373443 - DNA, 624 bp, Salmonella enterica
atgcaacagccggacaaatctctggcactgctggcatggacgctctgcctgaatgtgtttggtagcggggcgtacagcaatcccgcaaaaattcgtctggaatgtgagcattatgcgctgaccagcgatgcgccatcggggaaggaaggtgccgcattcatggcgctgatggcagaaaaagcccgtcttgcagccctgttaccggagggatggtcacgggacatgacgacgttcctgtcactcagccaggaggtgctgttatccctgctcagtttctgcactgcgtgcagcatccacggcgttcagacccgcgagtgtggtcactcgtcacgcagtccgcttgacccgctggaaaccgctatcggattccacatgcgcgactggtggcagccgacaaaagcaaacttcttcggacacctgaaaaagccgcagattatcgcagctctgaatgaggccggcctgtccggtgctgcacgggacgcggagaagatgaagaaaggcgatgcggctgaacatgcagagttccacatgaaagacaaccgctgggtgcctggctggatgtgtgcaccacgcccacagacggatgccactgaacgcaccgataacctggctgatgccgcctga

SEQ ID NO: 373444 - DNA, 1326 bp, Salmonella enterica
atgtcagttacagagtctaaggcaaaaacggagcgtaaatccagccgtaaacctgcaaaaacgcaggaaacagtcctgtctaccctgctggcgcagacggaggaagtgagcgtgccgctggcctcgctgattaagtcaccgctgaatgtgcgcacggtgccgtattttgcggagtccgtcagcgaactggcggactccattaaaggtgtcggcctgttacagaatctggttgttcatgccctgccaggtgaccgttacggtgtcgccgcaggtggtcgccgactggcagcactcaacatgctggcagagcgtgacatcattccggctgactggcctgtccgtgtgaaaattattccgcaggagctggcgacagccgcatcaatgactgaaaacggtcatcgtcgggatatgcaccctgccgaacagattgccggcttccgcgcaatggcgcaggaaggcaaaacacctgcacaaatcggtgatttgctgggttattcgccccgccacgttcagcgaatgctgaaactggcagaccttgcgcctgtcatcctcgatgcgctggcagaagaccgcatcaccaccgaacactgtcaggcgctggcgctggagaacgacaccgcgcgtcaggtgcaggtgtttgaagctgcctgtcagtcgggatggggaggaaaaccggaagtacagaccattcgtcgtctggtgaccgaaagtgaagtggcggtggcggggaacggtaaattccacttcgtgggggctgatgccttctcgccagatgaactgcgcaccgatttgttcagcgacgacgagggtggctatgtggactgtgttgcgctcgatgccgccctgctggaaaaactccaggccgtcgcagagttccttcgggaagccgaaggctggggatggtgcgccggacgcatggaacctgtcggtgagtgccgtgaagatgcccgggcataccgcagtctgccggagccggaagaggtgctgacggaggcggaagaagaatgcctgaacgaactgatggcacgttacgacgcgctggaaaaccagtgtgaggaatccgacctgctggaagcagaaatgaagctgatgcgctgcatagcgaaggtcagagcgtggacgccggagatgcgtgccggaagcggtgtggtggtgtcctggcgttacggtaatgtgtgtgtccagcgtggtgtgcagttgcgcagtgaggatgatgcggctgacgatggtgaccgcacggaacaggtgcaggagaaagcgtcagtggaggaaatcagtctgccactgctgacgaaaatgtcctcagagcgcacgctggcagtctag

SEQ ID NO: 373445 - DNA, 234 bp, Salmonella enterica; identical to SEQ ID NO: 19741

SEQ ID NO: 373446 - DNA, 453 bp, Salmonella enterica
atggcagttcgtggcattaacaaggtcattctcgtaggacgcctgggaaaagatccggaagtccgttacatccccaacgggggcgcagtggcaaacctgcaggtcgccacgtcggaaacctggcgtgacaaacagacaggggagatgcgggagcagacagaatggcatcgcgtggtgctgttcggcaagctcgcggaagtggctggcgaatatctgcgcaagggcgcgcaggtctacatcgaaggtcagcttcgcacccgtagctgggaagataacggtatcacccgttacgtcaccgaaattcttgttaagaccacaggcaccatgcagatgctgggacgtgtcgcaggtgctcagactcagccggaagaggggcaacagttcagcggtcagcctcagccgcaaccgccggagggggaggattacgggttttcagacgatatcccgttctga

SEQ ID NO: 373447 - DNA, 516 bp, Salmonella enterica
gtgccggataccactgttccgggtcaggtttcctgccgggtttcacaggacgtttactcagctgatggactcgttaggctgattgataaaggctcatgggttgacgggcagattaccggtggtatcaaagacggccaggcgcgcgtgtttgttctctgggagcgtatccgtaatgaccaggacgggacaatcgttaatattgacagtgccggaacgaactcactcggcagcgcggggattccgggccaggtggatgcccatatgtgggagcgtctgcgtggtgcgatcatgatttcgttgttctctgacaccttaacggcgctggttaaccagacgcagagtaataacattcagtacaacagcacagaaaacagcggtgggcagctggcgtctgaagcactccgctcttacatgtctatcccccctaccctctacgatcagcagggtgatgcggtgagcatttttgttgcccgcgacctcgatttcagcggcgtttatacgctcgcagacaactaa

SEQ ID NO: 373448 - DNA, 996 bp, Salmonella enterica; identical to SEQ ID NO: 97196

SEQ ID NO: 373449 - DNA, 534 bp, Salmonella enterica
atgaaaaaattagcaacctggcttctggccgcagcatttacgacagccgccctgcccgcctttgcggtggaaccatccgttcaggttggctactcgcctgaaggaagcgcccgcgttctcgtcctgagcgccattgactccgcaaaaacctcgatacggatgatggcttattcttttaccgccccggatattatgaaggcactggtagcagccaaaaaacggggagttgatgtgaaaatcgtaattgatgaaaggggcaatacggggcgcgccagcattgcggccatgaactacatagcgaacagcggcatccctttgcgtactgacagtaatttccctatccagcatgacaaggtgatcatcgtggataatgtgaccgttgaaactggcagctttaatttcaccaaagcggccgaaacgaaaaactcggagaatgcggtggtgatctggaacatgcctaagctcgctgaatcattcctcgaacactggcaagaccgctggaatcagggaagagactaccgttccagctactga

SEQ ID NO: 373450 - DNA, 396 bp, Salmonella enterica
atgaaatcactcaggcttgcagctgaagattttcccctggcgcttgcgacggccaagatcctgccgtggccgtggggtgaatcaagctaccggagtgctttagccgatataggcagcgctaagggcaatccgtgggtacaggatattaaccaccgcgttactttgtggttgccctggcggataggctttgtacgaggagggaatcattctattgccagcggcgttctggccggtgagggtgaggtaatacccgatacggtttatgatatgcggtatttgctcgatattgtcagcactgacgggtattactggtacatgagcgggaagatctgcgagagagtcagtgactaccgtacagccgccttttttgaaataggccgcctgcttacactgtga

SEQ ID NO: 373451 - DNA, 861 bp, Salmonella enterica
atgagtattcaacattttcgtgtcgcccttattcccttttttgcggcattttgccttcctgtttttgctcacccagaaacgctggtgaaagtaaaagatgctgaagatcagttgggtgcacgagtgggttacatcgaactggatctcaacagcggtaagatccttgagagttttcgccccgaagaacgttttccaatgatgagcacttttaaagttctgctatgtggtgcggtattatcccgtgttgacgccgggcaagagcaactcggtcgccgcatacactattctcagaatgacttggttgagtactcaccagtcacagaaaagcatcttacggatggcatgacagtaagagaattatgcagtgctgccataaccatgagtgataacactgctgccaacttacttctgacaacgatcggaggaccgaaggagctaaccgcttttttgcacaacatgggggatcatgtaactcgccttgatcattgggaaccggagctgaatgaagccataccaaacgacgagcgtgacaccacgatgcctgcagcaatggcaacaacgttgcgcaaactattaactggcgaactacttactctagcttcccggcaacaattaatagactggatggaggcggataaagttgcaggaccacttctgcgctcggcccttccggctggctggtttattgctgataaatctggagccggtgagcgtgggtctcgcggtatcattgcagcactggggccagatggtaagccctcccgtatcgtagttatctacacgacggggagtcaggcaactatggatgaacgaaatagacagatcgctgagataggtgcctcactgattaagcattggtaa

SEQ ID NO: 373452 - DNA, 780 bp, Salmonella enterica; identical to SEQ ID NO: 6153

SEQ ID NO: 373453 - DNA, 1023 bp, Salmonella enterica; identical to SEQ ID NO: 162011

SEQ ID NO: 373454 - DNA, 1275 bp, Salmonella enterica
ttgcgacagtcgcgccatcgtcgtccgttaccggcacaccttccccgtgaaatacaccgcctggagccagaagaaagctgttgcccggagtgtggcggtgagctggattatctgggggaagtcagcgctgaacagctggaactggtgagcagtgccctgaaagtgatccgcacagaacgggtaaaaaaagcctgtacaaaatgtgactgtattgttgaagcaccggcgccgtcccgcccgatagagcgtggtatcgcgggccccggattacttgcccgcgtgttaacgggaaaatactgcgaacatctgccactgtatcgtcagagtgaaatctttgcccgccagggtgtcgaactgagccgggccttactctccaactgggttgacgcgtgctgccagttaatgacaccggtgaatgatgccctgtaccgttatgtaatgaacacccgcaaggttcacactgatgacacaccggtaaaggtactgtcaccgggtcagaaaaaggcgaaaacagggcgtatctggacgtatgtccgggatgatcgcaatgtgggttcgtcatctcctccagcggtctggttcgcgtactcgccgaaccggcaggggaaacacccggagcaacacctccgccccttccggggtatcctgcaggcggatgcgttcacaggttacgacaggttgttcagtgcagaacgtgaaggtggtgcactgacagaagttgcgtgctgggcccatgcccggcgaaaaatccacgatgtatacatcagcagcaaaagtgcgacggcagaagaagccctgaagcgaatcagtgaactgtacgccatcgaggatgaaatacggggattaccggagtcagagcgtcttgccgtcaggcagcagcgaagcaaagtgttactgacgtcgctgcatgaatggatggtggagaagaatggtacgctgtcgaaaaaatccagactgggcgaagcgttcagctatgtactgaatcagtgggatgccctctgttattacagtgatgacggtctggcggaggcggataataatgctgcggaaagagcgcttcgtgcagtctgtctcggaaagaaaaactttatgttctttggcagcgatcacggcggcgagcgtggagcactgttgtacgggctgatcggcacctgccgtctgaacggtatcgatccggaagcgtatctgcgccatatcctgagcgtactgccggaatggccttccaaccgagttgacgaactcctgccatggaacgtagtactcaccaataaataa

SEQ ID NO: 373455 - DNA, 792 bp, Salmonella enterica
atgatgaaaaatacaggttatatcttagctctttgtctgacagcatcggggcatgtcctggcccacgatgtctggattacaggtaaacaggcagagaacaacattaccgcagagattggttatggtcataatttcccctcaaagggcacaattcctgacagaaggaatttctttgaaaatccccggatttataacgggaaagagacaataacactgaagccagcgtccacggattatgtctataaaactgagtctgcaagcaaagataatggctacgttttgtcaacatatatgaaaccgggatactggtcgagaacctcttcaggatggaaaccggtcagccgggagggcagaaatgatgtggcttactgtgagtttgtcactaaatatgcgaaatcttttattcctggtgtacagcagatgccagcacaactctatcagtctccaacggggcatgagcttgaaatcattccgttatccgatataagtcgtttcagtgaagatgtgaagctgcaagtcctgtataaaacgtccccgctcgccggagctatcatggagcttgactcggtcagttatctgaaatcatcccgtcatactcatgcagttgagcacaaacatcctgttcataaagcagaactcacctttgtaactaatgaggatggtatcgtcacagtaccttctcttcatattggacagtggctggcgaaagtccaaaataagaaaagttttcaggacaaaagcctgtgtgatgaaactgtcgatgtggcaactttaagtttctcccgaaattaa

SEQ ID NO: 373456 - DNA, 1971 bp, Salmonella enterica
atgtatatgaacgtaatcagaaacgtcatttgtacattaatcatactcccgatagggttacaggcagagaccagtcattcttctatggctaaagatacaatcaccgttgtcgcgacaggaaatcagaacacggtatttgaaacgccgtcaatggtcagtgtcgtcacgaatgacacgccatggagtcagaatgcggtcacatcagccggcatgctgaaaggtgttgccggtctcagccagactggtgcaggacggaccaatgggcagacctttaatctacgcggctatgacaaaagcggggtacttgttcttgttgacggcatccgtcaactcagtgacatggcaaaaagcagtggcacttatctggatccggcactcgtcaaacgtatcgaagttgtccgcggaccaaactccagtctgtacggcagtggcgggctgggaggtgttgtggacttcagaactgccgatgcagcagatttccttccccccggagagacaaacggtttaagtctgtggggaaatatcgccagtggtgaccacagcacaggctcggggctcacctggttcggtaaaaccggaaaaacagatgcgctcctttctgtcattatgcgtaaaagaggtaatatctatcaaagtgatggtgagcgcgcacctaacaaggaaaaacctgcagccctgtttgcgaaaggctctgtcggtataacagacagtaacaaagcaggtgccagcttgcgtctctaccggaataacaccactgaaccgggcaatcccactcagacacatggtgacagcggcctgcgtgacagaaaaacagtacaaaatgacgtacagttctggtaccagtacgctcctgtggataacagcctcatcaatgtaaagtcaactttatatctcagtgatatcactatcaagacaaacggtcacaacaaaacggcagaatggagaaacaacagaacctccggtgttaatgttgtcaacaggagtcatactctgatttttccgggagcccatcagttaagttatggcgctgaatattaccgtcagcagcagaagccagaaggctctgccacactatatccggaaggaaacattgactttacatcgttgtatttccaggatgaaatgacaatgaaaagctacccggttaacattatcgtcggttcccgctatgaccggtacaagagcttcaatccccgtgccggagaactgaaagccgaacgcctgtccccaagggcggcgatttcagtctcaccgacagactggctgatgatgtacggctccatatcctctgcattccgtgcccccacaatggcagaaatgtacagggatgatgtacatttttaccgcaagggtaaacccaattactgggtacctaaccttaatctgaaaccagaaaataacattacccgtgagattggcgcaggtattcaactggacggcctgcttacaggcaatgatcggctgcagttgaaaggcggatatttcggaacggatgccagaaactatattgccacgcgcgtggatatgaaacggatgcgttcttattcttataatgtatcccgggcccgtatctggggatgggatatgcagggaaattaccagtctgattattttgactggatgctttcttataaccgcacggaaagtatggatgccagcagcagggaatggctgggctccggcaatcctgacacactcatcagtgacatcagtatacctgttggtcatggaggagtttctgccggatggcgtgctgaactttcggcagcagccacgcatgtgaaaaaaggcgatccccatcaggctggctatgccgtacattccttttcactgtcttataagcctgtaagtgttaaaggctttgaggcatcagtgactctggataatgccttcaacaagcttgccatgaatggcaaaggagtgccgctttcaggcagaactgtcagtctttatacccgttatcagtggtaa

SEQ ID NO: 373457 - DNA, 435 bp, Salmonella enterica; identical to SEQ ID NO: 13800

SEQ ID NO: 373458 - DNA, 351 bp, Salmonella enterica; identical to SEQ ID NO: 13801

SEQ ID NO: 373459 - DNA, 1524 bp, Salmonella enterica
ttgataatcagcgaaatgcaacgcaagcttgccacatgggcagtcaccgatccgtccctacggattcaacggctgctgcgtctgataacacaaccagaatggctggctgaagcggcgcggatcacgctttcatcaaagggggcccatacccccggcgttgatggcgtgaacaaaacaatgctacaggccagactggctgttgagctgcaaatcctcagggatgaattactctcaggccactaccagcccttgcccgccagacgggtttacatccctaaaagcaacggcaaactgcgaccactgggtatccccgcgttgcgggatcgtattgttcagcgggccatgctgatggcgatggagccgatatgggagagtgattttcatacgctctcatatggcttccggcctgagcgcagtgtccaccacgctatccgcacggtgaaattacagctcacagactgtggtgaaacccggggacgctgggtgattgaaggcgacctgtccagttacttcgacaccgtacatcatcgactgctgatgaaggctgtacgccgcaggatcagtgacgcacgtttcatgactctgctgtggaaaaccatcaaggcgggacatatcgatgtcggtctctttcgggcggccagtgaaggtgtgccacagggcggtgttatatcgccgctattatcgaacatcatgctgaatgagttcgatcaatacctgcatgagcgctacctgagcgggaaagccagaaaagatcggtggtactggaataacagtatccaacggggccgaagtacggcggtcagagaaaactggcagtggaaacccgcggtggcgtactgccgctatgccgatgattttgtcctcatcgtcaaaggcaccaaagcacaggcggaagccatcagggaggagtgtcggggtgtgctcgaaggcagtctgaaactcaggctgaacatggataagactaaaatcacccatgttaatgacggctttatctttctggggcacaggatcattcgcaaacgcagtcgttatggcgagatgcgagtggtctcaacgatcccgcaggagaaagccagaaacttcgccgcatcgctgacagcactgttatcaggcaactacagtgaaagcaaagtcgatatggctgaacaactcaaccgaaaactgaaaggctgggccatgttctatcagttcgttgattttaaggccaaagtcttcagttatatcgaccgtgtcgtgttctggaagctggctcactggctggcccgcaaataccgtacaggtatcgcttccctgatgaggtggtggtgtaaatcaccgaaaccgggtcagagcaaaacgtgggttttatttagtaaaaccaatcacggcaagctcagcggcgaaatactgtaccggttggtggggcaaggcaagaagctgttccgctggcggctacccgaaggtaatccctatctgaggacggagaccagaaacacgtatacatcgcgctttacagaagtggcaatggcgttcgccagcatttaa

SEQ ID NO: 373460 - DNA, 432 bp, Salmonella enterica
atgacggcggagcagcgccttgccgaacgtcagttgaaaacgaaaccgctgctgaaatccctggaaagctggctgcgtgaaaagatgaaaaccctgtcgcgacactcagaactggcgaaagcgttcgcatacgccctgaaccagtggccggcgctgacgtactatgcagatgatggctgggctgaggcggacaataacatcgctgaaaatgcgttgcggatggtcagtctgggccgcaaaaactacctgttcttcggttcggatcatggaggagagcggggagcgctgctgtacagcctgatcgggacgtgcaaactgaatggagtggagccagaaagctacctccgctatgtccttgacgtcatagccgactggccgataaaccgggtcggcgaactgctcccctggcgcgtagcactgccgactgaataa

SEQ ID NO: 373461 - DNA, 426 bp, Salmonella enterica; identical to SEQ ID NO: 6184

SEQ ID NO: 373462 - DNA, 351 bp, Salmonella enterica; identical to SEQ ID NO: 6245

SEQ ID NO: 373463 - DNA, 228 bp, Salmonella enterica; identical to SEQ ID NO: 7763

SEQ ID NO: 373464 - DNA, 234 bp, Salmonella enterica
ttgaacacgccgcgtgactgtgaaaacaccttcaaacctcagttgattaagaagaaccagacgcggctcacacagatggacagccagattttatcgctgtatgtcaaaggcatggtcacgcgcgaaatctccgccaccttcaaagaaatgtacgacgccgatgtgtcgctcacattgatatccaaagtcacagatgccctaaaagagcaggctacggagtggcaaaaccggtaa

SEQ ID NO: 373465 - DNA, 363 bp, Salmonella enterica; identical to SEQ ID NO: 372979

SEQ ID NO: 373466 - DNA, 927 bp, Salmonella enterica
atgaaagtctcgttagtcgttccggtcttcaatgaagaagccacaatacctattttctataaaacggttcgcgagtttgaagagctaaaaccgtatgaagttgagattgttttcatcaacgacggaagcaaagatgcgactgaatcaataattaacaaaatagctgcatctgatccgctcgttattccgctttcgtttacgcgaaacttcggtaaagaacctgctcttttcgcgggtctcgaccatgcaaccggggatgcggtcattcctattgatgtcgatttacaggatccgatagaagttatcccccatctcattgagaagtggcaggctggcgcggatatggtgctggctaagcgctcagaccgctcaactgacgggcgcatgaagcgtaagacagctgaatggttttataagctgcacaataaaatcagcaatccgaaaattgaagagaacgtcggtgatttccggttaatgagccgtgaggttgtcgaaaatattaaattaatgcccgaacgcaacttgttcatgaagggtgtgctcagttgggttggcggaaaaacggatgttgttaaatatgcccgtgccgaacgcgtggccggtgattcgaaattcaacggctggaaattatggaatctggcgctcgaagggattaccagcttctcaactttccctctccgcatctggacgtatatcgggttagctgtcgcaggtgttgcatttctgtatggtgcctggatgatattcgacactctggcgttcggtaacgccgtgcggggatacccgtcacttctggtgtcgatactgtttcttggtggcatccagctaatcggcattggtgtactcggcgagtatatcggaagaatttacattgaaaccaaagcaagacctaaatatattttgaaggggaagaatagtgttaaataa

SEQ ID NO: 373467 - DNA, 408 bp, Salmonella enterica
atgaaggctcaaatttggctcaatgggtacgccaacgccttctgtgatactgtagggggccaggttatccgtggcgattcacgacagcctcctaatgcgcaatggtcaaagcatcttcaagcgcccgctgctctaggttttgcatgtggcaacatacatgaagtgaaaggtcgtgagtacgatgcagtatgcgtcgtagtcccgccgaatcgagcccctgaaaacagaattgaagcactgtttgagtcatggcaagaacgagtagatgctgaggcaaagcgtgtactctacgttggcctaacccgtgctcgcaattttgttgctcttgcgataccaaacgcctttgcagggcgttgtgttgatctgctgaccacaggccaagtgccctacacaagagtgaatttgtga

SEQ ID NO: 373468 - DNA, 1878 bp, Salmonella enterica
atgtggcatgacaacgagacaactgttgattatttgaattttggtgttgttgctgatgcatgcgcaagcctgctgaagcaggctaatggggaacctatttctataggggtctcaggtggctggggagctggtaaatcttctctggtgaaaatgattgcatcccgcctggagagctcttcagttaaaggggcgttggttgaagagagaaatcaagaaaagcattccttcgtcgtactcactttcaatccatggctgtaccaagattttgagtccgccagaagtgcattgttacaaattgtgggggacgagattgttcggcttacagatgaaaataagactatcactgacaaagtatctgaattgtggcgaaggataaatcttctccgagtcgctcaattaagcggcgaagctgcattgactttaactactggcattcctgtcggttctcttggaaaaaccgtttgtaaattggctggttggtttgcgtcggatgacaaatcgagcaatggatcatcagatacagatagtctcgagctaaataccagtggtcttctaaaaccgagtgaaccattctcgatgccagcccatattcaggcattcagggatactttagagagtattctcgatgagttgaaaattacgctagtaatatttgtggatgatttagacagatgtttgccacaaacagcaatttcaacacttgaatcaattcgtttattactatttattcgccgtagcgctttcgttattgctgcagataatgattttataaaagctgcagtgaaggttcactttgatggagcgggaattacgggcgatgttgcaactaactatttcgataaattaatacaggttccactgcatgttcctcgccttggtttgaatgaggcgaaagcgtatctggtgcttttgctgcttgagcgagagaccaacgcaggtcatttcagtaaggaaagattcaatcatgctcttagcgttatccctgagaagctgcgtaatagttggaaaggtgaaacgatcaatcaagagtttttatatgaactggttgagcatgttaatgcactcaaaagtttaatggatttagcccaaggccttgcggctcttcttcatagttctttagcagtaaacgctaatccccggctaatgaaaagatttttaaatactgtttatttgcgtgatgctctttctgcgcctcagggaataacgttagatatagccgcactggcaaaatggcatctccttgaaaggtgcgacgaaagccttgctgaggaacttgctagtcgtgttcattcggataatgacggtagggtacaagttttggcggatgctgaagctgctgcagcgggtcagagtagtttacctgagcctttcaagaatacgccatttactcagcaatggctccaactcctgccagctttgggaaccgaggatctacgcccgcttctccacctcagtcgtgactctggaactcgtgacttcggtgatgacaatatgactcctgattctagaaaattgagagacgcactgaaagttgcaactaatggtcatgagtccttagttgaacttatgaggaaaataggaccttcacagacagagttggcgatgactaaggcttggcagagcaatagtacctcacgtacctggaagagtagcaaagaaattgtaatgctgattgagtgctgcaaggtttacacggaaattgggaataaagcagtcagcttgttggatcaggctcctctgaaacttattggcccaggtttaatcccaactcttggtgctcagccatgggcacagcaacttttagaacgatggaaagatcttaacgaattaccaaaaacaactaggaatgcaattgtgaaccttgggaggaggcgctaa

SEQ ID NO: 373469 - DNA, 549 bp, Salmonella enterica
atgatggggggcgcgcgacgagcagccgctactatgcgaggtgttgccagtggtgtcggtagtcttggtgagttcctgacgtctgttagggatggaaacgaccagcgagtgattgattggcttactcacgttcgtcaagagaacctttcggcaacagatcttactcttgaaattttgaaagaggttattcctgggacaggaagcgttgatgacgaatcgctccgtaatgctggcgcggaggctatggcacaactctatgaactttatccggacgtggacatatttaatctcacggatgcgcagatagctgaagtcatggggttgaccattgcgaatgagatttgtaatcgaatagatctccagcttggacagacttacgaaaaattaaaatatgatcctttattaattcaggaacggcgttctgatattcgcgagtgggtcggtgctgaggttagagtggtattggaaaaacaaactacaaaaaatacagaaccgaaaagtttggctcagtcaattctcttgtctgccttagaggtattttcagaatga

SEQ ID NO: 373470 - DNA, 1389 bp, Salmonella enterica
gtgaaatatataaatcattaccgctatttgtttgtctgttttttccttgccatactcccttttttcgctttatcttttcccggtataagagagtatgtttttgataactttatggtttctgcaatttacaatggagtcattattgccatttatattacaggttctttgtgtgcattatttactattcttaaaaatatttcagcaaaagacatattaatagctcaggacgccagtagaaaaaatagcattctttctaacctcaatcaggttttgtttgccggggaacccaaacagtgtgatttcaatttgctgatggaattagatgacaatgtgtctaccgcccgtaatcaacgattgtcatttattatgagctgtagcaatgtgtcgacgcttgttggcctgttggggacgtttgcgggtctgtctattacgattggttcaatcgggaacttattgagctcgccatcagatgttggcggtgataatgcaagtaatacactcaatatgatcgtgacaatggtagcgtcgctttctgaaccattgaaagggatgaataccgcatttgtatcttctatctatggtgttgtttgcgccatactcctgacctcacaaagtgtttttgttcgcagctcctattcccttgtttctacggaaatcaaaaaattaaaaatcataagcaacagagccaataataaacagcgaagcctgcgggttgaatcagagacgcttgtagaatttaaagagttgtttaaagcgttttttgataactacctgacagttgaaaacttacggacgcaggatgaagaaaagaaacgagagatgctatcagatagctttgtcactttgcaaaaccgactattggataactcagcaaaactggaacaaatttctacgctgattgatggttatctggtaagcagtaacgaaaatctcaaaaaattatctgacggtgtaataacaattacctcgcgtttatctgaaggtaatatcctgcttgctgataataatgcacgactggaggcaatgagtacaatacaaaatattatagataaaaagaatgattcaataatggcatcagttgataaatgctatcaggaatctctttcacatggtaagaccataaacgatattgccgctggcagtgccgatatttctcatactctcgatgggctgagaaaagaaatggatgaggatatgaataatgttcatttagcgctatccgatctatcggctactgataaaaagattattgccaatactaaagagattagtgctgaaatggttagctaccgtgatacctatatgccattaatggaaaaaataacatctatgcatcaggaaatagtaaagcaacgtttgttaaacaaggaggaaaaaaatgaagattaa

SEQ ID NO: 373471 - DNA, 633 bp, Salmonella enterica
atggaagacgaaagtaatccgtggcctagttttgttgatacattctctacggtattgtgtatttttatatttctgatgttggtgtttgcacttaataatatgattattatgtatgacaactcaattaaagtttataaagcaaatatagagaataagactaaatctactgctcaaaatagcggagccaatgacgattcaaatcctaatgaaatagttaataaggaagtgaatactcaagatgtgtcggacggaatgactacaatgtcaggtaaggaggttggagtatacgatatcgccgatggtcagaaaactgatataacgtctacaaaaaatgagcttgttattacgtatcatggcaggctgagaagcttttcagaagaggatactcataaaataaaggcttggttagaagacaaaactaatagtaatttattgatagaaatggttattcctcaggcagacatctctttctctgactctttacgactgggatatgaacggggaattattttaatgaaagagattaagaagatatatcctgatgtagttattgacatgagtgttaactccgcagcatcaagtacaacgagtaaagctattatcacgactattaataaaaaggtgtcagagtga

SEQ ID NO: 373472 - DNA, 705 bp, Salmonella enterica
atgacgggagactacacactggaaaatgacaaatcagtcggctggaactggaaaagcggtgtttacaacgttcctactggaggtgcatccaagctgattttgcattttaatatgaatatcggcagttgtccggcagtgcagttttgtgtgaattacaagaatggcggtatttcctaccgttcggcacgcgacgattttggctttgaacttgactggactgaattttataccacaacacgaaaaccatccgcaggtgatgtcggtgcattacctgttagtggtggcgtaattaacggtaatctcggtatcggtacacctaatatattgggaggtagttctattgtattaggcgataacgataccggcttaaaacaaaacggcgatggcctactggatatttatgctaatggtgttcaggtattccgctttcagaacgacacactggagagtaaaaaatccatcaatgttaccggacgattaacgccaacagactacggtaatttcgacagccgatacgtacaggatttccgtctgggtagttatgaatctggacaggcatggatgggcccgggattcagtgatacaccaggttatgtactgacagcggcaactaacggcaatggtgatgagcttattgacggtctcggaagacgtccaatgcaaaaattgattggcaaccagtggtataacgtgacgagtgtttaa

SEQ ID NO: 373473 - DNA, 540 bp, Salmonella enterica
atgatgcatctaaaaaatatcgtagccggtaatccaaaaacgcctgaccagtatcaactcactaaaaaatttggtgtggtttggctgtatgatgaaaaaggtaagaactggtatgaggaacagaaaaattttgcagtagacacgctaaaagttgcctacgacaaaagtaatataattgtggcaatcaataaagatgcgtcgaaaataaatcctgaagggcgcagcgttgttgaattaccggatatcacagctaatcgccgggcagatgtgtcaggacgctggatgtatgatagcgaacgtgagcagataattaggcgggtttatacaccggaagaactgcgccagcaagtagaagcgaaaaaggtaaaactgctcgaagaggccgagaccgttattacgccgctggcgcgggcagtaaagctgggtatcatcaccgatgaggagcagcagcgactggtagcatgggaacaatacagcgttctggtcagtcgggtggatacatctgcccctgactggccggagaaaccgaccagtcattaa

SEQ ID NO: 373474 - DNA, 588 bp, Salmonella enterica
atgaaaaaatatcaggacattaaaaatttcagacttattgacgcgcccgtaaacaggggtaaaactcagtccgaaataaatataggtgcatattttctggagtcagaagacgggcaggactggtatgaatgtcagtcattattttctgatgataccgcaaaaatcatgtacgaccatgagggggttatctggggtgttattaataagccagtcccgcaacgtggaaacacatatgctgtatcaatgctgtggccggttaatatgtctgttgcggaaatagacgctgctgactgtcctgatgattgccgtggtgatggctcatggttgtacagagatggtaaggttttacccgttccggtggattatcaggctaaggccgaaaccacccgagagaaactactggatgccgctaacagcgccattgccgactggcgaaccgaactggcgttgggtgaaatcagtgacgacgataaggccagcctgactaaatggatggcgtatatcagagagcttaaatcactggctttaacaggcatttcagacgaggccacctttaataaaatacagtggcctgtattaccacaataa

SEQ ID NO: 373475 - DNA, 765 bp, Salmonella enterica
gtggcggtgtcgaattctgatacggtcgttgattttcccacctatccgggtggcagcaagttgtacagctatggatatctgtttgttgagaaaatcggagacgtctggtttcagcattattatgcccatattggcgcgaacgcaaagcgccaggactggggaactgtaccgaataccagtcgcccgtgggttattgactacaacaccgcaaataaaccgtcagccagtgatgtgggtgcattgccgattaccggagggcgtcttaacggtccgctaagcattggtactgataatgcgctgggcggcaattcgatcgttcttggtgataatgacactggttttaaacagaacggcgatggcgtgcttgatgtttactcgaactacacacatgtattacgtttcatcggtaatcttgtggagagcatggtttccctgaaagtaaacggaaacgctgtagctacaggcgaagtacaggcaggaaatggcacgtcacgcatggctggtaacggggatatttttggtaatgtctggaacggctggctaagtacacatctgaataataatctcgtcgcagatattcaattaggggctggcacatcagtggctacctggaacaatgcaggttcctggcctaacacccccggatatgtagttacctccgtctggaaagataatcaaggcgaaaatattgatggcattgcttatgcgcctttgcaaaaaagattaggtattcagtggtataccgtacaaggggggacggcataa

SEQ ID NO: 373476 - DNA, 291 bp, Salmonella enterica
atggtcagccgtcagcgtaccgccggtaatggtggtgccgccggagtaattgttatcgccggtcacgatcagatcatcgctaccgcttttgacaatttggcccccgccggtcacgttgttatccagcgtgccctggctcagcgcaagcgttgcgctttctgcaatcgtcacatcgccagtgccgagcgcggcggcgtctttggcggccagaatgccgccgtcaatttcagtgtcgccgtagtcgttgccggtgttgctgaggatcagcgtgccgtcgccttgtttggttag

SEQ ID NO: 373477 - DNA, 633 bp, Salmonella enterica
gtgccagtgtccacatgcagcgcaatcgtgtctgaattaacctgtgctttgttgaccgtcagcgcgttgagatcctcatacccgtcgagttttcttttgctggttataaagataccgtcgccgtcggcgttgatggtggcgccgtcgatcctggcgtccgacgccagaatatacacgcccgtaccggcagaggtaatgttgccgcctgtaatatccagggtagtggcgttattggcctgtaccgccgcgccgctggcattggtatgtgttatggtcgcgttggtgagattaagagcggccttattggtaccctggatggtgctcatcgtacctgcagagctgaccgagctatcagacaggttcagggtggaaccctcgtctgtcgcggtgtttccggcaacaacgtttatctggccttgcgccagggtgattgtgctaccgtccagcacgttcagcgtactgccttgttgcacctgcgcgctgctgctgttagctgcctcaacgatggtaccgtccagcgttgcttctgaacccgtatacaacgtcattacgccgaaattgccgtcaatcgttagcgtactgtctgttaacctcagtgtgctgccatccgctgcggaaataccctgggtataa

SEQ ID NO: 373478 - DNA, 1419 bp, Salmonella enterica
atgattacaccaataattatggctgggggaaatggaagtcggttatggccactttctcgaacgttatatcctaaacagtttttatgtttagatggctctcaaagtatgcttcagaccacaattacgcgaattaataatttgaatgcttcagatcctattgttatttgtaatgagcagcacaggtttattgttgcagaacagcttaaagaattatctaaatcatctggcgatataattttagaacctgttggacgtaacacggcccctgcagtagccttggcagctttaaaatgccttaagaaaaacgctttactgttagtattggctgctgaccatataattaaggacgaagaaacgttttgtaagactatacaagacgctagaaaatatgccgaagcaggaaaattagttacgtttggtattgtacctaccatgccagagacaggttatggttatatacggcgtgggcaagctcttttctctgcagaaaatgattgttctttggcgtttagggtggctgaatttgtcgaaaaacccaatctagaaacggctcagagttatcttgattctggtgagtattactggaacagcggtatgtttttatttagggcagatcgatatattgaagagttaaaaaaatttcgccctgatatttataaagcttgctcattagcgatggaatctgctgttacggatctcgatttcattcgagtggatgaagattcattttgcgcttgcccggatgaatcaattgattatgcagtgatggaaaagacgaatgacgcggttgtcgtacctttaaatgcgggttggagtgatgtcggttcgtggtcttctctttgggagataagtgataaagatagtaatggtaatgtgactaaaggcgatgtattaagccacaatgcagataattgctatctccatgcagaaacgggtttggtaaccgctgttggtgtcaaagatcttatagtcgtgcaaacgaaagatgccgttttagttgcaaacacaaactgtgttcaagatgttaagaaaattgttgagaaaattaaattagaaaatcgtcatgagcatataactcatcgggaagtttatagaccatggggtaaatacgattcaatcgatttcggtgagcgttatcaggtaaagagaatcactgtaaaacccggagaaggaatttcagagcagcaacattatcatcgcgcggaacactggattatcgttgcaggtaccgcaaaaataaccataaaaggtgaagtgaaaattttaactgaaaatgaatccgtatatattcctgtcggtgttaagcactgccttgaaaacccagggaaaattgcacttgaacttattgaagtaagatccggcgcatatttaggggaggatgatattgttcgtttttcagataagtatggtcgtaattaa

SEQ ID NO: 373479 - DNA, 1689 bp, Salmonella enterica
atgaagacacatattcttttggccagagtgctggcatgtgccgcgcttgttctggttacacctggttattctagtgaaaaaatacctgtaacgggaagtgggtttgttgcgaaagacgatagcctgcggacatttttcgatgccatggcgctacagctaaaggagcctgtcattgttagcaaaatggcggcacgaaaaaaaattacgggcaactttgagtttcacgatcctaacgcattactggagaagctttccctacaactggggctgatttggtatttcgatgggcaggctatctatatttatgacgccagtgaaatgcgcaatgccgtggtttctttacgcaacgtctcactcaatgagttcaacaattttctaaaacgctcaggtttatataacaaaaattatccgctacgtggcgataaccgtaaaggaacattctatgtttcagggccacccgtttatgttgatatggtggtcaacgccgccaccatgatggacaagcaaaacgatggtattgagctgggacgccagaaaataggggtgatgcgtctgaataataccttcgtgggcgatcgtacctacaatctgcgcgatcagaaaatggttatccccggtattgccacggccattgaaaggttattgcagggagaggaacaacccttaggtaatattgtcagtagcgaacccccggcgatgccagcgttttcagcgaatggagaaaaaggtaaagcagcaaattatgccggtggcatgagtctgcaggaagctttaaagcaaaacgccgcggcgggcaatattaaaatcgtggcctatccggataccaacagtttgttagtaaagggaacggctgagcaggtgcattttatcgaaatgctggttaaagcgctggatgtcgccaaacgtcacgtagaattatccctgtggattgtcgatcttaataaaagcgatctggagcgtttgggcacttcatggagcggcagcattactattggggacaaacttggcgtgtcattaaaccagtcttcaataagtaccctcgatggcagtcgattcatcgccgcggtaaatgcgttagaagagaagaaacaggcgacggtggtttcgcgcccggtattactgactcaggaaaatgttcccgctatttttgataacaacagaacgttttacaccaagctgattggggaacgtaatgtggcgcttgagcatgtaacatacggaacaatgatccgagtgctgccccgtttttccgcagatggtcagatagaaatgtcgctggacattgaagatggcaacgataagacgccgcaatctgatactaccacctccgtagatgcgttacccgaagtcgggcgaacgttaattagcactattgcgagagtgccgcacggaaaaagtttgctggtcgggggttatacacgggatgcaaataccgatactgtccaaagtattccgtttttaggcaaattaccgcttattggtagcctgttccgttattccagtaagaataaaagtaatgttgttcgtgtgttcatgattgaaccaaaagaaattgtcgacccgttaacgccggatgccagcgaatcggtaaacaatattctgaagcaaagcggtgcctggagtggggacgataagttacagaaatgggttcgtgtttatctggatagaggtcaggaggtaattaaatga

SEQ ID NO: 373480 - DNA, 309 bp, Salmonella enterica
gtggcacagggtactttattaaaggaaaggataaatcccccacacctggcgtcttcgcccacacgtcattcatatctcaacagcgaattgttaaaatctgagccaatcgttaatctctcaactgcgcaattaatcggctatgaggtcctgacgcaacttccgtcagaacatgatagcgaagttttttttcagcagttaatgctgatggaaggcattgaaacatcagagcaacgaagcattgctttttacgctggtgcaacgatgggacaaggttatttatggccagccatattaccagatatatattag

SEQ ID NO: 373481 - DNA, 144 bp, Salmonella enterica
atggccagccatattaccagatatatattagagcaatggaaaaagcaggatgcgcagcgtaccacgcagggaaagacaccgccgtttaagaaatgccaaagactgcgcctgccgttatcactctccaacgccgcagatatttga

SEQ ID NO: 373482 - DNA, 252 bp, Salmonella enterica
  misc_feature (198)..(207): n is a, c, g, or t
atgatgaaacgtaaattgatcccatttaccctctttctcgctgcgcttagcgccagtaccacctctatagcagcttcgcaggagatttctaaatctatatacacctgtaatgataaccaggttatggaggtgatttacgtcaacaccgaggctggaaacgcctatgcgattatcagtcaggtaaacgagatgatcccnnnnnnnnnnctccggagcaaattacgaagccatagacaaaaattatacttataa

SEQ ID NO: 373483 - DNA, 525 bp, Salmonella enterica
atgcttggcgcagtggcgagtggtcaggcagatgtagcattttcgggaatttcaatcacagataaacgtaagaaagttattgatttctctgaaccttattacatcaactctttttatctggtcagtatggccaatcataaaataacgctcaataacctcaatgaattaaataaatattctattggataccctcgaggaatggcttactccgaccttatcaaaaacgatctggagcccaaaggatactactcgttaagtaaagtaaaattgtatccaacctataatgagacgatggctgatctaaaaaatggcaatcttgatctggcttttatagaagagccggtttattttaccttcaaaaataagaaaaagatgccgatagaaagccgttatgttttcaagaatgttgatcagcttggcattgcctttaagaaaggctctcccgtgcgcgatgatttcaacttatggcttaaagagcaagggccacaaaaaatatctggcattgtcgatagctggatgaaatag

SEQ ID NO: 373484 - DNA, 657 bp, Salmonella enterica
atgctcaaagcatcacaattaaaagccgattatatatatatatcaaaaacaactaagcgtgttatagatagcattgaactctttaaaaattgtaaaggctattatttcccaaacacattttttcgtttcgaggaaattgcgaaaaaaaatacgattcttgatcttggatatatattattggtaacaggggtgggtgataataaagatctcgatggtgctttgaaattatattcatctattagcaaggatgaacgattgccgcttaaaatattaggctgtggaaatgccatagagagggtaaaaaaaataattgatgaccatagagtccaaagtgaaattgaagttattcctttcctggatcttgatgatgttgtaagtctttattgtaactctacctttatttgggcacattcgaaatatgagggttatggaagagctgtagcagaggctaagttgtcccataaaaagattttatgtacacaaatatcagcctttatggaacaaaaagatgaaaatgtatatctttatactaatcaaaatgactttcacatccaatataaagctgtgttagctagcaagtataaagatatccatggacaattgatagaacatgaaatttttaaatcccaactcgagtttttatatggaaaaaagtaa

SEQ ID NO: 373485 - DNA, 864 bp, Salmonella enterica
gtgactacccaggaagatagcgtcattgttattcataatagtatgaaactgtatcggcagatcagagagcgcaatccgaaagcaaaactggttatgcacatgcataacgcatttgaaccagaacttcctgatacggatgcaaaaattatcgtgcccagtcagtttcttaaagcgttttatgaagaaagattgcccgccgctgctgttagtattgtgcctaatggtttttgtgctgagacttataaaagaaacccacaaaataacctccgtcagcaattaaatattgcggaagatgccaccgttctcttatatgccgggagaatttcgcctgataaaggcatcctgttgcttttgcaggcgttcaaaaaattacgtaccttaaaaagtaatattaaacttgtcgttgttggcgacccttatgcaagccgcaagggtgaaaaagcagagtatcaaaagaaagtactggacgccgcaaaagagattggaactgattgtattatggctggggggcaatctcctgaccagatgcataacttctatcatatagccgatctggttattgtgccatctcaggttgaagaagcattttgcatggtggctgtagaagcgatggcagcaggaaaagcggttcttgccagcaaaaaaggggggattagcgaatttgtgttagatggcataacgggctatcacctcgcagaacctatgtcgagcgacagtataattaatgatattaaccgtgcgcttgctgataaggaacgccaccagattgccgaaaaagcaaaatccctggtgttttcaaaatacagttgggaaaatgtagcgcagcgtttcgaggaacaaatgaaaaactggtttgataagtga

SEQ ID NO: 373486 - DNA, 417 bp, Salmonella enterica
atgattaatctgaagaatatcttagttggtttgatagcgtttttgtctttacttttatctgggtgcgcccagtttaacaggccaagtgacattaaaattcaaaatggtgattatggattggcacctacagatgaagataaagctgaaattaaagattttatacgtagcaacttaattgacccaaattcagccatattcaaaattgacaccccaaaaaaatactggctaactgattataaaggagtcacacactttggttattttattggtgtactggttaacgctaaaaatagttttggaggatatacgggatggcaacctgaaggtattttctataaaaatggttcaatgactgatgtgacaggaattgaaatgtgcgacaactgggcatgtcaagctcacggttacgtgcaataa

SEQ ID NO: 373487 - DNA, 168 bp, Salmonella enterica
atgtccatgcgacgtgttatatgctctattgatgagcaggagcttaatattattgaaaaatataagctttattataaggataaatacggagtaaatcttagtagaaatgcgattatcagaatgttggtttgtcgtttagagaaagaaattaacgaggtgattaaatga

SEQ ID NO: 373488 - DNA, 198 bp, Salmonella enterica
atgaataataattgtgagagaatttttagcactatgtcatacaactttccgataaaggacgaggttgaaaatttaaaattaatagaggccgaactaactgaggccggaatgtacagcaaagattatgttatcgctatttatttagggatgattaaaaaggaaagtaactatcttgctagtccagactgtgctttatag

SEQ ID NO: 373489 - DNA, 333 bp, Salmonella enterica
atgagcactgataaaaggcgttatggagtatttgttatcaaccctgaaacggatagcgataaccctgatactatgtactgtaatgcgtatttaaagcctttatcgatatttccatcaacggcactggcaaatgacaagcgccgctcacttattaacattttaaataaatcaaatgacaagcgaaaagtcgtagttagaacaatgcttgatttggttgatgttgaaatttataaacaagagcaaatcgccagtaaaaacgataaagtggaagcggaaaaggataaccgttatgaaattctcaagaaattgatgattaagaataactccaagtaa

SEQ ID NO: 373490 - DNA, 600 bp, Salmonella enterica
atggtgatgaaatacaacgatgactataagatgcttgtcaatacccgaaaagccgcgaccgaagatattaatgccgcaaaatcatcctattttccgactgtagatcttgtttccagctatgtacagaataacccgagcggtagtgccaaaaaaagtgattatgaagatgaatttaaaacgggtatcaatgtcagtttcaacatttttaatgggttcagaaattcagcccaggaaagaaaaatggtggcaagttactcgcaggctaagctgcaaattgacgattttttgattaaaacgcgttataacattgattcacaactttcaagatacgccgctgcaaaagagacttactcagtggcggaacgttcacatacaaacgcgttacagcttactgaattatatgagcaggagtttcagttagggcaaaaaagtttgcttgatttaatttcaagccgtaatgaagcatttcaggcatatgtaagcatgatcgacagcaaatatagcctgtatattttaaagttacagcaactctcattgatttttcatttaatggattatttaaaaggaaatactgaaagtgagttaaatgtaatgaaatga

SEQ ID NO: 373491 - DNA, 705 bp, Salmonella enterica; identical to SEQ ID NO: 5348

SEQ ID NO: 373492 - DNA, 348 bp, Salmonella enterica
atgtcgcgccagcgctggctgttttacgcgtatgacagtctccggaagacggttgttgcgcacgtattcggtgaacgcactatggcgacgctggggcgtcttatgagcctgctgtcaccctttgacgtggtgatatggatgacggatggctggccgctgtatgaatcccgcctgaagggaaagctgcacgtaatcagcaagcgatatacgcagcgaattgagcggcataacctgaatctgaggcagcacctggcacggctgggacggaagtcgctgtcgttctcaaaatcggtggagctgcatgacaaagtcatcgggcattatctgaacataaaacactatcaataa

SEQ ID NO: 373493 - DNA, 276 bp, Salmonella enterica; identical to SEQ ID NO: 17738

SEQ ID NO: 373494 - DNA, 177 bp, Salmonella enterica
atgaccttaaataaggatggttctattgccggatatgagatcaaagaacctttcgacccaaaaaaagaagccgaaaaagcacagcaacttgttgaacaatcgagaaaagacattgaaagtcagcgtaaaaaagcagctgaaaagatgaacgaaatacagcagacatttaaaaaatag

SEQ ID NO: 373495 - DNA, 369 bp, Salmonella enterica
atgcacaagcgcgatgacggttttgtggtggtgaacgaagaggtctgtatcggctgccgctactgccacatggcctgcccgtacggcgcgccgcagtacaacgccgccaaaggtcatatgaccaagtgcgacggctgtcatgatcgcgtcgccgacggcaaaaagccgatttgcgtggagtcctgcccgctgcgggcgctggactttggcccgatagacgaactgcgtaaaaaacacggagagctggctgccgtcgcgccgttgccgcgcgcgcatttcacgaagccgaatattgtgattaaacccaacgccaacagccgcccgaccggggacaccaccggttatctggccaatccgaaggaggtataa

SEQ ID NO: 373496 - DNA, 504 bp, Salmonella enterica
gtggatgatcaaaaatatattgaagaaaactgtttaattattcgctccttttatcgccgagaaaaagggggctttttaaagaaaattaaatttaatatcctcaagcgggttcataaagcattacttatttcagttcccctttcgaaaagagggcgactggctggattttgcaaggatatcagcatcggttattgctcttgtcatactattgcttataccgctattcaggttgcctattccctcaagtatggccgtattatatgttctgggcttgacttaacagggagttgcccacgtttctatgacgaatctaccagccctatgccatctgagcttagtaaagatctgtttaaaatactgccattttttacttttatgagaaaaaatgtgagtgatttaaatatctttaatttatcagatgatactgcaattcattacgatattattccatatattacagcctcggaacttgaggatgaaatatattacgataaaattgtctag

SEQ ID NO: 373497 - DNA, 276 bp, Salmonella enterica
atggtgggcaaagatctgtgcgtcaacatcgaactggatggtggcggtaaacggcatatcagcgggctggtcacggcggcgcgggtagtcggtcatgaagggcgttcggttacctatgagctgcgtatggagccgtgggtaaaactgctgacccacaccagcgactacaaagcattccagaataaaaccgtggtggatattctggatgaagtgctggcggaatacccctacccggtggaaaagcgactggtggaaagctacccggtacgcacctag

SEQ ID NO: 373498 - DNA, 294 bp, Salmonella enterica
gtggagcggtatttcagggagaaggccatcacagccagtgttaacgaccagaccacagggattatcaccggtatcggagatgatccggaactgagttcgttgtatctggactgttcactgttaccgcagacacaaaatatccaggagcattaccgtatcgtcgcgcaggtctggagtgctggtgaaggcagtaatgtttcagtaatggtgacaggcactgccggactggatattgccgacggtagcgccacataccggattaccgtcaaactgtaccgatattgcccctcctga

SEQ ID NO: 373499 - DNA, 324 bp, Salmonella enterica
ttgccgacggtagcgccacataccggattaccgtcaaactgtaccgatattgcccctcctgatattccggccagtcatattgctgtatttgaccctgaaaccgaaacgtggagtctaaacgaagaccatcacggcgaaacagtgtacgacacgcaaaccagcaacccgatttatatttcaaaacccggcccgttaccggagaacaccaccacacaggcccccacatcaccaatagataaatttgaaaacggtcagtgggtggctgaccttgcgaccgcactcggtcagaaatacgctgagattaatgcgtggcgtaatgcgtag

SEQ ID NO: 373500 - DNA, 510 bp, Salmonella enterica
atgagcgcagacgaactgattaaactcgaagccactatgcaacaaaacatggtactggtgggttttaaaatccacgaacgccagcggcagatgaaggacgaagtgaacagtctcaccaacgcacaggctgtactgggttacgtgttggctggccggaaaaccgttaaggaatgtattatgagctgcttcacaaccccggccattcttgaaatgcctggccactacctctggcgtgtacatgaatcttttgaattttacctcagcgacgacaacagcgacgtaatcagcgtaccagccggatttgtaactgatctcgccactgtgccatgcatcttctggtcagtcatgccgccagacggcaaatacgctaaagcggcaataatccacgactacctttacaacaatgcgctgcgcacgaaaaaagaagccaatttgatattcctggacggaatgaccgtgcttggcgcgccgaagtggaaacggattgagatgtatctggcggtcaggtga

SEQ ID NO: 373501 - DNA, 486 bp, Salmonella enterica
atgggagggattacagaaactcccggcagaagaaaacagttcgcactttcttctccggtacttaaaaatgggaaaatagcgctgacgcaatgtaacaggattaatgacttcaaatctcttgaagatattgaccgtaagggcgtgcggattgttgttaatccaggtggtacaaatctggactatgttgacaagcatatcaggtatgcagatgttattcgcgaaaaagataatgatgccactctgcagaggattcgtgaacgcagcgctgatgtcatgtttaccgacttgctcgaaggtacttattaccagaacaaagagccaggcgtcttctgcgtatcaaccaggagtatcctccccgacactgccggtaataaagtctatatgatggcgaaggataatcagtatcttcttgatgctgtaaatagctggttatctgatgaaaacagaatcatacttgccagaaagtggcagataaatccagagtag

SEQ ID NO: 373502 - DNA, 213 bp, Salmonella enterica
atgaaaaaagtatattttatgtttgttatcttgttgtcactttcaggtattcattccgcgatggcaaaaccctggcaggagattaaagaaagcaaagagttacgtgtgggggtgcctggtgactatgctcccctcgcatttcacaacaaacaaaataaattaatcggttttgatattgatatggatattcactgggcaaagctctgcacctga

SEQ ID NO: 373503 - DNA, 330 bp, Salmonella enterica
atgtctatgccgttgcccgccttaatcgatcgctgccgactggtaagccgaactgatttcatgatcagtgcaggaatcaggaaaaatagcccgaccgggaatattcatccggatggattgacaaagacatttgtaaaagcaagaaaagcctccggcgttaacttcagcaataatccaccgacatttcacgagatccgaagtctggccgggcggttgtacaaaaacgagcacggcgaggtgttcgcccaaaaactcctgggccacacctcagagaacaccacgaaactctatctcgatgaacgcgataataaagcttacgtgatgctctga

SEQ ID NO: 373504 - DNA, 282 bp, Salmonella enterica
atgcctatctgctaccgttcggaaacagaaacgaaaagtcaggcaaaaaaaaacgttcagttaattattggctaccggggaatgatcgaccttgcccgccgttccggacagattgcaagtctttccgcgcgcgtcgtccgcgaaggtgacgatttcagcttcgagtttggtctggaagagaagctggtacaccgtccgggtgagaacgaagatgcacaggttactcatgtctatgccgttgcccgccttaatcgatcgctgccgactggtaagccgaactga

SEQ ID NO: 373505 - DNA, 396 bp, Salmonella enterica
atgagcagaaattacacaccggcgcagaaagctgaaatacagaagcgcctgacggaactgatacgaacacacggtcggatgacgtttggagagctgcggaagataacagggttaaccatttttacagcccgccactacctggaaaaggcggaaagttgtggggatctgtatcaggccgggagaagcggtatttttccttcggaacaggttttcctgctttggaagcagaaacgtgaagatgccaggattacccgctttctgaaaacgccggaaggtgtcgtgagttcctacgaccggaccagaaacgttatctgtacggagtgccggaacagcgtgacgatgcaaaggggactggcattttatccgggacattaccgggaggcggaatctgcatga

SEQ ID NO: 373506 - DNA, 1131 bp, Salmonella enterica
atggggcaggattcggacgactggcgccgtacctccagtgctggaagggtatggcaggatcataaagatatggtcaggcaagcgctacgtgtaagtattccgtggttcacatttgtgaatatcagctttgcgcttatcattttatttcgccacatactcatcagtgactttgacaagtcgatcagtgcacagactggaatactgcctttaatagacgatattatgggcagtattattgttttttcgttcctgatgctccttttcatttaccgccttccgaccagatttactcctctttgtctggtgatgctgctgattctcagtctgatgtggagctattgtagctactgttttattgtctggtggcagctgccttttgcctggcctctcagtgtcatccttatgcttaccgcgctggctgcgctttattatcatctgccagcgttgctacttttcatcgtcccgttatggctgaccgccctactggccagtgtgcggcttaaccagtatgtgaatatccggtttttattagtctggcttactcttaccgccatactcatttatggtcgctttatcctgcagcgctggtttgatgaagcctggttgcgttaccaggaaaaccggatgcttatcgcgcgtctcgacgttatggctcaccaggatgcactgaccggaaccgctaatcgacgttcaatggaaagttttcttggggatgctctccgccagacggagccgtttgcactgatcatgctcgatgtggactatttcaaaaactataacgaccattatggtcaccaggctggcgatgcctgtctggcaaaggtggcctgtgtagtgaagaggtcgattcgtactccggcagacctggtggcacgttacgggggcgaggagtttgtcgttgtgctgccttcttcgtcgctgaatgaagcagcactggttgctcaacgtattcagacaaacctgcgtgaaaccgcactgccgcatgcagcatctgcggttagcgaaacggtcaccgtcagcatgggcatcaccctttccacagccggtgacactgttaccggcattattgccagagcggacgaggccctttatcgggctaaacaacagggacgtaatcgttgggtaaagtaa

SEQ ID NO: 373507 - DNA, 1980 bp, Salmonella enterica
atgagacttaagttgatcgttaaaagttttgtgctggcggggctactctcttcctctgcgctgacacctttatttgcacaggaagccccaaaaggtgccactgcttcaaccaggcaatctaacaatgcgctttataaccaacttcctttctctgataacaccgatttcacgaatgcccataaaggctttattgctgatttacctgaagaggtgattaagggagagcaagggaatgtcatctggaatccacagcagtacgctttcataaaagaaggggaaaaatctcctgacactgttaaccctagtctgtggcgtcagtcccaactaatcaatatcagtggcttgtttgaagtaacagacggcgtctaccagattcgtaaccttgatttatccaacatgacgattatcgaaggtaaagaggggattacggttgtcgatccgctggtttctgcggaaacagccaaagccggtatggatttgtatttcaaaaaccgtggcaataagcctgttgtcgccatcatttatactcatagccatgttgaccactatggcggtgtgcgtggcgttgtcgatgaagcggacgtgaaatccggcaaggtgaaagtgtatgcgcctgctggctttatggaggcagcagtagccgagaatattatggccggcaacgtgatgagccgccgtgccagctatatgtatggcaacctcctgaaaccagatgcctccggccaggttggcgctggactggggacgaccacctctgcggggacggtgacactgattgcgcccactaatatcattgataaagacggccagaaagaagtgattgatggcctgacttacgactttatgctggtccctggttcggaagccccttcggaaatgctgtggttcatcgaagagaagaaactcatcgaagccgcagaggacgtcactcacaccctgcataacacttactcgctacgcggcgcaaaaattcgtgagccgttgccgtggtcgaaatatatcaacgaagctatagtgcgttggggtgacaaagctgaaattattatggcccagcaccactggccgacctggggtaacgagaatgttgttggtctgctgaaaagccagcgagacctgtatcgttatatcaatgaccagactctgcgtatggccaatgaaggtctgactcgcgacgaaatagcggccaacttcaaactaccggatagcctggcaaaaacctgggccaaccgcggctattacggctccatcagccatgacgtaaaagcaacgtatgtgctgtatctcggttggttcgatggcaatccggcaacccttgatgagctgccacccgaagaagcggctaagaaatttgttgaatacatgggcggtgccgatgcgattcttcagaaagccaaagcagactttgaccaggggaactaccgttgggttgctcaggtggtgagtaaggtcgtgtttgccgatccaaataaccagaatgcacgtaaccttgaagccgatgcgctggaacaattggggtatcaggctgaatctggtccatggcgtaacttctacctgaccggtgcgcaggagctgcgtaacggtgtggttaaaggtccgacgccaaatacagcaagtccggataccgttcgggcaatgccccctgaaatgttcttcgatttcctggctgtacatatcaacggtgaaaaagcgggtaatgcccgggcggtgtttaatattgaccttggcagcgacggcggaaagtacaagcttgagctggaaaatggcgtgctgaaccacacggctaatgctgaagcgaaagacgctgatgccacgattactctgaaccgtgacacgctgaataaaattatcctgaaggaagaaaccctgaagcaggctcaagataaaggagaagtcaacgttaccggtaatgctgcgaaactggatgagatgctgggctatatggacaagtttgagttctggttcaatatagttacaccataa

SEQ ID NO: 373508 - DNA, 228 bp, Salmonella enterica
atgctgcagggaagttacttcagacaattctgtacgtttttcatactcgatttttccttcattctttatatcttgcttcattttatgtatttgctgctgaagcacatgaccctgatgccagtcagtcctgattctgttatgcacagcctttttcatcagatgacagtaactggttgttgcgtgattcaatggtctgcgagtctggtcaacatgcttttagttagttaa

SEQ ID NO: 373509 - DNA, 525 bp, Salmonella enterica
gtgaaaattccccctgtcgccgtcggcgtattagccgccggggggagtagccaggtacctttccacgtcagcctggaatgtgagtccggcgccgtatccagcccccgtccaaccattagtgccgccaatatcgcaatggggtttgtcgttaatcaaccaaccgccgtggcgatggctcgtcgcctggggataaccgcatccgcaggcggtctgtcgtggctactggacgcccattatggcgaccccggcgtagcttccggagtgggaattcgcatctataacgatgccggtacgccgattaatctgttgcccgatcgtatcaggacgggcatcggcaacgcccgaggctggtatggctataaagatttaaccacacgggtatcatccggttcagtagaaatctacagcggtgattttactgcctcacttgaggcgatcggcggacaaacagtaacagcaggaagcgttaatgcgcaattacaggcatcgcgtcgtagtgtgtctggcatctatattacgttataa

SEQ ID NO: 373510 - DNA, 168 bp, Salmonella enterica
gtgattttacataacgcgccgcgcgccggtagtgcgaagctgatggacgtactggaccatcttaacgcaaaagacgggaaggggacgctgtacttcgccgggggggatgccgcaaccgtgggctatgaagcgagaaatgctttcgcctcggtataccacccgctatga

SEQ ID NO: 373511 - DNA, 147 bp, Salmonella enterica
atggcgatggatgcgttcgcgaaagcccgggacgataaatatccgcaaatcagcaaaagctggcgtgcgcactgggaaaacctcaatacgctcttcagttatccgccggatatccgcaaggccatctacaccacaaacgcaatctaa

SEQ ID NO: 373512 - DNA, 1317 bp, Salmonella enterica
atgagtaaccagtatcaaacccagggttataccgttaacgacgccggccgtcgtctgatcgtggacccgattacccgcatcgaagggcatatgcgctgcgaagtgaacattgatgagcaaaacgtcattaccaatgccgtttcctgcggcacgatgttccgcgggctggagatcattctgcaaggccgtgacccgcgtgacgcctgggcgtttgttgaacgtatttgtggtgtatgtaccggggtacatgctctggcatcggtgtacgctatcgaagatgcgattggtatccaggtgccggataacgccaatattatacgtaacatcatgctggctacgttgtggtgtcacgatcatctggtccatttttatcagttagccggtatggactggattgatgttctgaatgcgctgaaagccgatccgcgcgccacctcgcagttggcgcaaagcctttccgcctggcctatgtcatcgccgggctacttctttgacgtacaaaatcgattgaagaaatttgtcgatggcggccagcttgggatattccgtaacggctattggggacatccacagtacaaactgtcgccagaggctaatctgatgggctttgcccactatcttgaagccctcgacttccagcgcgagatcgtcaaaatccataccatatttggcggtaagaacccccatcctaactggatcgttggcgggatgccgtgcgcgatcaatctcgatcaaagcggcgcggtcggggctatcaatatggagcgcctcaacctggtgcagtcgatcatcacccgcaccgccgacttcattaacaacgtgatggttccggacgcgctggctatcggccagttcaataaagcatggagtcaaattggcaccggtctgtcggataaatgcgtgctgagctacggcgcatttccggacattgccaacgacttcagccagcaaagcctgttaatgccgggcggcgcggtgatcaatggcgattttaaaaacgttatgccggtagatttggccgatccgcagcagatacaggagtttgtggatcacgcctggtatcgctatccggacgatcggctgggccgtcatccttttgacggcattaccgatccctggtacaacccgggtgatgtcaaaggcagcgatacgcatatccagcagctcaacgagcaggaacgttactcctggattaaagcgccgcgctggcggggtcatgccatggaagtcgggcccgcttgcccgaacgcttatcgcgtaccacaaaggggatgccgccactatagagtcggtagatcgcatgatgtccgcccttaa

SEQ ID NO: 373513 - DNA, 186 bp, Salmonella enterica
atgtttcagaattcaggcgaagtgattatgtacttcggttgttttttattttccttaccatttattcttgttttaattagaaaagtgctttttttgttgggctacaatataattttcttcatagccacaaagcaggtgtcgcttttggattgctacttatatatggacttatcatcgcatacatag

SEQ ID NO: 373514 - DNA, 153 bp, Salmonella enterica
atgttgtactcatttttgacagcattgttacgagatgagttgaggcattatgaaatgaaaaatccacgccattgcgtggattttatagagttttaccgctgtcatgagattcagcgaaacctcatgaggcaacagaaactaattagacgttga

SEQ ID NO: 373515 - DNA, 1983 bp, Salmonella enterica
gtggttttttctaaaaaacccattactaaatatataacctgggccattgttaccagtcagatttcactgccggtcattgctgatagcgatagtgaaattcagtcgtggattgcggggacggcatcgtctatttctccgcatctgcaggaggggacgctggaggattatgccaaaggaaaaataaaggcgttaccagggcaagccgctaattatctggtgaacgaagggatgaagagcgcttttccggagattattttccgtggtggcgtcaatcttgaagatggcgcgaaatatcgctcatcagagttcgatatgtttattcctgtcgaggaaacaacatcgtctttactctttggccagcttggctttcgcgaccacgacagcagcagtttcgatggccgcacctatgttaacgttggtgtgggttatcgccaggaggtcaatggatggctgctcggcgtcaatacgtttctggatgccgacatccgttattcccacttacgtggcggcattggcggggaagtctataaagacagtctggccttttccggcaactattatttccctctcaccggctggaaaacgtcagcagttcatgaattacatgatgagcgtccggcatatggctttgatctgcgaacaaaaggcacgcttcccgattttccctggttcagtggcgagctgacatatgaacagtattacggggataaagttgatctattgggtaacggtacattaagccggaatccccgcgccgcaggtgcggctctggtctggaatcccgtccccttacttgaggtcagagcaggatatcgggacgccggtaacggcggctcgcaggcagagggcggtctgagagtcaattattccttcggtacgccgttacatgaacagcttgattaccgcaacgttggggcgccgtcgaatacgactaaccggcgtgcctttgttgatcgtaattacgatatcgtcatggcgtatcgggagcaggccagcaaaatccgcattacggcaatgccggtgtcaggcctgtccgggacgctggtgacattaatggcgacggtagatagccgttacccggttgagaaggttgagtggtcgggtgatgcggagcttctcgccggactccagcttcaggggagtctgggcagcggccttatccttccacaacttccgctgacggcgaccgacggtcaggagtatagcctttatttaacggtgactgacagccgggggactcgcgtgacctccgagcgtatcccggtaagggtgacacaggatgagaccagtttccgttcctggataaatgttatcaatggcgatgttcaggttgaggacggcaactttgttatcagtacgccgcttcctgccgtagaagaggggaaggttattgagtggcactacgtgcgcgagcgttctgaagaggagtgggcgtcgctcaaaccacgtcatattaagtatcaatcagatatgccgggtctggcatttaaagcgctcggtggtacagagcgtgacggccattgggttgaacgggttctggtgacccatatcggcgatgatgcccgctcgctcaaattacatattgaagcaagcggaccagacgataaacatccggtgaaggggaccgtactgctgcaagcgcagccagacagtattgcgcagaaggtcacttctgtggaggtgctttttacgccgggtactgaagaagccaacggaagcgttactgcgccagtcgtcggaacggaaatgcgagccagaacgctttgtgtaaataacacggactgtactgatgcgtttaattatcagtgggaaatctccgatgaaatgaaatcctggcaatccgtaccgggggcgacaaaggccacctggcttatcccttatagccttaacggggaatcgctacagaataaatatatccgcgtcagaattatttctgataaagaaaatgccaagagttctaccgcagcatctgatgcgaattaa

SEQ ID NO: 373516 - DNA, 234 bp, Salmonella enterica
atgagtgatatctcgtggtacaataacacgcgtaaccacattattttcatcgcactctatcaacgctctggcaaaaatactgagctcattaattttcagcccggaattatccaaaaactggcggcaagcgtagtcagaaacaaaggttatgccgggatgaatatcatgttcccgaataaaacgggcctgagcaaatggcgtatccatactcagcacatataccgcccggtttga

SEQ ID NO: 373517 - DNA, 687 bp, Salmonella enterica
atgtcttctatgttaccgtcaatcagcccggaactggcccgtatcgctcccggctttcgtgcattaagtattaatgttattgccgctccgattcgcgatgcgcaggtcggagaaatcgcgctaaaagaggcctgtcaggccgtaattaacggccaaccgacgtgggcccaggcgcatatagacgcctggaatgcggtgtttaaagcattcggcgcaaaaccaaagcgcaccccctgctcggctgaagcgctacgaaaacgcgtgttgaaggatggaacaatggcggcgctggacccggtcgtggatctttataacgccgtgagcctgcgctatgccgtaccggtaggcggcgaaaatagcgcggcttattgtggatcgccgcggctggttttcgcagacggtagtgaaacatttgataccctgaaagaaggacaacccgtcaccgagtcgccagaaccgggcgaagttatctggcgcgatgacagaggcgtcacctgtcggcgctggaactggcgtcagggagtacgtacccgactaagcgcttcagataaagcgatgtggtttatccttgaaagcttgccggaaatgccggttgatgaattgtacgcggcaggaaacatgctgactgacggccttgaaaaaatgttgccaggtttacgttttgaatccacgttgataggtgtttga

SEQ ID NO: 373518 - DNA, 438 bp, Salmonella enterica
atggtatttaccacgttgggttatgtcgtcatgcaagcgcagcagcggatcggcgaaccgtgctggcgttactggtttgattatgtcgccgaagcggagcataacacctacgcgaatggtgcctgtcatggcaatgaaataccgtatgtattcgatacgttaacgcgggctgagcccacatgccattatgtgaatgagaatgacctagcctttgcctcgcaggtggcggattactgggtgaatttcgctcgtcatgccagccgcacgcgcgacgtgctgcacggcccggttcgctggcccgccagcattcgggggcgagatcgtctgttgcggattgggctgaacaaacttgccggttttaaagtggaaaaccgctttatgcgtgcgcgtctggcgctgtttaaacgagtcatgaaacatcacgttagtctggaataa

SEQ ID NO: 373519 - DNA, 1206 bp, Salmonella enterica
atgatgaaaactcatcacctcattcgggtagtggcctcgctggtaatgttggcaacatcaggcctggcttatgctgaagagtacaaagccagcacggacgaaaaagcaataaaaatgacgaacgtagcctctctggaagcacgcgttcaggccagaatggagaaaggggcatttggttatattcgcggtggagccgaagatgagaataaccttcgcagcaacaccgaaagctttgacaaaaaatatattatgtcgcgcgtattacagggcattgagttaaaagagatcgatttatcaacgcagctactgggtattccgcttaaaacgcctataatccaggcaccgatggcggcgcagggcctggcccacgcctccggagagttggcgacggcgaaaggcatggcgcaggtcggttcgattttctcgttgagcacctatggcaacaagaccatcgaagaggtggctaacgtttccgggaaaaatccgttcttcttccagctttatatgagcaagaataatcaatttaacgaatttatttttgcacaagcggtaaaacatggcgctaaagcgattgttctgaccgtagattcgcctgtcggcggttatcgggaagaagatattaaaaataacttccagttcccgctgggttttgcaaacctggaaatgttcgccagaaaaaatgacgatggttcaaaaactggcaaaggagcagggataagtgaaatttacgcgcaggctaaacaagcctttacgccggaggatattgcctatgtacatcgtatttccggtctgccggttatcgtaaaaggcattcagtcgccggaggatgctgaaattgctatccaggccggggccgcaggaatatgggtttctaatcatggcggccgtcaattagacagcgggccgtcctcattcgacatgcttcctgcgattgcaaaagtcgtcaacaagcgagtgcctgttatttttgacagtggagtacgccgtggttcgcacatattcaaagcgttagccagcggggctgatattgtggcggttggccggcctgtattatatggtcttaatcttggtggcgctcagggtgtggcatcagtgattgaacagctaaacaaagagctgacaattaacatgatgttgggtggcgccagaaatattgaacaagtgaaaacgacacgcttgttaactgaaaaagatctgccccagtaa

SEQ ID NO: 373520 - DNA, 2313 bp, Salmonella enterica
gtggctgaacttaaagcgcaaggtctgggattgatcatcgatattgtgcctaatcacatggccagctcgctggaaaacgcctggtggcgtgacgtgcttgaatatggcaaggagagccgttacgcgcgccatttcgatattgactggtcgcgccgactgacgctgccttttttaggcgacacgtttgacgccgtgctggaaaacggagaaattgcgatcaagcccgatcccgctacgggtaaacccacgttcgcctattatgataactattatccgcttgcgccggcgacgtggcaggggcgcgaggccgaaatactggcgcttaccgataaagccgctattgctgatttgcatgagcgccagccgtggaaattaatgtcctggcgcgatgccgctcgctcgctttcatatcggcgtttctttgaggtcacagggctggtaggaatgcgggtggaagataaaaccgtcttcgacgatacacatcggctgattctggagctggtcagaatggggacggttgacggtttacgtatcgatcatatcgacggccttgccgatccgaaagcctatcttgcgcgtttacgtcaggaagtggggccggcgtgctatatcaccgtggaaaaaattctcgctaaaggcgagcaacttcctgaggactggccggtttccggcaccacaggctatgaatttatcgcctcgctggcggaggtgctggttgacgatgagcagatagacaatctgcgccaggcttacgagaccgtaaaaggcgcgccagtggatatgcgggcggaattacgggcggctaaattgctgatggtcgatcgcaatttcgagggggaatttacccggctgctcgcgcttgcgctgtcgattgccagcgagctacagatcgcacaggaagagagcgtcgttcggcaggcgttacgcgagttattaattgcctttcccgtatatcgcacttacggcacggcagaagggctaccgccgaccgatatttgcctgttacaccgtattgtggaacgggtaaagacgcttgaaacccctccgcagccagaagcgcttacatttctgagccgtcttcttaccggcgatgttcccgcctccagccaggaggaggcgacacagtttcgcgttcggttccagcaactcaccggtccgctgatggcgaaatcggtagaggatacgcttttctttcgtcaaaacatgggactggcgttaaatgaagtcggcgccgagcccgtcacgcatcacttctccatcgaacgctttcaccatgagatgaaaacccgacaggcgcgacagcctgatgcgctatccggtacgtcgacccacgataccaagcgaggcgaggatgcgcgagcacggctgtatacgcttaccgaagcgccggagcagtggagcgaatgccttgcccgctggcggcagatgaaccagacccatgtcaaatttttgaatgatggcactgcgccaaaatcggcggatacgtggatgctatatcaggcgctgaccggcgtctggcccccgatgctacaaccacaggacgaaacaggtttaaacgcgctgaaaatacgctttgaagcctttgtggagaaagcgctacgcgaagcgaagctacgtaccgattgggtggacagtaatgaggcttacgaaacggcaatgcttgattacgcccgttatttactggcgccgggtaatcagacatttttgcaggatttttatcgttccttgcaacccttcatccgcgcaggactggttaacagcctgacgcagaccgttatcaaattaaccgcgccgggagtacctgatatctatcaggggagcgaggcgctgaattttagccttgtcgatcccgacaaccgccgcgaaccagatttcgccacgctggcgcagcagttagaccaactgacgccgggagttttctcgcgcgaagagagttggctggacgggcaggtgaatcagtatgccaccgccgccttactgcgtttgcgtcagcagaatcatgagctcttccgttttggcgactatataccgctgcgggctgttggtcagcgtgccgacaaggtcatcgcttacgccagagtcaatcatgatgatgcgctgattgttgttgcgccccgactggtgttcgccgaatgtgacggcttattgtcacaatcgcatagcggtttctggtcaggaaccgacattattatacccggacagcttaatcagcatcgttatcgcaatgtgcttacccaggagaggttaatgcctggtgaacgcctgtcgttggcctcacaccagggcggcgtactggttttaatgagcgactga

SEQ ID NO: 373521 - DNA, 144 bp, Salmonella enterica
atggccggtgtatcaaccgcgactgtatcacgcgtcattaaccagaccgcgtgggttgaacccgtcacgcgcgaacgtgtagagaaagcaatgccgccgctatcgcgctggcgaaacgtagcggcgatatgctcggattgttaa

SEQ ID NO: 373522 - DNA, 834 bp, Salmonella enterica
atgagtagtattacaaaaagcatacagaatgaatatgttttattgatggaaaacgctttttctgaaaaatataaatatgcatttagaaatttagaactgaaagaattacgtagattcatcctgaaagagctaattagctctcccgagttagataatcaacttacaaacctaatggtgttgctaaataaattttgggatactcacgccgcggcgcttataacagaagtgcgggcgtctaaaagctatcgattattacttccaattcaacgatttggttataacatatctaatcatcttagatcgctggggatttattttgatagcatcataatggttgatccattacactttccttctcttagctctctgcattcatttttgtcattgccaccagataatagttatgtccgcatgcgcagattggtattacttgaacatgtttccaatctatttcgcgccatcccatttatgactattgatgatgattatccaatttttctaatcgttcctgaattactggattttgataaagaacgcaatcatgaacaatctgccgcttttctaagtcagctcttttttaaagatagaaaaatagattacgctacttatttagcgtttcttgagcactttgggagaaatgaagaaacattccagaagatcctaataaataaagaattattaaaaaaattgcttaataatttcaataacatcgaaaaagaagtctgggtttacgatacagatttaaagagtaaaacctgcgcgacgaaccggtcacagtggccggtttttttatgcctgcgtggcgtgtgctgcgtgaaatcgtgtgcaggataa

SEQ ID NO: 373523 - DNA, 468 bp, Salmonella enterica
gtgatcgagaaaggagaagaacttctcgatagctatgaacaggaacgccgcccggtagccgaatcactgctccacctttctacccgattacttgactctcaaaaacagggtggcatcaaacgagaacgcgacgttcaacaacttgacatccagtataccaactcccccttagcccacacgttgcccgaacgtcagcatgggttacaagcgggagaaagagctccggatgctcctcttttgggcgccggcggccaatcattacgattatttcagttactccagggtccggactggaatctgttggcctacgaaacccacggtaaggtcatcgatgcgcggcgaggcctgcgtattcatcacattggcgagcaggacgagctcatcgataccctggggcacttccgggagtcctatcatctggccctgggtcaatgcgtgctgatcgcgttggccgcaagcgaatactga

SEQ ID NO: 373524 - DNA, 450 bp, Salmonella enterica
atggtgctcggcggcgtctgttctgatgtaatttatcggattaccggtaatgctctgctctcacgtcgacttattctgggcgtatgtctggcaggcgcggcggtatgtgttgccgtttccggtaccgttagcactattggtagcgcaattacgctcatgtcagtttcactcttcctgctctatttaacgggcccaatttattgggcggttattcaggatgttgttcataaagataaggtagagagcgtcggcggagccatgcatggcctggctaatatatccggcattatcggtccgcttgtcaccggttttatcgttcaatttagcggtaaatatgactatgcgttctatctggctggtgctatcgctatcgtttcaagcctgttggtcttcgtgtttgtaaaaagtaaaggattcaaagccaatgaaagtcaaagctgtgttcattaa

SEQ ID NO: 373525 - DNA, 381 bp, Salmonella enterica
atgcagcctgatagcgggattgctattgcagacttgccatcgtccgatacgtcggtttcccgttttatacgcggcgtttattacaccacatatgcgccgcaagcgacatccgcccacgacgcaatgaatacgcttgcacatattatgagccgtttcgatcgtccgaaaaatattacggttgactatatggggagtgaaggggaaggcaacgccacccgcaaaccggtctcagaatatacggtctggacaacgctgtctgacttaacgcacggtgagatgatggtgcgcggctacaatgatatcaactataaaacctggtctctttctcagtttaagaacgcgacagcgcccgtgttcgagaaaatcaacgtcaaaggataa

SEQ ID NO: 373526 - DNA, 708 bp, Salmonella enterica
atgaacaaaagtaaaacaatgttatttatcgctccggcgctgttttcatacgccctggctgcacaggcctgcacaacccttgctattcaggataaacaaggcgatatttttcatgggcgtacgctggagtatatgcaggatttaccctcgtggttaacgtattacccggcgggaacacagtttgataaaaaaacgccggatggcagccaggggataagctatcaggcgaagtatccgatactggccattacttccaccattactgatggcgatagcagagacatacttgaaggcatgaatagcgcgggattgtcatttagtgaaaacatgatcatgaatgcgcagttgccgccattgcctgcgagtgaatataaacaggcaattcctgtcacctcgttgggagaatgggcgctggcccgttttgctactgtcggcgaggtaaaacaggcaataaaagagggcaaattctggtcaccggaactgcatcggtttggcgatctgaaatcgccatttcattacgcgttttacgacaagaaaggagggagcattgtcgttgaagtggaaaatggcaaattccatgtctatgacaatcccactcgcgtgatgacaaatggtcccgcattcccctggcatctgacaaatctgaataattatacgcaattaaccaatgtggaccgctcttcaggcacattgggcgggataaagtga

SEQ ID NO: 373527 - DNA, 153 bp, Salmonella enterica
atgaaaacgcgttatccgtgtgaccatttaaaaaaatcccatcatgttataaataaaaaacacggtttcttatcaacattaagagatgccatcacaacgctatatttactcaacatcaccaataacattaaattaatttatgtttttgagtaa

SEQ ID NO: 373528 - DNA, 555 bp, Salmonella enterica
atgaaacataaattaatgacctctactattgcgagtctgatgtttgtcgctggcgcagcggttgcggctgatcctactccggtgagcgtgagtggcggtactattcatttcgaaggtaaactggttaatgcagcctgtgccgttagcactaaatccgccgatcaaacggtgacgctgggtcaataccgtaccgccagctttacggcgattggtaatacgactgcgcaggtgcctttctccatcgtcctgaatgactgcgatccgaaagtggcggccaccgctgccgtggctttctctggtcaggcagataacaccaaccctaatttgctggctgtctcctctgcggacaatagcactaccgcaaccggcgtcgggattgagattcttgataatacctcctcaccgttgaagccggacggcgcgaccttctcggcgaagcaggcgctggttgaaggcaccaatacgctgcgttttaccgcacgctataaggcaaccgccgccacgacgccaggccaggctaatgccgacgccacctttatcatgaaatacgaataa

SEQ ID NO: 373529 - DNA, 1470 bp, Salmonella enterica
atgataaaacggaaatggaatattttgtttctgcttgggctttctttcgcatcggtatgccaggcaggtgatgatattgacgcgttgtatagccgtattgcgcagaaagatattcaggcgctaaatgagctaaaagcgttagccaaagataataatgcccaggcgctggcagaactggggtttatttatgagtacggcgttgccgtgccgatagatatgatacaggctatcaagtattatgagcaggcttgtcatgttgaagaaccctatggctgctacaacgctcgttatttttatctgcatggcctgggggtgatgcaggatgacgttttggcaaaagagcttgtggataaaaccagtaaagcagacaccgatactgatgcgcagacggtgacgcgcctgatagccgacgaaatagatacggcaaagcaagccgcggaaagcgatattactcagcgttcccggtttattgaaacattacgccagtatgccagcggcgggagcgcgatggccgcgctcatcacgcgcctgggttattcaaaggaggatatcctgcaccttgcggagctgtgggcgcaggagagagaccctgaacttaactttatcgttggtagcctctatgactctggttttgttgaggtcgacgataaagaggcgcgttcgttgcaatggttccgcaaggctgctgaattgggccaggctgatgcgcagaatatactcggttacttctacttgaatggaaaacgagggattaagcgcgatctgcagaagggggtgcagtggtacgagttggcggctgcgcagggtaatgccgatgcgctcataaatcttggtgagatctattactccgggacgcaggttccgcttgattacgctcgggcatttgaattctttgaacgggcggcgaagatgggcaagtttcgcgctttaaactatcttgcctggatgtataccaacggtcagtttgtcgacacggattgccggaaggcagcggagttgtttgctcaggggcgaacaagttttgcagacgatccccattttcaggtgacctgcgaaaaagaccgacaggcccgcgctgaagctgtggcaatgcgtgaaaagaatttgccgaagttaaccttcaatcgtgatcgtgttttcggtgcgagccagggcagcggctatgcatgcgagctggagtttgtcgtcaaaacggacagaatcagcagtatagagaatttacgcgtctcactggcgctgaaaaataaggccggggcgatgtcacagcaggttatcgcatttgagccttttgggctaaatacgcagaaccgcaatttacaagggtataagtctgatacgctccgtgaatcgacattacaacctgtctatcagccggaattttgcgatgttgatagctatagcgtgactgctgtgacgggaatggttaacggtaaagagatggatatgcttaaggcaggcgtttttctgtaa

SEQ ID NO: 373530 - DNA, 360 bp, Salmonella enterica
atgaacctcgcgcagatggaacgtaacccgaacgtgaaaatcttctggccggccaacgacaaaggcgagcgcagcgcgctggccatcccttatgtcattggcctggtccagggggcgccgcagagtgaaaatggtaaaaagctgattaacttcctgctgagtaaagaagcgcagactcgcgtcagcgaactctcctggggaatgccggtacgcagcgacgtgacgccgagcgacgaacattacaaggccgccactgccgcgttggaaggcgtgcagagctggcagccaaattgggatgacgtagccgtttcgctgtcggcagatattagccgttggcacaaagtgaccgaaagcgagtaa

SEQ ID NO: 373531 - DNA, 1038 bp, Salmonella enterica
atgcactcctggaaaaagaaacttgtagtctcacaattagcattggcttgcactctggcaatcacttctcaggcgaatgctactacatacgatacttttgggtaccatgacgatgcggccactgtttttggctgggatgataccaacgaccatgactatctaacttatggtggttatgtctacaacaccccagctagtgatagcggctattttgatacaaaatttactggtgacactgtaaatggcgttatttcaacttattatctgaatcatgattacgccaatgatactgcgaatacattggatgttaccaactcaaccattcatggtatgattacttcttaccagatgggctacggtcaatatgtttggactaacggtagtgattatacgacccatgattgggttgatgatgatacttttaatctaaatatttctaattctacaatcgatgatgactttgaggcgttttacttcactgatacctatctcgattctgatggaaaaacagtcaaaaccgattatgacaaattggttactgctggtttaggcactgctataacccttgatgttgaaagtaatattaatattactaacaattctcatgtggctggtattgctctttaccaaaatgatcttggcaattcaacatatacaaccgaagcacatcagtgggataacactattaacgtagcgaattcaactgtaacttcaggctcctggtccgaagatgaggaacaaggccattttggcaattcaagtgaaccaagcgattataatggcaatggttggaataaagatgatgttgctttagcttttgttgacgatccttattcaaattaccgtatggtaaacaacgttacgtttaccgactcgcagttactgggggatgtcgtccttgagagctcctggaattataatttctattctaatggccgtttagtcgatgattccactactgtctatacgaatggtggttgggcagatgatgatcaaaacgttgatcacctgacattgaccctgaataacactaaatga

SEQ ID NO: 373532 - DNA, 2289 bp, Salmonella enterica
atgagtcaatcagaaaatcgtcacgacacgataagcttgcttgttgaaggtatgacctgcgcgtcgtgcgtcgctcgcgttgaaaaaggtattaaggctgtgcctggcgtaacggacgctacggtgaatctggcgacggagcgcgccaccgtccgcgggacggcatcggcggaggcggtgatcgcggcgattgaaaaaacggggtatgaggcgcgaccgatagagacggcggggcagggcgaagacgactctgaagagaaaaaagaggccgagcgcgtcaggctgaagcgcgatctgattctcgccagcgtgctggcgctccccgtttttgtgcttgaaatgggctcgcaccttattcctggtatgcacgagtgggtgataaaaacgattggcctgcaacaaagctggtactggcaatttgcactgaccctgttggtgctgacgatccccggtcgccgtttttaccttaaagggttcccggcgctggcgcgtctggcgccggacatgaactcgctggtcgccgtgggaaccgcagcggcattcggctactcgctggtggcgacctttacgcccgacctgttgcctgaagggacggtaaacgtctattacgaggccgccgcagtgattgtcgcgcttattctgctggggcgctttctggaggcaagggcgaaggggcggacttccgaagcgattaaacgtctggtggggctacaggcgcgggtcgcgcatgtgttacgcgagggccgcatcgtggatatccctgtcgacgaggttgtgctgggagactgtgtggaggttcggccaggcgagcggataccggttgacggcgaagtgaccgaaggccgcagcttcgttgacgagtcgatgattaccggcgaaccgataccggttgagaaatccgcaggaagcgcggtggtgggcggtaccgtcaaccaaaaaggcgcgctcacgctgcgggcgaccgccgtcggcggacagaccatgctggcgcaaatcattcgtctggtggaacaggcgcagggttcaaaactgccgattcaggccgtcgtggataaagtgacgctgtggtttgtcccaatggtaatgcttattgctgcgctgacctttgtggtatggctggcgtttgggccgtcgcctgcgctgactttcgctctgatcaatggtgttgcggttctgattatcgcctgtccttgcgcgatgggcctggcgacgccgacctccattatggtgggaaccggtcgtggggcggaaatgggcgtgctgttccgtaagggggaggcgttacagctactcaaagacgctaaggtggtggccgtagacaaaaccgggacgcttaccgaaggccgcccggtactgaccgatctcgacgtggccagcggctttgagcgccgtgaggtgctggcgaaagtcgcggcggtagaatcgcgttcagagcatccgattgcccgtgcgattgtcgtgtcggcagaagaggaagggagcgcgctaccaggcatgaacggcttcgaatcggtgaccgggatgggcgtatacgctaccgttgacggtacgcgtgttgacgtgggggctgatcgctatatgcgcgaaattggcgtggatattagcggcttcgccaccaccgccgaacggttagggcaggaagggaaatcgccgctctatgcggctattgacggtcaactggcggcgattatcgccgtggccgatccgatcaaacccagtacgcccgccgcaattaacgctttacatcagctcggcattaaggtcgccatgatcactggcgataatgcccgcacggcacaggctatcgccagacagttaggaagtgatgatgtggttgccgaggtattgccagaagggaaagtcgaggcgatacggcgcctgaaagcggcgtatgggcaggtggcgtttgtcggcgatggcatcaacgatgcgccagcgctggcggagtccgacgtggggctggcgattggcaccggcaccgatgtggcggtggaatccgccgacgtcgtactaatgtccggcaacctgcaaggcgtgccgaatgctatcgcgctgtctaaagcgaccatccgcaatatccaccagaatctgttctgggcctttgcttacaatacggcgctgattcctgtcgcggcaggcgcgctatttccggtctggggcatattattgtcaccggtattcgccgcaggggcgatggcgatgtcgagcgtgttcgtgctgggcaacgctttgcggctgcgccgtttccgggcgccgatggcaaccccatccgacacatccacgacatga

SEQ ID NO: 373533 - DNA, 2415 bp, Salmonella enterica
gtggtaaaaatcggcgctgacggcgaggtgacgcgtctgcgtgatgtcgcccgcgtcacgctgggcgcagatgcctatacgctgcgcagtttactgaatggcgaagcggcgccagcgttacagattattcaaagtccgggcgccaatgcgattgacgtttctaacgcgattcgcggcaaaatggatgagttgcagcaaaacttcccgcaggatatcgaataccggattgcctatgatcctacggtcttcgtgcgcgcatcgctacaatcggtggcgattacgttgctggaagccctcgtgctggtcgtccttgtcgtggtgctgttcctgcaaacctggcgggcgtccattattcctctggtggcggttcccgtttcgctggtcggcacctttgccttgatgcacctgtttggcttttcgctgaatacgctttcgctgtttggtttggtcctgtcgataggtatcgttgtcgatgacgccatcgttgtggtcgaaaacgtggaacggcatatctcgcagggcaaaagccccggagaggcggcaaagaaggcgatggatgaagtcactggtcccattctttctattacctcggtgctgacggcggtctttatcccttccgcattcctggagggcctgcagggtgagttttatcgtcagttcgcgttgaccatcgctatttcgaccatcctttcggccattaactcgctgacgctctcccctgcgctggctgccattttgctaagaccgcaccacgatactgcgaaggctgactggctaacgcggttgatgggcacggtcactggcggttttttccatcgctttaaccgtttcttcgacagcgcgtcgaaccgctatgttagcgccgtccgtcgggccgtgcgcggcagcgtcattgtgatggtgctctatgctggctttgtggggctaacctggcttggcttccatcaggtgccgaacgggtttgtgcctgcgcaggataaatactatctcgtcggcatcgcccagctcccaagcggcgcatcgttggatcgcacagaggcggtcgtgaaacagatgtccgctatcgcgctggcggaacccggcgttgaaagcgtcgtcgtcttccccggtctgtcggttaacggcccggtaaatgtgccaaattcggcgctgatgttcgccatgctgaaaccctttgacgagcgtgaagatccttcgctttccgctaacgctatcgccggaaagctaatgcacaaatttagccacattcccgacggatttattggcatcttcccgccaccgccggttccagggcttggcgcgacgggcggctttaaattgcagattgaagatcgtgcggaactgggatttgaagcgatgacaaaggtgcaaagcgagattatgtctaaggcgatgcagacgcccgaactggccaatatgctggccagtttccagacaaacgccccgcagttacaggtggatatcgaccgggtaaaggcgaaatcaatgggggtatcgctcaccgacatctttgaaacgttgcaaattaacctcggctcgctttacgtcaacgatttcaaccgatttggccgtacctggcgggtgatggcgcaggccgatgcgccattccgtatgcagcaagaggatatcggcctgcttaaagtccgcaatgcgaagggcgagatgatcccgcttagcgctttcgtcacgattatgcgccagtcggggccggacagaatcatccattacaacggcttcccctcggtagatattagcggtggaccggctccgggcttctcctccggacaggcgacggatgcgattgaaaagatcgtgcgtgaaacgttaccggaagggatggtcttcgaatggaccgatctggtttatcaggaaaaacaggccggcaactccgcgcttgctatctttgcgctggcggtgctgttggccttcctgatcctggcggcgcagtacaacagttggtcgctgccctttgccgtcctgcttattgcgcctatgtcattactctcagccattgtcggcgtgtgggtatctggcggagataacaatatctttacgcagattggtttcgtggtgctggtcggcctggcggccaagaacgccattttgattgtcgagtttgcccgcgccaaagaacacgacggcgcagacccgctgaccgccgtactggaagcgtcccgcctgcgtctgcgtcctatcctgatgacctcattcgcctttatcgcaggcgtagtaccgctggtactcgcgacgggtgccggcgcggaaatgcgacatgcgatgggcatcgccgtgtttgccggcatgttgggcgtcacgctcttcggcctgttattgacgcctgtattttacgtggtggttcgcaggatggcattaaagcgtgagaaccgcgttgattcacatgatcagcaagcataa

SEQ ID NO: 373534 - DNA, 525 bp, Salmonella enterica
atgaaaagacggtcttcgttccttgtttttttaggtttattattagcgtcacctttagctttggctaacgatcagcacaccgtatcgtttggttatgcacaaactcatctcagttcattgaaaaatagcgatagcaaagatctgcgaggctttaattttaaatatcgttacgagttcaatgagacttgggggatgttaggctcattcaccgcgacgcgcaatgaaatggagaactacacctggaaagagggaaaattgcataaaaatggttccgattctgtagactatggttctttgatgtttggaccaacatatcgttttaatgactatgtaagcctgtacggcaatgcgggtatagcgacgatgaaatttaataaacactcaaaagaagactcctttgcctacggcgctggcgtaatatttaatccagttaagagtatatctatcgatgcatcatgggaagccagtcgtttcttcgctgtggataccaatacatttggtgtcagcgtaggttatcgcttctga

SEQ ID NO: 373535 - DNA, 735 bp, Salmonella enterica
atgaatgaaagcatatttttacttgataagcgtgttgtatttgatagtacgaagatgaccttatcgcatggtaatgagataatcagagtatcagaagctgagacccatctgcttcttgctttttggcatggtctttacaaaaaagaagatattattcattttgtttgggaaaatcgtggaggctgcgtctcagaatcaagttactataaactcattaatcaaatgagaaatgattttagtagcattggtctacagtcatctgacatcgtaactcgccctcgggtgggggtatcgctgtctgttaccattgaacctataaaaaaaatcacctccctaaaggtgagtgatgaaaacgttaaaggcaccacgactcgggagaacatattttacaaaattaaacgtcacagcgtatttgtggtattaacaggagccattcttctggcattgctctatggtgtatttactatatataaagcgcctgttcgtaacagccctgatagtttttttacatatcttggcgaatataacgattatgcaatctataaaacaaaagaggataaggtcacattaagtgaagtagtttttgcttttaactctctaaaaattaaaatttaccggcaaaatggacgccatctttattatatcagggagcctaatatgaatatttttctgcaatgcttaaatcctgttgaaatggcggtgccaaaatgtattacagtaaaagaacgttactga

SEQ ID NO: 373536 - DNA, 927 bp, Salmonella enterica
atgaaaatctcgttagtcgttccggtcttcaatgaagaagccacgatacctattttctataaaacggttcgcgagtttgaagaactcaagccgtatgaagttgagatagttttcatcaatgacggaagcaaagatgctactgagtcacttattaatgctctggcagtatccgatccgcttgtcgttccgctttctttcacacgtaatttcggcaaagaaccagcactattcgccgggcttgaccacgcaactggtgacgcagtaattccgattgacgtagatttgcaagaccctattgaggtaatcccgcgcctcatagataagtggcagtctggtgcagatatggttctggcaaagcgttctgaccgctcaacggatggacaactgaaacgcaaaacggctgagtggttttataagctgcataataaaatcagcaatccgaaaattgaagagaacgtcggtgatttccggttaatgagccgtgaggttatcgaaaatattaaattaatgcccgaacgcaacttgttcatgaagggggtgctcagttgggttggcggaaaaacggatgttgttaaatatgcccgtgccgaacgcgtggccggtgattcgaaattcaacggctggaaattatggaatctggcgctcgaagggattaccagcttctcaactttccctctccgcatctggacgtatatcgggttagctgtcgcaggtgttgcatttctgtatggtgcctggataatattcgacactctggcgttcggtaacgccgtgcggggatacccgtcacttctggtgtcgatactgttccttggtggcatccagctaatcggcatcggtgtgctcggcgagtatatcggaagaatttacattgaaaccaaagcaagacctaaatatattttgaaggggaagaacagtgttaaataa

SEQ ID NO: 373537 - DNA, 1455 bp, Salmonella enterica
gtgttaaataaaaacacggtggctttatattcgatattttcgttatgtgttttcgcattatgcctttatatatccttcaataaccccgttacatctgacggagcatctttatttttagaagcaaaggatatggctgctggaaacattctgctacgaggatggactctttctactgtatcgttttattttactgaagctatatggtatgcgatggtgatcaggatttttggtgacagcatatacctgatgtatgtgttaccagccacattttatacgattgctattgtgttggcctttgcattatcacgtacagatgggaaaagaaaatggtcaatcgcagcgctaattccatgcgtaatcatatcctctcctctggcatcaaccatgactttggagacgtgtgtacacgttggaactatcatatttgctctggtttgcctaaatgcgcttaagtgtgataggcatacaaccattaaacagacatgcgttgcgactctcactgctgcatctgtattcagcgactcgatattcaactactatataactataccgatagccctggcttttgctgtgaatgtattattaaacagggacttcagcaagtggcgatatgtagttgcagttattattggtgttttcatagcaaagttacttgctataatagcaaatcattttggtttactaaacgcgccagggacacaaccgccagcatttgttagctacgataatattccgtccaacctgaatcttttcattgttggtatcatccagtatttcgacgccttcatttttggaaagcagttgtctgcaagcaatgcgatgatattcggcagatttgcagtgatgatgctttggttggttcttttagttgtagctatcagaaacagattcaaagagacttttgttgatactgtattggcaatttcttcggtattacttccagtcgcatatgtggcaagtaacatgcctgtagacctcggaactacaaggtatctggttttctcttttattactgggtctgctttaattgctcgttatctcaattcaaaagcagatcaaagactctttgcatttgcttcaacaattatattgattgttgtttttgccccaagcggaagatacgaactacctaattctagggtacaagacattagtagctttgtgcgtgataataacctcggtgatggctacggcacatactgggttgcgtctggtgtcactcttttcaaaaacggggatgtaaggccaattacgtttactgaagaaaacaaagctgttaggttaaactggctgtcaaataaagaatggtatggatttaaatcaaggtatatcgtcacagagttcaagcatgatgtaagtaagatattacatcagttcggttccgacgcaacagttaaagaaatagacggagcgtatatcatttattataaagataaaagagttactatccagtaa

SEQ ID NO: 373538 - DNA, 1761 bp, Salmonella enterica
atgtcagatatcactgccaacgtagttgtttctaaccctcgtccaatcttcactgaatcccgctcgtttaaagctgttgctgatgggaaaatttacattggtaagattgataccgatcctgttaatcctgccaatcagatacccgtatacattgaaaatgaggatggatctcacgtccagattgctcagccgctaattatcaactcagccggtaaaatcgtatacaacggtcaactggtgaaaattgtcaccgttcagggtcatagcatggctatctatgatgcctatggttctcaggttgattatattgctaacgtattgaagtatgacccagatcagttccgacaagaactggctgagccggatggatctaaaaaagtagggtataaagacagtaacgtatatgacacattgaacaagctagaattaaaattcaaatcattccaggaaatgcgtgatgataattcaaatgagataggcgattacgccctactcacaggctggcatacagagcatcagggttatggtgctggcgtatttcagtgcgtcgataaaactggcttaacggacgatggtggcactattgcggttggctctacgtatgcgtggaaacgtatcactggtccgggtgatgccactgagtttggtgttgtgccgaacgccgggagtgcgtttgataataaggcgtatattttagccgctgcggctacgggggcgcttatctttccggctggtgatatttatacgaaattttttacccttacagatacgtatattgtgcgcggtaattcaaccaatctgtacgaaattaacgattcagaggcaacagactttattgttcactgctcacgtaatgaacagtgggatggtagaattgacggtatctcgtgggaaggcgttaatgtttatcctgtagacgggcatcgcccattccatacttacttcaccacgaacggcaatatgcgggattgtcgattccatggtgggattggttcatggtttgatggtgtttcaaactggtttattgattcctgtgaattctctggatcattaggaggagagaatcttcttaatacaccgaaagtcgatcctcagggaacaattggtacatgggtaatattccacaaatgctttatatcacgaagcgctggagtaggggccagaactattggccttccttctgtatggttcagggattgtattgtatattacaatcgtgattctggtctcttgcattacaaggacgaagacgcttatccaaatgtagaatttggagttcagaaggtaactggatgtgacattgattcaaatgattcctcaggggtcattatgcgcgatgtggtataccctgatatatctaacaattgggtcagctcaggaagggttcttaatcagccaggagtagtgctcattaggtgtaatgatataaatgttgtagagaacagcgtgtattttaatggaactcacggtatatcagttgaagtatgcaattttggaacgatttctaacaacaactgcaacgacaacaaaaatagaggcattagcatccagagtgacgcagggataagcagcaaactaactgtgtctggcaatacctgttgtggaactccactaggttcgctcacgacagcacaggaagagggaattcatatcgagggagatcgcatagtttcgtatggcaacgtatgcaccggaaacgcatcaagtcaatacgttaactcagcgtctaacaagcaagaagggatgaatatcatttcataa

SEQ ID NO: 373539 - DNA, 330 bp, Salmonella enterica
gtgttagaaataatagtattcgttcttggtatagcctgttgcgcactctatgcagagttagtttccctcaagaaaaaggttaaggcattagatcaccaatatgaaattgatgcaaaaattgagcgattaacggaagagaatacacacttaaaaaattccataaggatactaactgatgacaactacaaactgtccaatgcactggctaagtgggaaatagtaagttatgaaagaatgacggacatgattttttcgtcttatatggctacaaaatctcctgaaacatcaggaaaaggaataattgcagctattgaaaagagaattaaatag

SEQ ID NO: 373540 - DNA, 1914 bp, Salmonella enterica
atggctaaggcatggaaagacgttattgcctctcagcaatatcaggcattggaaccagaacagaaggcacaggctcaggagcaatacttcaatgaagtggttgcacctcaggcaggcgatcaggctgagcaggctaaacaggctttctatgctgcgtatccggtgccgacaactcagcaacaatcatcacagcaggaagaaccacagcagcctgagcaatccctgatgcaacgggctggcgacttcctcactggcggccagtcagcaggacagattgcagagcaggctgggcgtgggctcgtaaatatcccgtttgatgtattgcagggcggagccagcctgattaatgcaatcagccagggtttaggcggcccgaaagtgctggatgacgtatatcgcccagttgatcgcccaacagaccattacgcacaggcgggcgaaacaattggtggatatcttgttcccggcgctggcgtggcggggaatatggctatcggttcagtcgctgaggccgctaatcagcaaggtgattttgctggtaacgttgcaaagaacgccgccatcaaccttggcgctcagggagctttatctgctgtagcaaaagggattgggcggggcataactgcagtaaaaggaacgattgcgccagaagcaaagcaactaatcaataccgcagaaagcatgggtataacccccatgacatcggatattgcacgcccggttaacgaaatgggagcccttggaaaggggttggttcagggtggtgaaggggcaatccttggcactggcagcaagagagcagagcaatacgctacccgcagcaaactgataagtaattatctggaccgctttggagaatacaatcctgatgatgttgtgcagtccctaaccagaacgctgaaaggaagaaaggatgcagccggggcggttatcaacgatgttacaaacaagatgggaaacgcagcgattgatacctctaacacgatgaatgcgctgaatacagcaattgcaagacaagaaaggctcggttcttcagcaaataagaacctcttgtcttctttgcgcagccttcgtgatgaaatcatcaacccggcaaccgatctggatatgacatttgaccttctgcgtcagcacagaacggcgtttcgctctaacgttcagggggactcgatggtattccctaatcaggccaaggcagccactatcatggtggagaacgcaatgagtcgtgatttgcgaaacgccgttgggaaaagccttggcgcgtcggacgcggcagcatatctgaaagccaattcagattatgcaaatgtctataacaaggttctgaacaagaacatcgcaaacaaactcaacaaggccagcaatgaagctactcctgagctaattaatagcgtcgtatacagcaggaaaccttcagacgtgaaacgcatatggagcgccctggatggcaaaggcaaggatgcgatgcgagctgcatacatcagcaagattgctgaaaaaactggcgattctccagctaagttcataaccgaagtaaacaaattaaaagcgcaatcaggaggtgagatttacaacaccattttcagcggccgccacattaaggaacttgatgcgcttcatgatgtgctgagacaaacagccaggtccgactcggcaaatgttgtcacacagacagggcaggcgctggcaaatccggtaaggttaggcgcggcaatacctactttagggaagtcactcgcagcagaagccgggtatggcctggcaatgagggtgtatgagagcaagccagtaagaaatatgctactcaggctggctaacaccaagccgggtacgcctgcatatgagcgagcactgaatcaggctgctacggccgtaaggccgctactggctaaccaggcaacacagcagtga

SEQ ID NO: 373541 - DNA, 1353 bp, Salmonella enterica
gtggctacatttcaactcgccggactgccatcaatgcaggtggcaaaccaaaacgcgcccgggcagccatcactatcaaactacgactttagccagcgcccaaacgttggagttcaacttgctcaggggcttggcgcagttggccaggcaatacagcagaatgaggctgctcagaggctttctgactttcaaaaagctttcggtcaggcttatgcggcaggtgatcgcgacgccttgcgtcaacttgcagccaccaatccagaccagattgaaacaattcgtcagggcatggggtttgttgatgctgatcgcaatcaggcaatgggagatatgtctgcacgattgaacattgccgccgctcaggggccagaagcggtgatacgagagcttgccactcaccagaatacgctgcagcaaattggcgtatctcctgaacaggcgtggcagacatatcaacaaagccctgaaggcttcacgcagttaacagaccttattgggatgcacgcggtaggaccagaaaagtattttgatattcaggacaagttgacaggtcgcgagattgaccgaggcagactggcagagacaatccgcagcaatcaggcaggagaggcgctaacagcacgaggtcagaacatcacgatgcgcggtcaggacttatctgcttctactgcgcgacgaggtcaggatttggcaatgcagcgagagtcaacaagaggaatcgctgggaatgatgagcgtacagttcagttatcagatggcagaactgtaacggtaggcgggaagcttcacggcgctggggctaatgcgttctacgaaggcatcgacaacgaggggaatatggttcgcgttcctgccagttcaatcgcagcgcctgcaacatcgtctgcatcagcacaaaactatgccatgaagaaggatatcgacgcgatcgcaaatgcagacgcttctgctctcgatttcatgacaggaatgacaggcggtgcaggtaacccggcaattggtgctgatgttcgcagccgattaacaggaaaagagcagcgccagttatataactcagcacaacgtattcagggcagaatgcagaatcagggtgtggcggcagcaagggacatgggggctagtggtattaacaccgttgcagaagcgaagatgtattttcaggggatgccgcaggttgattattcaagcccggaggctatgcagcagtcgattcgtgagattcaggaatacaccaacaattacaaccaacaatataacgttaatgttggtaaatctcagcgacagcaatctcaacctgcacaggtatcacagcctgcatccaacagcaacttctcttcactatggggtgattaa

SEQ ID NO: 373542 - DNA, 690 bp, Salmonella enterica
atgttatatgcatttaagctgggcaggaaactgcgcggtgaggaaccttattatcctgaaaaaggcggtaaaggcggctcatcaagcagcggggcaaaagaggccgcaagagcaacacagtacgccgcagacctgcaaaaccaacaattcaatcgtgtgatggaacagttggcaccttacgccgccgcaggtttgccggctctccagcagattcagcagctatcaacgctggaaggccagaacagcgctctcaatcagtattacaactcaggccagtataaacaattggctgatcaggctagctatcaaagccttaatgccgccgaggcgacaggtggacttggctcgactgcgacatcaaaccaactggcggccattgcaccaacgcttgggcaaaactggctttccggacagatgcaaaactatggcaacctgttaaacattggtcagtctgcggcagcaggccaggcatcggcaggacagaactatgcaaataacgcaggtaatcttgcacaacagatggcggctatccgctctcagggttctggtcaatccacgcttggaagtgccattagcggcggtacgagtggtgcgcttgcaggtgctggtattgcaagcctgttaggtacttccacgccatggggcgctggtatcggtgctggtatcggattgcttggctcactcttctaa

SEQ ID NO: 373543 - DNA, 456 bp, Salmonella enterica
atgattacattcattccaacacgcaatatcgacctgatagaaatggtcggcaaccatcccgacatcatcgccgggagcaacaacggtgacggatacgactacaagcctgagtgccgctatttcgaagtgaacgtacatggtcagttcggtggcatcgtgtattacaacgagattcagccgctgacctttgactgccacgccatgtacctgcctgagattcgcggcttcagcaaggaaatcggcctggcgttctggagatatattctcaccaataccaccgttcagtgcgttacatcatttgctgcacgcaaatttcgccacggtcagatgtactgcgcaatgattggccttaagcgtgtgggaaccattaagaaatacttcaaaggcgtagatgacgtgacgttttacagcgccacacgcgaagaactaatcgacttcctgaatcacgggagatag

SEQ ID NO: 373544 - DNA, 639 bp, Salmonella enterica
atggcagacccgtcacttaataagcctgtcgtggttcaggctacacgcattgatgcatctattctccctcgcaacatattcagtcggtcttaccttctgtatgtcataaatcagggtactgatgttggctccattgcagaaaaggcaaatcaggcaggaggaggtgcttatgatgcgcaggtcagaaatgatgagcaggatgtaattcttgatgagcacgaaaaaagaattacaaaaacagaagaggatatttcaggaataaaagtaaagcttcttgaaatagagaatgatgttaatggtctgaaaataaaagttcaggatatcgacggtaaggtatcagatataatcgttgattatgtttcactcagcagaacaggaactcaaactcttgcctcatccattaacgtatcaggaagttattttgttaacggtacaaaagttgttggcgctcgccagactggatggaccgcggcaacaggtacggcgaataaaggcgtattcgatgctgacctgacattcgccgttagcgatacttacacgcaatctgaaatccaggctatagccaatgctctaattactgagcgccggcgcactaaggctttggaagacgccttgcgtgcacatgggttgattgattaa

SEQ ID NO: 373545 - DNA, 1419 bp, Salmonella enterica
atgccgattcagcaacttccgcttatgaaaggtgtcggcaaagactttcgaaatgccgactatatcgactatctgccagtgaatatgctggctacacccaaagaaatcctcaacagcagcggatatcttcgctcattccctggcattgccaaacgttctgatgtgaacggtgtatcgcgcggagtcgagtacaacatggcgcagaatgctgtttatcgcgtgtgtggtggcaagctctacaaaggagaaagtgaagtcggtgatgttgccggaagtggtcgcgtatcaatggcgcatggtcggacatcacaggcggtaggtgttaatggtcaactggtcgagtatcgttatgatggcacggtcaaaaccgtctcaaactggcctgcagacagcggattcactcagtatgagttaggttcagtccgcgacattacacgcttacgtgggcgttatgcgtggtcaaaagacggcacggattcatggtttatcactgaccttgaagacgaatcgcatcctgaccgttacagcgcacaatatcgcgcagaatcgcagccggacggtatcctcggcatcggaacatggcgagacttcatcgtctgctttggttcatcgacgattgaatatttttccctgactggggcaaccaccgttggtgccgctttgtatgtcgcacagccatcactgatggtgcagaaaggcattgccgggacttactgtaaaacgccattcgctgattcgtatgcgttcatcagcaatccggcaacaggcgcgccgtctgtatacatcatcggctccggtcaggtgtcaccaatcgccagcgcgagcattgagaaaatactacgctcctacactgctgatgaactggctgatggcgtgatggagtctctgcgatttgatgcgcatgagttgctgattatccatcttgcgcgccatgttctcgtgtacgacgcatcttcaagctccaatggtccgcaatggtgtgtgctgaaaacaggcctgtatgacgatgtgtaccgcgctatcgacttcatttacgaaggcaatcagataacgtgcggcgataagctggagtccgtgaccgggaaattgcaattcgatatcagcagccagtacgacaagcaacaggaacatctgctgtttactccgctgttcaaagcggataacgccagatgcttcgatctggaagttgaatcctcgacaggcgttgcgcagtacgctgaccgcctgttcctgtctgcaaccacagacggaatcaattacggtcgcgaacagatgattgagcagaatgagccgtttgtgtacgacaagagagttttatggaagcgtgtaggtcgtattcgtcgattaatcggattcaagctgcgggtaatcaccaaatcacctgtaacactatccgggtgtcaaattcgtctggagtaa

SEQ ID NO: 373546 - DNA, 501 bp, Salmonella enterica
atgaacctgacaacgaagggtgatttagttcttgcggcattacgtaagctcggtgtggcatcaaatgccacgttaaccgatgtcgaaccgcagtctatggaagacagcgtcaacgaccttgaaatgatgatggctgaatggcttggcggtgatgcgtcacctggcatcaacgttggctacattttcgctgatgcagatgtcgctccagatccgggcgatgagcacggtttatcaaataacgctatcaatgccgtcattttcaaccttgcctgccgcattgctccggattatgcgctggaagcgcctgcaaaacttataactactgccagatacgggaaagagcgactcgtcaaactgtctgcaatggacagagcaaaagccgctaaatgtaattccggttatccaaaccgtatgcctgttggtagtggtaaccagttggcgaagtggaatggttggaattacttccactggaaggaaccttgcgataacgggagcgaataa

SEQ ID NO: 373547 - DNA, 237 bp, Salmonella enterica
atgacacacatgatctttcgtcatggcgacatgaagaagtggaaaggcgttggatacgactttgaaatcgtgaaagccgaagagattcaggaatatctggatgctggttggtttgcacatcccgatgaccttctgaaggacgttgcagagccagatccagagccagaagaaaagcagcgtaaaaagcctggtcgaaaacctaaggcggcagcagatgaacctgacaacgaagggtga

SEQ ID NO: 373548 - DNA, 1296 bp, Salmonella enterica
atggcattaaatgaaggtcaactggtcacgtatgctctggatgaaatcatcgaaaccgtccagaacctgacgccaatggcgtccaaagtgacaaaatacacccctccggcagaatccatgcaacgttcaagcaacaccgtgtggatgcctgttgagcaggaagcgccaacccagactggctgggatttaactggcaacgcaaccgggattctggaactctccgtgaaatgcaacatgggcgatccggataacgatttcttcgagcttcgtgcagatgacctgcgtgatgagcgttcttaccgtcgacgcatccaggcatccgccaaaaaactggcgaataacattgagtcagcgattgccaaacaggcaactgaaatgggctcgcttgttgttcacgatacccgcgcaattggtccatctactggcctgtctggctgggattttgtgtctgatgcagagcgcctgatgttctcccgtgagttaaaccgcgatatgggcatcagttacttcctgaaccctgacgattaccgcaaagcaggccgcaacctggtagatggtgacatcttcggtcgcgttcctgaagaagcgtatcgcaacggtactattcagcgtcagattgctggctttgatgaaattcttcgctcaccgaaacttccggcagttaccaagtcaaccgctactggtgtaactgtttctggtgcgcagaagtttaagccgcaggcatacacccttgataccgatggtaacaaagagaacgtcgacaaccgtgttgcaacggtgaccgtatccaccaccaccggatttaagcgcggcgacaaaatcagtttcactggtgtgaaattcctgtctcagatggcgaagaacgtgctgactgatgatgctactttctcaatcacccgtgtgatcgatggtactcacatcgaaatcacgccgaaaccgattgcactggatgacgcgtcactgacaaaagaagagaaggcttacgctaacgtaaacacatctcttgctgataccactccggtaaacgttctgaacgtggcaacaaccaccgctaacgtgttctgggctgatgactcaatccgtctgctgtctcagccgatcccggtaacccatgaactgtttgctggtatgaaaacgtcttccttcagcattcctagcattggtgttaacggcatcttcgcaacgcagggtgatatcaacactctgtctggtaagtgccgtattgctgtgtggtattcagcatgtgctgtacgaccagaggcaattggtgttggtctgcctaaccagactgcgtga

SEQ ID NO: 373549 - DNA, 912 bp, Salmonella enterica
atggaccaaaccaccgacattcagtcttctgaagaattaaccctgaccggcaatcatgcagcggcatctgctgatggcttagttgtcgataatgccaacgacaacgcaggtcaggaagaaggcttcgagattgtcctgaaagacgatgagaaaccaaaacaagacccggcaactaatgctgaatttgcccgtcgccgcatcgaacgcaaacgccagcgtgagcttgagcagcagatggaagcggttaagcgtggagagttgccggagcacctgcgggtgaaccctgagttaccaaaacaaccagaccctaacgattatctttccgaagatgcactggctaagtacgactatgaccagagccgcgcactgtttgccttccagcaggcaaacagtgaatggcagatcaaggctatggacgcacgaagccaggctgtcgccgagcagggtcgcaaaactcaggagttcacccagcaatcagcgcaatacgtcgaggctgcccgtaagcactacgatgcagcggaaaagctcaatatccctgactatcaggagaaagaggatgcattcatgcaactggtgccgccagcagtcggtgccgacatcatgtgcctcttcccggagaaatccgccgctctcatgtatcaccttggtgctaatcctgagaaaacacgccagttgctggcgatggacgggcaatccgcgctgattgaactcactcgactgtcagaacgtttaactctcaagcctagagccaagcctgtttcagaagccccgttacctgatgaacccattcagggacacgctgttgctgcaaatatctctgcgattgaaaagcagatggaggcggcagcaaacaaaggggatgtagagacgtaccgcaagctcaaggcgcaactgaataaaggaattcgataa

SEQ ID NO: 373550 - DNA, 2166 bp, Salmonella enterica
atggccgacgaaaacagactcaattccattctgtgcaagtttgacgcggactggatggcgagcgatgaagccagaaccgaggcgacaaatgacctgtattttagccgagtgtcgcaatgggatgactggctatcaaactacaccaccctgcaatatcgcggacaattcgatgttgttcgcccggtggtcaggaaactggtcgcagagatgcgccggaaccctatcgacgttctcttccgaccaaaagacggcgctaatcctgatgctgccgatgtgttgatgggaatgtatcgtaccgatatgcgccataacacggcaaaaattgccgttaacgttggcgttcgtgagcagatagagtccggcgttggtgcatggcgtctggtcacacagtacgaagacaacgatccaacaagcaacaatcaggtaatcagacgcctgccaatccatgaagcctgctcacacgtcatatgggacgccaacagcaagcagatggataagagcgacgctaagcactgcacggtgattaacgctttgtcacgcaatggctggaaagagttcgcagaggattacggtattgatccggacaccttgccatctttccagaatcctaacgatacatggctattcccgtgggtgtcgaatgatgtcgtctacgtcgctgagtattacgaggtagaagagaagaaggagagggtcttcatctaccgcgacccgctgacaggtgagccggtcagctattaccagcaggatatcaaagacgtcatcgacgacctggctaatcgtggattcattaaggtagcagagcgtaaggtgaagcgtcggcgtgtgtataagtcgatcatcacctgcacgcagatactgaaagaccgcgagaagatagccggagagcatattccaatcgttccagtgtatggcgaatggtcattcgctggtgacaaggagtgctacgaaggagtggtaaggctgacgaaagacggtcaacgccttcgtaacatgatcatgtcgttcaacgccgatattgttgctcgttcaccgaagaagaaaccgaccttcttccctgagcaaatcgaaggctacgaatacatgtacggtggaaatgatgactatccgtactatctccagaacaggactgatgaaaacggtaacgacctgccgattggtccaatctcctacatggaaaaccctgaagtgccgcaagccaacgcttacatgcttgaagctgccaccaacgcagtgaaagaagtggctagtcttggtgtggatacgcaggcagcaaactctcaggtcgctttcgataccgtcaatcaactgaacatgcgggcagaccttgagacatacgtgtttcaggataacctggctaccgcaatgcgacgtgatggcgagatttatgcctcaatggtcaacgatatttatgacgttcctcgtcatgtaacgctgacactcgaagatggaagcgagaaagacgttcaactctatgcgcaagttgtcgattaccagtccggcaatgtggtcacactcaacgacattcgtggtcgctatgagtgctatacggacgttgggccatccttccagagcatgaaggaacagaaccgcgcagagattcaggagttactcaccaaggttccgcaaggtactccagagttccagatgctgatgctgcaatacttcacgctgcttgacggtaaaggcgtcgagatgatgcgagagtacgcgaacaagcaactggtgatgatggggctgaagaaaccagaaacacctgaagagatggagatggtacaacaggcgcaacagcagccgcagcagccatcagcagagcaaattcaggcgcagggtatccttctgcaaggtcaggctgaattgctcaaggcagagaaccaacaggcgcagattcaggttgaagccgccaaggttgaagcccaaaaccaactcaacgccgcgaagattgcagaaatcttcaacaatatggacctcgacaagcaggcagaactgcgtgagtacctcaagctcgtaggtcaattccagcaacagcgcagcaaagatgctcgtgctaacgctgagctgcttcttaaagatgcagaccagactcattcacaacgcatggatttcgcgaatcttatgcgtcaagttcaaatcccctccggcggagtagccgagacacctcaataa

SEQ ID NO: 373551 - DNA, 1500 bp, Salmonella enterica
gtggaactggacgcgattcttgataacctgagcgacgaagagcaaatcgaattgctcgagctactcgaagaagaagagaactaccgaaatacacacttgctatatgagtttacgccatacagcaaacagcgtgagttcatcgacgcaggtcatgactatccagagcgatgttttatggctggtaaccagcttggtaagtcatttactggcgctgctgaagtcgcgtttcaccttaccgggcgatacccgggaacgaaaggttatccggctgatggtaaatatggcggagagtggaaaggtaagcgtttctatgagccagttgtcttctggattggcggtgaaacaaacgagactgtaaccaaaacgactcaacgcatcctgtgcgggcgtatcgaagagaatgatgaacctggctatgggtcaatcccgaaagaggacatcattagctggaagaagtctccgttcttccctaatcttgttgatcaccttcttgttaagcaccacacgccagaaggcgtcgaagatggcatctcaatatgctactttaagccttactcacagggccgcgcccgctggcagggcgacacaattcacggcgtctggtttgacgaagagccgccatatagcatctatggcgaaggtcttacccgtacaaacaaatacgggcaattctcaattctgacgtttaccccgctgatggggatgtctgacgttgttaccaagttcctgaagaatcccagtaagtcgcagaaagtggtcaacatgaccatctatgacgctgagcactacaccgacgagcagaaagagcaaatcatcgcatcctatcctgagcatgagagagaggcgcgtgctcgcggtattcctacgatgggtagcggtcgaatattccagataccggaagagacgattaagtgtcagccgttcgagtgtcctgatcacttctacgtaattggcgggatggatttcggatgggatcacccgcaggcgcaggttcagctttggtgggataaggacgcagacacaatctacgtttcacgcgtgtggaaggcgaaagaaaaaacagccgttcaggcgtggggagccgttaaatcatgggcgcataaagtgccaactgcatggcctcatgacggaaaccagcacgagaagggtggcggtgagcagcttaaagggcagtacgcggaagctggttttatgatgttgcaggagcatgcgacatggcctgatggcggtaatgctgttgagcctggcatcactgaattgcgcgacatgatgcttgatggtcgcttcaaagtattcaacacctgtgagccattctttgaggagtttcgcctctatcaccgtgatgaaaacgggaaaatcgtcaagcttaacgacgacgtgctctccgccgttcgctatgcatacatgatgcgccgcttcgccaaaatgatgcgcgacatcaaaaaaccaaaagagaaaaagataccagccccaatcaggcccatcgcacggagaacttaa

SEQ ID NO: 373552 - DNA, 489 bp, Salmonella enterica
atggcagcaccaaagggcaaccgattttgggaggcccgcagtagtcatgggcgaaaccctaaattcgaatcgcctgaggcgctgtgggctgcttgttgtgaatacttcgagtgggtggaagctaacccgctatgggagatgaaggcgttctcgtatcagggtgaagtgatacaagagcctatcgccaagatgcgagcgatgaccattactggcctcactctgttcattgatgtgacgcttgaaacatggcgcacatatcgcctgagagaagatttatctgaagtcgttacgcgagcagagcaaatcatctacgaccaaaaattctccggcgcagccgctgaccttctcaacgctaacatcatcgcccgtgatttgggcctcaaagagcagtcgcaagttgaggacgtgacacctgataagggagatcgcgataagcgccgctctcgtatcaaggagctattcaaccgtggaactggacgcgattcttga

SEQ ID NO: 373553 - DNA, 243 bp, Salmonella enterica
atggcagagattattcccatgactgaagaacagaaattccagttagagatttacaaactggtcatgaaccagaacgcagccgcagaagaagcatttcaattcattggcactgacgagctgaagcttgagctattcaaaattcacttccagtcaggtggcgctaattcagatatcacgacccgcacaatcgaagcggtgcgtaaatcgaaggaagcgttagacctgttcactaccggagcatga

SEQ ID NO: 373554 - DNA, 489 bp, Salmonella enterica
atgaaccaattagaagaaaagcttcaaagaatgatttccttatacaaggaagataactgccaaaaagttcctgaaaacatcgcagagttaatggaattggcaagtgaattttctggcatgcttaagtcgtcaggtgttcggtcagcgttctttgttgaaatgctgatgcacggcggacttatggcaacaatgagacgtgtaatggaagaccagagaaaagaacctcctcaggtatacgttttgtcatcgaagaaaactgggctaaccaaaattgggtattcatccaacattccacaacgcatcaaatcgcttggcaactctggaccagactgtttgaagcttgagtgcctgatccctggtggaagagaaactgaaaacatgcttcatcgcaaatttgccgcaaagagaaagcacggtgaatggttcgccctgtccaaggatgacattgagggattgaaatctgtagagcttacttctgatggctattaa

SEQ ID NO: 373555 - DNA, 438 bp, Salmonella enterica
atgagcagagtcaccgcgattatctccgctctggttatctgcatcatcgtctgcctgtcatgggctgttaatcattaccgtgataacgccattacctacaaagagcagcgcgataaagccacatccatcatcgctgatatgcagaagcgtaagcgtgatgtagcagaacttgacgccagatacacaaaggagcttgctgatgctaatgcgactatcgaaagtctccgtgctgatgtttctgctggtcgtaagcgcctgcaagtcgccgccacctgtgcaaagtcaacgaccggagccagcggcatgggcgatggagaaagcccaagacttacagcagatgctgaactcaattattaccgtctccgaagtggaatcgacaggataaccgcgcaggttaactacctgcaggagtacatcaggactcagtgcctgaaataa

SEQ ID NO: 373556 - DNA, 477 bp, Salmonella enterica
atggtggaaatcaataatcaacgtaaggcgttcctcgatatgctggcgtggtcagagggaactgataacggacgtcagaaaaccagaaatcatggttatgacgtcattgtaggcggagagctattcactgattactccgatcaccctcgcaaacttgtcatgctaaaccccaaactcaaatcaacagccgccggacgctaccagcttctttcccgttggtgggatgcctaccgcaagcagcttggcctgaaagacttctctcccaaaagccaggacgctgtggcactgcagcagattaaggagcgtggcgctttaccgatgattgatcgcggtgatatccgtcaggcaatcgaccgttgcagcaatatctgggcttcactgccgggtgctggttatggtcagttcgagcataaggctgacagcctgattgcaaaattcaaagaagctggcggaacggtcagagagattgaggtatga

SEQ ID NO: 373557 - DNA, 324 bp, Salmonella enterica; identical to SEQ ID NO: 30477

SEQ ID NO: 373558 - DNA, 519 bp, Salmonella enterica
atgagtatacgagaattgaacctcactaaagagcagcatgactggcttaatgggtggcttgagctatggggggcatgggtttattcaggaagactcgaaaaacgcatgagcagcgttatagcgcagtttatggagagggtagaaccatcaagagtgatgacaaggccaatgtgcaatgatgatgacggaatgttgatttctcaggtcgtagattccgttatgtacattgacaagaaagcctttggcatcctcctcagctactacgcacatggttcctctaagcgagcaattgcatcctactatcacgcgactgcaaagccacgcaagatgtgtggacgtggtggcgagggatggagaaaaccttcactggcaacctgtagaaatgaaattgacgacatcctgaaagcatcattatttgttttataccagccaatgcaaaatgctttcaaaatgcgtaaacgtgttgagaaagttaagcatgttgttgttaaaagtcttgacatgcaattatccatttag

SEQ ID NO: 373559 - DNA, 180 bp, Salmonella enterica
atgaccgtaaccagcattaaccaagcgaaaaagcagcgtgaacgtgacgaagctgaattacgcagcgtcagagagatgacggagcaacaccagaaggcgatggattatctgcatgagcgagagcgcgaactggtgaaccggcttggattgaacaagccggcgggaggcgatgctgcatga

SEQ ID NO: 373560 - DNA, 204 bp, Salmonella enterica
atgacacacactgtcaaaaccattccagacatgctcattgagacatacggaaaccagacagaagtagccaggcgcttatcgtgccaccgcaacacagtcaggcgctatctgtacgacaaagaagccaggtatcacgccatcgttaacggcgttttaatgattcatcagggcgggagaggtatttatgaccgtaaccagcattaa

SEQ ID NO: 373561 - DNA, 396 bp, Salmonella enterica
atgaacgaataccgtatagcgttgccgtggcctccatccaataatcgctactggcgtcactcacgaggaatccactacatcagcgattggggaaagcgataccggcgagaagtaatcgaaataattcagcaacaacagctagaccttaaaatcacaccccgcatcagaatcaccattctcgcagcacctcccgataaccgcaaacgcgacctggacaatctaccaaaggccgtttttgacgcactcactagtgcgggcttctggctggatgacggccagatagacgatatgcgcatcaagcgctgtcaggcggttaaaggcggaatgcttgtgctggtagtgactgagacgtgtgggaatttgccaatgattacggaactactggaggccgcatga

SEQ ID NO: 373562 - DNA, 282 bp, Salmonella enterica
atgaggatattcaggagcaataaatggcttcaggcagtaagggagatagattgctgcgttctgtgtggtcgatatggagttcaggctgcgcatcgcaacgaaggaaagggaatagggctaaaggttgacgacagcctaacagcggcgctttgcccgccatgccatgagcgcatagacaacggaaaagatttaagccgggaagagcgacgctcagaaatggaccgcgccattgtcttaacgttgcaaaagttaacacgcgaagggagggtaacagtgcgatga

SEQ ID NO: 373563 - DNA, 177 bp, Salmonella enterica
atgattgaccccaatcgaagttatgaacaagagagcatagcaagggcaatgtgcgcaggatgtaacaagcaactggcacaagatgaaatttacacctgtgctgaatgcgtgaacgaatggctggtataccgcgaccctaatggagatatgtctaatgaggatattcaggagcaataa

SEQ ID NO: 373564 - DNA, 873 bp, Salmonella enterica
atgataaatgtcgttagtttctccggtggcaggacgtcagcatatttgctctggctaatggagcaaaagcgacgggcaggtaaagacgtgcattacgttttcatggatacaggttgtgaacatccaatgacatatcggtttgtcagggaagttgtgaagttctgggatataccgctcaccgtattgcaggttgatatcaacccggagcttggacagccaaatggttatacggtatgggaaccaaaggatattcagacgcgaatgcctgttctgaagccatttatcgatatggtaaagaaatatggcactccatacgtcggcggcgcgttctgtactgacagattaaaactcgttcccttcaccaaatactgtgatgaccatttcgggcgagggaattacaccacgtggattggcatcagagctgatgaaccgaagcggctaaagccaaagcctggaatcagatatcttgctgaactgtcagactttgagaaggaagatatcctcgcatggtggaagcaacaaccattcgatttgcaaataccggaacatctcggtaactgcatattctgcattaaaaaatcaacgcaaaaaatcggacttgcctgcaaagatgaggagggattgcagcgtgtttttaatgaggtcatcacgggatcccatgtgcgtgacggacatcgggaaacgccaaaggagattatgtaccgaggaagaatgtcgctggacggtatcgcgaaaatgtattcagaaaatgattatcaagccctgcatcaggacatggtacgagctaaaagattcgataccggctcttgttctgagtcatgcgaaatatttggagggcagcttgatttcgacttcgggagggaagctgcatga

SEQ ID NO: 373565 - DNA, 441 bp, Salmonella enterica
atgaaaaaactaacctttgaaattcgatctccagcacatcagcaaaacgctattcacgcagtacagcaaatccttccagacccaaccaaaccaatcgtagtaatcattcaggaacgcaaccgcagcttagaccaaaacaggaaactatgggcctgcttaggtgacctctctcgtcaggttgaatggcatgggcgctggctggatgcagaaagctggaagtgtgtgtttaccgcagcattaaagcagcatgacgttgttcctaaccttgccgggaatggctttgtggtaataggccagtcaaccagcaggatgcgtgtaagcgaatttgcggagttattagagcttatacaggcattcggtacagagcgtggcgttaagtggtcagacgaagcgcgactggctctggagtggaaagcgagatggggagacagggctgcatga

SEQ ID NO: 373566 - DNA, 279 bp, Salmonella enterica
atgaacaaccaaataatacctgaaatgcttttgaatccccgcttcattgctgttttgaacagatgtatcgacgaagaagagctcattatgcaatttgaaaggttgtcaggtgtcactcgaccaccaaagaggaagcattcattagagctgatggttgataaagcgacaggattttatgatgagcagtggaaactgttttttgaatcatttatcccgttcgtctatgagtatatatggctcacatggagagaccgtgacaatgaggaatactggcaatga

SEQ ID NO: 373567 - DNA, 1881 bp, Salmonella enterica
atgaggccaagtgaacttagcgacctgctttgggcgcaggttgacagggtggccccgcacctgttgccaaacggcaagaaagaggggcatgagtgggttgccggtaacgtcaacggtgacaaggggaacagccttaaggtcaaccttagcggcaagaaaaaatgggctgatttcgctgagggagacggcggtgacatgcttgatttgtggatggcctgtcggggaataaatctgcatcaggctatgcaggaggcaaaggcatttctcggtatcaaggatgatgatcaccatttcgacgccagacgtgagaagaaattctccagacctgaccgcaagaaaatcgcccattacgttaccagaacagaatcccatcttgagtacctgcaatcgcgtggcatatctccagaagtcgtaaagcggtacgaggttgtcagcggcaaggtgtggaatggagagcgaggactggatgctttggtgcttccgtacaaacgcgatggtgagttgttgcaggtcaagagaatcagcaccgaacgtccggacgggaagaaagtcatcatggcagaaggtgactgtgaaccctgtctgttcggatggcaggctctcgatgctggcgtgagggcggttgtgctttgcgaaggcgaaattgattgcatgagctatgcacaatacggaatcccggcgctatctgtcccgttcggtggcgggaaaggcgctaaacaacagtggattgagtttgaataccataacctagacaggtttgaggaaatattcatttcgatggatgttgatgatgtaggtcgcgaagctgcaagggaaatcgcaagccgactgggtgaacatcgctgtcgtctggttacactgccacacaaagatatcaacgaatgcctgatgaacggcgtcaccgaggatgaaatctggcagtacatcgggacagcgtcatatttcgaccccgaagagctttacagcgcccgtgagttttatcatgacaccatcaatgctttctacggcaagcagcagtatctgtttaacccaccgtgggaaacgctggcttacaacttccagttccgtgaggcggagttaactcttgtcaatggcgtgaacggtcatggaaaaacggaggttgtcgggcatatggcacttgaggccatgagacagggggtaaaaacatgcgtcgcatcgcttgaactgaagcccgggattctgctcaaacgcctgacccggcagtctacatgttgcaaaatgccgccagttctggaaatcgaatcagcatttaagttttacgatgaccggctatggttatttggcctgacaggtacagccaaggctgaacgcctgattgaaattttcacatacgcaagacggcgatacggcatccagttattcatcatcgacagtctcatgaagtgtggtattggcgatgacgattacaacggacaaaaggcgtttgttgacgcgctgtgcgacttcaagaataaaaccaactctcacattatcctcgtcactcactccagaaagggagacagcgaggagaaacctaccggaaagatggacgtaaaaggctcaggggcgattacagacctgacagataacctgtttatcatctggcgcaataaagctcgcgagagagcgttacagcgcgttcatgctggcgagcaaattaacgagaaagaccagcaacttcttgctgcgcccgcatctgttttaatgcttgagaagcagcgaaacggggaagggtgggaaggtggcgtgccgttatttcttgacgagcagtctcaccagttcctgcaaatggaaggtgcgtcaccatacaactacatagctaacatgccgaagtcggagtatgacgaagtgtggaggcaggagaatgttacggagtactga

SEQ ID NO: 373568 - DNA, 849 bp, Salmonella enterica
atgggcgtcgttaagttagcagactacagaccgttagaaccggtcgtggagcgtaatgtggcagatctcgatgatggttacgccagactatcaaatatgctgcttgaggcttattcaggtgcagatctgaccaagcgacattttaaagtgctgcttgccattctgcgtaaaacctatgggtggaataaaccaatggacagaatcaccgattctcaacttagcgagattacaaagttacccgtcaaacggtgcaatgaggccaagttagaactcgtcagaatgaatattatcaagcagcaaggcggcatgtttggaccaaataaaaacatctcagaatggcgcatccctcaaaatgagggaatatccctcaaaacaggggataaaacatccctcaatttgagggagtgttatccctcaaaacagggggacacaaaagacactattcaaaagaaagaaatacaagataaaaacattatgtccgaaagcgttcggacggagtgtgaaaaatcatctggccgtcacgaagaaaccgataaggcattcgaggaaatattctggtgtgccggtatgcggaaagccgggaagaaaaacgcagcttcggcattcagaacacagttcagggagtggcgtaaaactaccagggggacggcaatcgagtttgccacgatgctggcagaagacatcgcatgcaggaatggtaagcagtttggattcgacaggttgttaccatcaagctacctgaacggtcagcgctggaacgacgaaaagccagaaacaattcaaccacaatccaaatcatcatccgcaatcaccgtatcgaaaactggctacgtgtttttcgacaggtga

SEQ ID NO: 373569 - DNA, 162 bp, Salmonella enterica
atgacaaaacgtagtaagaaataccaggaaaaagaagagattcgacatcctgattcacctgagggattagtggtagccgcagcaaataacagggcgttcgcagagcgccttgttggtgtttacagactagccaaagcaggagtgaaacatgggcgtcgttaa

SEQ ID NO: 373570 - DNA, 291 bp, Salmonella enterica
atggaactcacaaatcacagcaaaaagatacgcgaagtggaaacagagcttcgcgcccggctcgtatcaatgggtcagacaaatttcgcaaagatggcgggatggtctgattcaaaagtaagccgcctgaacattcaggatatggcggtgacgttcgttcttctggagaaggtatgggagacgagcttaatcagggaagtggcaaggcaagcggtggaagctgtgatgccgagaaataaaaaacgcccggcggcaaccgagcgttctgaccaaatccagatggatttctaa

SEQ ID NO: 373571 - DNA, 216 bp, Salmonella enterica
atggaaaccatttcacaacgcctcaaacagaagcgtacagaattgaaaatgactcaggctcagttggctgaaaaggctgggatgaaacagcaatcaatccaacagattgagtctggtgaaacaaaacgtccgcgcttcctgcttgagctagctacagctctccagtgtgatccaagctggttgctgtatggcaagaaaagaaacaaagcagcttag

SEQ ID NO: 373572 - DNA, 633 bp, Salmonella enterica
atgagccttgcagaacgagtaaaacaaagaagaattgagcttggattgacgcagactgaagcagcagatagagctggaatcagacaacagtcatgggcaagcatagaggatggaaaaactcagaagccccggaatatcgtggggatagctagcgtccttaactgtgacccgtcatggttattgaatgggggtcatttccagccagtttctgaagtgaattcaaggaggatacctttgattagctatgttcaagcaggtgctctagcatgtaaaagccccattgaggcttttgatgggagttttgaatatgtcatgacagacatggattgctctcaattcacctttgctctaaaaataattggcgactctatggagccagaatttaaagctggcgacgtcatagttatcgatcccgagattgagcccatgcccggcgagttcgttgtcgccaagaatggagagcatgaggcaacattcaagaaatacaggcctatagcatcctcactaggaagcgattccacatttgagctagttcccctcaattcagattacccgaccataaacaacatcggtagagacataaaaatcataggaactatggtcgagcacagaatctatcgaagaaaaagataa

SEQ ID NO: 373573 - DNA, 303 bp, Salmonella enterica
atgacggttatcgtgtacgggaagtcaacgtttgcaggcaatgctaaaactcgccgtcgtgagcggcgcaggaagctcgcaatggagcgcgacaccatctgcaatatcatcgattcaatttttggctgcgatgctcctgatgcttctcatgaggttaaagctaaaagaattgaccgcgttaccaaagccatttcgcttgccggaacacgtcagaaggaagttgaaggaggatctgtacttcttccagacgtagcactttacgcggctggtcatcgtaagtgtgggcaaattaccgctagataa

SEQ ID NO: 373574 - DNA, 222 bp, Salmonella enterica
atgaccaaagaaattgtgacattcaagggatttaacaaaaacctaaagtgccgtgactttcagtttgaaattggcaagaccttccatcacgatggaaaagtggaggcttgcggttctggattccacgcctgtgaatgtcctttcgatgttttcagttattactctcctgcagacagccgctttgcagaaaccatctccttcggtattactgaccgcgaataa

SEQ ID NO: 373575 - DNA, 201 bp, Salmonella enterica
atgggcagaaaatttaaagtttggctagattcaggcgcaaatattcattcctgctataagcaggaaattgacattgaagaggatcttggtatctctgatgatgaatgggactcatacagtgaaggggataaggatgaaattatgaaggatgttgcatgggaaagaatggattgggggtttgaagagatagaaagcgaataa

SEQ ID NO: 373576 - DNA, 507 bp, Salmonella enterica
atggctagtagaggagtaaataaggtgatcatcttaggccgggtcggacaagacccggaggttcgttattcaccatcagggacggcgttcgctaacctgacagtcgctacatcagagcagtggcgagataaacagactggcgaacaaaaggagcagactgaatggcatcgtattgccgtggtagggaaactggctgaggtcgtagggcagtatgtgaaaaaaggtgatcaggtttatttcgaaggaatgttgaaaaccagaaagtggcaagaccagtcagggcaagaccgttacaccacagaggttcacgtaggcattaatggcgtgatgcagatgctcggcggaactggtgaaagcaaacagcaagctgccagtaggcaaacacagaaaccacagcagcaatcagcacctgcgcaacacaacgaacagcctatgaacttcgacgatgacataccctttgcgcctgtaactctccccttccctcgtcacgctattcacgcaatttaa

SEQ ID NO: 373577 - DNA, 549 bp, Salmonella enterica
atgaatcatttaatggttgaccttgaaacaatgggcaacgggccatacgcacccgttatttcgattggggcagtattctttgatctgaaaactggagaaacaggagaaaacttctcggttaatatctcgctcgagtcatcaatgcgataccgggcgcgtcctgatgcttcaaccattttatggtggatggaacagggagaagatgccagaaaatcgctaaccaatggcactcaagagctttcaacggctctttcatggttatcagactttatcgcaaagcacgccaaccctaaattcgttcaggtttggggaaatggcgcatcatttgactgtgtgattctacgaaatagttatgcgctgaccgggcaacaagcaccgtggcagtggtggaatgaccgcgacgtccgaaccatcgttgagcttggaaaggagatcttattcgaccctaagcgagatatgccattcgaaggaactcgccacaacgcgcttgatgatgccattcatcaggccaaatacgtttcagccatctggcaaaagctaactaaataa

SEQ ID NO: 373578 - DNA, 294 bp, Salmonella enterica
atgtcatcacctctcaatggggcgatctcgccatatcgcctttcaggctgcaccaaagatgaggtgctggctaatttcgcaaggtattacgaaaagaaagacgaaattccaatggaatcaaaggatgaaagattctcacggtatgcagacgaatataaagacagattaatgaaagagcgcatttaccagacatccatccgaccattccgcaaagcaacttacaccaaattcattgaaatcgacacgcgccttcgtgattaccgttcgcgttacggcgctatcagcaataactga

SEQ ID NO: 373579 - DNA, 177 bp, Salmonella enterica
atgagaggtttgtcctacgcccccggaatccttccatcggaaatgattattcgccaacgcgtaaagccaatgccatcgagagaggaatttcttaagagaaatagtttcggttctgttaacgacaacagatatcttgaaatgattttgaggagtaagaaggattatgtcaaaaaatga

SEQ ID NO: 373580 - DNA, 627 bp, Salmonella enterica
atgtcaaaaaatgacatttcatatgaatacctcattaacaacattcactacgataaagaaactgggattttcaagaagataattaaatccaataatggggatataattggtttcaaaccaactggctgtacgcactcgatgggatacataaggatatatattaataaaaaatggtatttagcgcacagactagcttggttatatgttaccgggaaatggccagtaaatgtaattgatcacatcaacagaaataaagctgacaacaggtttataaacctacgagatgtctccagtagggaaaacaatagcaacacaagtagaaataaaggaactgaaataggcacagaaaggtatgcttatggatggagagcatacataggtgttaatggaaaactacatcaccttggctcatatgcaacatgtgatggtgcaaaatatgcgtatgctctagcagaatatcaagtagaaatatatggttacctgcgccccacaccaatcgattgcagaaaattaaattacggaaacagggggaatcgtaatggaaatcctaaatcaaaccgtcgtaagcatccatcagtgaatgaaaacaaatatatgaatgcaatgttgcggagtgggaagaaatga

SEQ ID NO: 373581 - DNA, 378 bp, Salmonella enterica
atgaaagaagtgaaaatatacacgattgtcagtgaccagttatcaccaccaataacaggagaatcattctgtactgatatggtgcgtcatagtgattatgcggaacttgaggctaaatacgcggagctggcagaagtgcgggaaagtgctcgtaacgagggcatcaactatgccgccagtcgcctcgctgccgcattcaatcacggattcctcgataaacctgtatcagaagttctcgacgtaacacgcatgattttgtcagcgaaagaggatttagccaatgacccactaccaacggctgatggtttgtcaggtgaatacgcagagaaatcgattgaggaatggaaaacccaactgcgcaaaggcggtgcagcatga

SEQ ID NO: 373582 - DNA, 234 bp, Salmonella enterica
atgagcaatccattttttatcaaatgcctcaaagatacagaaggatggtggactgaaggcgagatttacgaagctcgcagggttgccggtggttttgtacagtttggtgatgataaccaaccaaatggcgaaggctggagtgcggagccgatggaatatcgggaggatggttcgatcctgtatcaggtcggtggtcttgatggtgaagtcatttttgaggaggcagctcaatga

SEQ ID NO: 373583 - DNA, 636 bp, Salmonella enterica
atgtcagaccagagcaagtattacgattactacatggttgaaggtgatgatgttaaggaacttatcagttcatacgataccattaacgaacaacgtaattctatcctcccagccgcagcagaacaggttggtgctatagcatggacaacaactcgtaattggggtggtggaggtggcttgctgcaaagtttcgtttgggaaaaaggatatgaattcccatgccagataacaatcaagcgtgaggattttttggatgggaagcgagttgtgatagtacgaggaaagggaaatacaaaagaaggccgtgcatataacaaggagcttgatgcagttatccacgaagctaacgtcaagctaaaagcattacctgagtggaatgactacatcgctaatcattacgggattatgcgcacaggaattggctgtcaatctgggcgtggctttggtttcgctatgttatcaacgtacggcggcaagcacccgcaacgcgatgattgtcttatttttgcaataccaaataacaaagaagagcagcatggcgaagttgttatccctgatgcattcaagaaaataacttacgggcaattctacgacatcgctaacgcaaaagaagacgaagaagaaacagcggagtaa

SEQ ID NO: 373584 - DNA, 1164 bp, Salmonella enterica
atgtcactattccgcagaggtgaaacctggtacgccagtttcacattgccgaacggcaaaagatttaagcagtctcttgggacaaaggacaaaaggcaggccacagagcttcatgataagctgaaggcagaagcatggagggtaagtaaattaggagagacgcctgacatgacttttgaggatgcctgtgtcaggtggttagaggagaaggcgcataagaagtcgctggatgatgacaagagtcggataggattctggatccagcattttgcagggatgcagttgaaggatattaccgagacgaagatttactccgccatccagaagatgactaatcggcggcatgaggaaaactggaagctaatggatgaagcttgcaggaagaaggggaggcagcctccggtattcaagcctaagccggcagcagtagccacaaaagcaactcacctttcattcattaaggcactcctccgggctgctgaacgcgaatggaagatgctcgataaggctccgatcatcaaaattcctcagccgaaaaataagcgtatccgctggcttgagcctcacgaggcaaaaaggctgattgatgaatgcccggaaccgctaaagtcagtcgtagagtttgcgctttctactggcttaaggcggtctaacattatcaatctggagtggcagcagatagacatgcaacgaaaggtggcatggatacacccggagcaaagcaagtccaatcaggccattggcgtggcgctgaatgatactgcttgccgggtgctgaaaaagcaaataggcaatcatcacaaatgggtgttcgtctacaaggaaagcagcaccaagccagacggaactaaatcacctgtagtgaggaagatgcgctatgacgctaatactgcatggagggcagcattaaaacgagcgggcattgaagacttccgttttcatgacctgaggcacacgtgggcaagttggttagttcaggctggcgttccgatttcggtattgcaggaaatgggtggctgggagtctatcgaaatggttcgccgatatgctcatctggcaccaaatcacctgactgaacatgctcgacaaattgactcgatctttggtacttctgtcccaaatatgtcccacagtaaaaataaggaaggcacgaataatacgtaa

SEQ ID NO: 373585 - DNA, 1065 bp, Salmonella enterica
atgacagcccattggtcagcaattattaatttcatccgaaaatatgtttatccagcaaggatgattgtaatcctgttgatggctggcgctacactgccacaaattgctgacgcgacgattaccgattgggcaagcactgtcaacctgaattacgacatgagcaataaaccggttatcgctcacgtctggaaagaacagaacgcaaattggctttatggcggatgggtatgcaggtccgaccgtgatgaaaacgagggggcgtgtgacgagacaaaactaccaccgggtatgctgtatggggttacaaaaattcgtctgcgtttcagggaacaaatcagccatgctgaaaccacgcttatactggacggtcagtctggtggattttgtctctccactaaaattagtggggggtcggtatgtaaatatctaatgcaaaacctgtctgtcaacattccttcaaaagagtttgcgaagataccaaaaactggcatatggaaggctacgttggccctggatgtgattagcaggcatacctggagtaaagttggagcctggactgcagatatcacgttgaccgttacagaccactttgctgaaaatgcggctatttactttccgcaatttggtacagcaacgcctcgtgttgacctgaatcttcaccggatgaatgcctcacaaatgtcgggcagggctaatctggatatgtgtctgtatgacggaggtgtgaaagcccgttcattacagatgaagatagaaggaagcaataagtcaggtacgggatttcaggttataaagagcgattctgctgatacgattgattatgtggtcagtatgaattatgggggacgaagtattcctgtcacccgtggtgtggagttcagcctggataacgtggataaagcagcaacgcgtccggtggtacttcccgggcaacggcaggcggtacgttgtgtgccagtgccccttaccctgacaacacaaccctttaacatcagggagaagcgttctggtgagtatcagggaacgctgacagtgacaatgctgatgggaacacaaaccccctga

SEQ ID NO: 373586 - DNA, 168 bp, Salmonella enterica
gtgcgtaaagcccgtattactgcgcaccagatcatcgctgtgattagatcagttgaatccggacggactgttaaagatgtctaccgggaggccggtatttctgaagccaccagggacaactggaagtctggatacggcggcatggaagcttctgatattaaatcttga

SEQ ID NO: 373587 - DNA, 501 bp, Salmonella enterica
atgaaaagcataaaaaaattgattatcgcaagtgcgttgagcatgatggctgctagttgttatgctggctcatttttgccgaactcagagcaacaaaaatcagtggatattgtgttttcctctcctcaagatttaaccgtatcgcttattccagtgtcgggcttaaaggctgggaaaaatgctcctagcgcgaaaattgcgaagcttgtagttaattctactactcttaaagaattcggggtcagggggattgctaacaacgtggtagaccgtactggcactgcatggcgtgtagctggtaaaaatactggtaaagagatcggtgtgggcttatcaagtgacagtattagaagatctgatagcacggaaaaatggaatggggcggagtggatgacctttaatagcgatgacacacttgatattgtcctgacaggaccggcgcagaatgtcacagctgacacgtacccaataactttagacgtagtgggatatcaaccttaa

SEQ ID NO: 373588 - DNA, 309 bp, Salmonella enterica
atgaatagaaaaaatcgttgtgttcttgagattgataaagaattaactccgttcttatttaatgcaattatagcaattaaaaatagtgagcggagtaaattatacgatgtggaaaatttttatttaattttcaatcctattatccgtaaaatagaaaatgtagagttctatactattacatttttatcagaggaaattactcaagataactggatggatataggttctggtggtattgaggttaaagagataaatgttaacataaacgtaaagactaaagaagtcatctctatatatggtggtcgttag

SEQ ID NO: 373589 - DNA, 3870 bp, Salmonella enterica
atgcaaaaatttctcagtctgcttttttcccggcgcgcgctggcgattgtgggcgttctgattctggcgctgctggtctggtttgtcgggccgctggtgtcatttgataccctgcgcccactggcctccgtgggtagccgggtagtgaccattgccctgttgctgatgctgctggtactgtggctggtcaactggtcgatgagtatcatcggcatcagtgtcctgtgcctggcgattggcttcgtcacaccgctgctggccttgggcgatgtccatccgtttgcgccgctgtgggtccgcctgacattaattggtttcatcctgttggtgtatgcgctgtacggcctgtaccggctgtggcgtgcgctgcgtatggatgaacaactgctgcgtcgcttcctgcatccgcgcggggaagaggtaccggtggcaggcgagatcaaagccgacctgcgcaccgtcaaccatattgtcacgcaggccatccggcaactgcggcagttgcgggtggacatgcccggctggcgtaaaatcttcgagggaaaacgctttctgtatgagctgccgtggttcatggtggtcggcagtcccggtgacggaaaaaccacggccctgctgaacaccggattgcagttcccgctggcggagcaaatggagcagacctcgcgtatcctgacagtgccgggtggcggcacgctacactgcgactggtggtttaccaacgaagcggtgttgattgataccgccggacgctacgcccgccacgatgacggtggtgaagcgagcgccgcgcagcgtaacgccggagagtggcagggctttctcggtctgctgcgtaaacatcgccccggcgcgccgtttaacggcgtgatcctgacgctaaacgtggcggatttaaccgcacagtcaccggcggaacgcctggcggcctgcgccgctctgcgggcgcgactggcagaactgcgcgagaccctggggattcgctttccggtctatctggtggtcaccaaaatggatttgttgccggggttcagcgagtattttcgcacgctgaccagccatcttcgcgcacaaatctggggcttcacgttgccgtacagccgcaggcgaaaagcgggcgacccgcaggcgctgcacgccgcctgcgcgcaggagctggcgcgcctgacgctgcggctggatcagggactggatacccggttacaggaagagtacgaccttaaaagccgccagcggctgtataccttcccgcgtgagttcgccgccctcggcgagccgttgctggaggctattgaacagatcttcctcgattcaaaattcgatgccacgcaactgaataacacgctgcgcggggtgtttttcaccagtgccgcgcaggcgcaggccgacgccgtggccgaccagttgagtatctggcagcgctttgtccgggcgataaaaaccgcccgtggcgaatcatccgcctctctcccacacgctctgccggacggcaaccgcagctactttctgcatgatctgctaacacagtttattttccgtgaagcgcacctggtggagccaaacctccagtgggcctggcgttaccgcctgctgcgcctcggcgggcacctgctggtactggtgctggcattcctgttgtggcaggggatgcagaccagccagcagaccaacggcgactatctgaatgaaatcagcgcccgcgcgacccggctggacggcgaggtgaaagcctacaccggtaaaccggcgatggctcccgtcccggcactgctggacagcgcaagggaactgtccgcctggccggaactggacccggacgcgccgccgctgacctggcgctacggcctgtacagcgtaccgccggtaaccgacagtgtggcgtcgctgtacaaccgtctgctggatcaactgctgctaccgccgctggtgaaacggatggagtatgtgctggcggatgccattgcccgtcaggacagtaaagctgcctacgatgccctgcgcatctatctgctgctgaatctggataaagatcacgaagataaatacaacgcggcggagatccagtcgtgggtgattaacgatctggggaacagcgacagcgtggccgggttcggcgggcgcgccgccgtgctgacgcatatcgaagcgctgtttgacggcagccgggtggtgcattcaccgtatgagaaagatgaggcgctgatccgccaggcgcgggcattcctcgacggtcacaccagtaccgagcgtatctacgcgcgggcgctggcggcaatggagagcgaagcgccgcaggagttcacgctggtacgcgccgtcggcgcggatgcgggaacggtgtttgtgcgtagcaacggcgcgccgctggatcggggcgtgccgggtatttttacccgtgaaggttaccgggagctgttcgacaaacgattaccggaatttgtggcggcggcgacggcgaacgatggctgggtgatgggccgggagagtacgccaaaaaagctgactgacagcctgcgcagccagataccggggcaggagcagtctgtcgcccgcgaagtccgccgtttgtacctgacagaatatgcccgccgctggcaggattttctggacagtatccatagtatcaacagtgccggggaagagggcagttccggcctggcctatgatttacaggtgctgcgcaccctggcgtcgccggactcaccgctgatgcggctgggaaaagcggtggtggagcagaccacgctggtgccgccgccggacccgcaggccagacagaaacaactggcgcagcgcgcatccggtaacgcggggaaagtggtacagacggcaaaactgttccaggatattcacccggaagaacggctggaaaaaacgctggtggatgaccgtttcgccgcgctgcgcgaggtcattgccgggcggactgacggcggacagagcggcggtgggacgatgcagatcgcttcgctgctgaccatgctcaacgagtattacacccaactgaccattgctgatagcgcgctggcggcggggacgttgccagcgcgcattactgccgcagacaagttgcaactggaggcggcgaaactgcctgcgccgctgaaaaacatcctgctggatctgacgaagcagggaacgcgcaaaatcaacgccgggaccggcgatgtgctgaacacccagatggaggcgatgatgggcgacgactgccgtgacgccatcgacgggcgttatccgttcgccgacagcccgcaggaggtcagcgccgaggactttaaccgcatcttcgccagcggcggcgtactggatgctttctggagcaaacaactggctccgctggcggacaccgccagcgacccgtggcgctacaaaccgaccgaaggcaacatgacattgcaggggccggatttaacgccgtttcagcaggcgaagcagatccgcagcgtgttttttaacagcgagggcgggaaaaaattttcctggtcgatgcagattagcgtggtggatatggacccggccatcacggaactggtgattgatatcgacggtcaggtgctgcgctacgcccatggtccggaccggcccctgaaagtgacgtggccgggaccgcgcaacggctcgatggcggaaagcaccgccagcccgcgtattcgccaggacacctcaacgctactgaccagcgggccgtgggcgctgtttcatctgctggacgccggaatggtacaggaaacggcggtgcgggggcgtcaactggtggaatatggttttgacggtcgccgggtggtgctggaaatcaccgccgggcgggattttaccccggtcagccgggagctgttgcagaacttcagttgtccggcgagggcgttgtaa

SEQ ID NO: 373590 - DNA, 387 bp, Salmonella enterica
atggcatatatttacggtttggttgattcgttgcaagggaaagatcaggtcggtgatggggagtgtgtgactttagtcaagcaatatgcacatttgggggttacaggaacctggaagcaagggcgaaaggtttttggggataagtcgatccccagggggacagcaatcgcaacttttgttaatggtaaatacccaactggtgacgctgtgcataaacatgcggctttctatcttgaacaggattctaactatatttatgttatggatcagtggaaaaagaagaaaaaaatctcgtcccgctcactttctcgtaaaggtgggatacgtagtgatggcacatatccggatgccagtaacaatgccgaagctttttatattattgagtag

SEQ ID NO: 373591 - DNA, 1332 bp, Salmonella enterica
atggcaaacagtaatatgcaggcaaccgacgcggttgctcaggataccgtctccgcatccggtgaatttgatgcgttgctgaatcaggccttccgacccaagactacccaggcggcaaaagccgtggaagccgcggtgcagacgctggcgcaacaggcgttggcgaacacgatcaccgtcagcgatgacgcctataaaagcatcagcgctattattgcgcagatcgactttaaactgaccgaacagatcaaactgatcctgcaacatcccgactggcagaagctggaatcctcctggcgcggtatggagcatctggtttacaacaccgagaccgacgaaaagctgaaaattcgcttcatgaatctgtcaaaagatgaattgcggcgcaacatgaagcgtgacaagggcatcgcctgggatcaaagcccgatgttcaagaaactgtatgaagccgaatacggccagttaggtggcgaaccttatggctgtatcattgcggattactacttcgaccatacaccgcccgatgtggatctgcttggctctatcgccaaagtcgccgcgtcggcccatgcgccgtttattgccggggcttccccctcggtactgcaaatggactcctggcaggagctggcgaatccccgcgacctgaccaaaatcgtcacccagaacctggaatatgcgccgtggaactcgctgcgggctagcgaagacttccgttatattggcctgacgatgccgcgttttcttgcccgcctgccgtatggcgcaaaaaccaacccggtggacgagtttgattttgaagaagatgcggatggttctgaccataccaaatacgtctggagcaacgcggcctacgcgatgggcgtaaacatcaaccgttccttcaaacactacggctggtgtacgttgattcgcggtgtggaatcaggcggtgcggtggaaaatcttccctgccataccttcccgactgacgatggcggcgtggacatgaaatgcccgaccgaaatcgccatctctgaccgccgcgaggctgaactggcgaaaaacggttttatcccgttgatccaccgtaaaaactcagactatgccgcctttatcggcgcacaatcgctgcaaaaaccacaggaatactacgatccggacgcgacggccaacgccaacctgtccgcccgtctgccgtacctgttcgcctgctcgcgcttcgctcacttcctcaaatgtatcgtccgcgacaaaatcggttcctttaaagagcgtgaggatatgcagcgctggctaaatgaatggattatgaattacgtcgacgccgatccggtgaactcctcgtaa

SEQ ID NO: 373592 - DNA, 927 bp, Salmonella enterica
gtgctggaactgcctgcccgactggcgcaacgcgttaccgggcaagacggcgcgctggcgcagattggtgaacgtattcagaccgccagggcgggactgggcgatccacgcaaaccggtgggcgtgtttatgctggccgggccgtccggtgtcggtaaaaccgaaaccgcgctggcgctggcggaggctatctacggcggtgagcagaacctggtaaccatcaatatgagcgagttccaggaggcgcacaccgtttccacgctgaaaggcgcgccccccggctatgtgggctatggcgagggtggtgtgctgacggaagcagtgcgtcgccacccctggagtgtagtgctgctcgacgagatcgaaaaagcgcaccatgacgtccacaaactcttctatcaggtgtttgacaagggtgggatggaggacggcgagggtacacatgtcgatttcaaaaacaccacgctattactcaccaccaacgtgggttccgacctcatcagccagatgtgtgaagatccggctttaatgcccgacgctacggggcttaaagaggcgctaatgccggaattacgcaagcatttcccggcggcatttctgggccgcgtgacggtgatcccttacctgccgctggacgaaacgtcgcgtggcgtgattgcccatctgcaccttgaccggctggtggcgcggatgagtgaacagcacggcgtgacgctgacgtatagcgaggaactggtcgcacatattgtggcgtgctgtccaatgcatgaaacgggcgcgcggttgctgattggctacatcgaacagcacatcctgccgcaactgtcgcgctactggttgcaggccatgacggaaaaagccgctatcaggcaaattgatatcggcgttaatggtgatgagcagattgtttttgagatcgtttgctga

SEQ ID NO: 373593 - DNA, 903 bp, Salmonella enterica
atgaaacaagacatgtgggaattacggaaaatacagtcgcagggtataacggataacgcacagtatcccgcagggacatacatcgtatttactgccgccgccccctacattccgctttttgagcaacatgggaaagacgatatcgcgctcagtcttgttcgccacgaagaggcgtggtggattgttaatcactctgatgaactgtgctgtgccgtcaatgagcaggtgatggaacctcatcaccgtatgcggctgaatgatggagatacgattgaatggggtctgtcatcctggtgccttgcccgcaccaatgatgagtcccgtcccgatgtttcgtttcctcagttggttcagtcatctgaatccgttgctgagtacctggatctggactggtttaaacaacaacagctcaatccgcagaacccgttcgatattattcccgtccgggaaaccgcatcctcttacaccggccatgaagcggatagcacgctacaccagctttaccaggaatatcagcaggcattgcggccctccgggcaggaaaagcccctccgtgataaaccatttccccgaaatgaagacgctgtcacccaggatttgacgtcgttatacgataaaaagggcgacaccgacacgttacaggatatggtggcaggcgcgcccggtattgatgccattctggatacgctggacacgaccggtgagggtgaaatgcactggctggcgatggaatcaatgcccgatatcctgcaactgctctcgccggaacaggcggggaaaaccgcacatagcgagatactgcccgatctgacccgccgcgagcatcgtattattggcatcgacagccactaccgaatcactccgacacagaaaaatggaaataccgcccatgaaaaaaactga

SEQ ID NO: 373594 - DNA, 1098 bp, Salmonella enterica
atgaagggtaaaacgttattggcaggatgtatcgccctgtcattaagccatatggcattcgcagaggacattaaagtcgcggttgtcggcgcgatgtccggtccggtggcgcagtatggcgaccaggaatttaccggtgcggagcaggcaattgccgatatcaatgcgaaaggcggtattaaaggcgataagctcgtcgcggtgaaatatgacgacgcctgcgacccgaaacaggcggtagctgtcgctaacaaagtggtgaacgacggcatcaagtatgttatcggacacttatgctcctcttccacacagccagcctctgatatctacgaagacgaaggtatcctgatgataaccccggcggcgaccgcgccggagctgaccgcgcgcggctataagctggttttgcgcaccaccggtctggactctgaccaggggccaacggcggcaaagtatattctggagaaggtaaaaccgcagcgcatcgcgattatccacgataagcagcagtacggcgaagggctggcgcgcgcggtgcaggacggtctgaagaaaggcggcgttaacgtcgtattctttgacggcatcaccgccggcgaaaaagatttctccactctggtagcgcgtctgaaaaaagagaatatcgactttgtctactacggcggttatcacccggaaatggggcagatcctgcgccagtcccgcgccgcagggctgaaaacccagtttatggggccggaaggggtggcgaacgtgtcgctgtctaatatcgccggagagtcagcggaaggcttactggtcaccaaaccgaagaactacgaccaggtcccggcgaacaaaccgattgtggatgctatcaaagccaagaaacaagatcctagcggcgcattcgtgtggaccacctacgccgcgctgcaatcgttgcaggcgggtctgaaccagtctgacgatccggcggaaattgccaaatacctgaaaggcgccacggtcgacaccgtaatgggaccgctgtcgtgggatgagaaaggcgatctgaaaggatttgagttcggcgtgtttgactggcatgcgaatggtacggcgacagacgctaagtga

SEQ ID NO: 373595 - DNA, 270 bp, Salmonella enterica
atgtcagccctaaaaaaacagcgtatcgatctgcggctcacagacggcgataaaagcatgattgaagaagcggccgccattactaatcaatcaatcacgcaatttatgttgaatagcgcagcggagcgagccgcagaagtgcttgaacagcaccgtcgggttattcttaatgaagcatcctgggcgcgagtcatggatgcgcttagtcatcctcccacccccaatgagaaattaaaacgcgcggcgcaacgtctacaagacatggagtga

SEQ ID NO: 373596 - DNA, 519 bp, Salmonella enterica
gtggacaacctgacaatagagattctggctgataacgcagaatacaactggcggcagttcgactgcggtgaggcatcattaaacctttttttaacgcagcatcttcagcgccagcataacaacaaaatcttgcgcggttatgtactcagaaccactacgccagaacggcgagtgttggggtattacaccctgtcaggaagctgctttgaacgcgcgtcgttgccttccagaacccagcaaaagcgcatcccttaccagaatatccccagcgttacgctgggccgtttagcggtcgatctctcattacagggaaaagggtggggagccatattggtcacgcatgcgatgaaagtggtgtggtcggcatcactggccgttgggattcatggcatctttgtggaagcgttaaacgaaaaagcccaggccttttatcagaggctgggctttatttctttatccggagaaaacgagcacgcgctgttttacccgacaaaatcgattgagcaactttttggctag

SEQ ID NO: 373597 - DNA, 927 bp, Salmonella enterica
atgtccgagcagtttctctatttcttgcagcagatgtttaacggcgtcacgctggggagcacctacgcgctgattgctatcggttatacgatggtgtacggcattatcggcatgatcaacttcgctcatggcgaggtgtatatgatcggcagctacgtctcttttatgatcatcgccgcgctaatgatgatgggaatagacaccagttggctcctggtggccgccggatttatcggcgcgattattattgccagcgcctacggctggagtatcgagcgagtcgcttaccggcctgtgcgcaactccaagcgcctgatcgccctgatttccgccatcgggatgtccatctttctgcaaaactacgtcagcctgacggaaggttcgcgcgacgtggcgttacccagcctgtttaacggccagtggattgtgggcagcagcgaaaactttgccgcgtccatcaccaccatgcaggcggttatctggatagtcacctttctggctatgctggcgctcaccattttcattcgctactcccggatgggccgcgcctgccgcgcctgcgcggaggatctgaaaatggccagcctgctcggcattaataccgaccgcgtcattgcgctaacgtttgttatcggcgcggcaatggcggcagtggcgggcgtactgctcggtcagttctatggcgtaattaacccctacatcggttttatggccgggatgaaagcgttcaccgcagcggtactgggcggtataggcagcattccgggcgcgatgatcggcggtctgattttgggcgtcgccgaagcgctctcgtctgcatatttaagtaccgaatataaagatgtcgtgtcgttcgcactgctgattctggtactgctggtgatgccgaccggtatcctggggcgtccggaggtagagaaagtatga

SEQ ID NO: 373598 - DNA, 759 bp, Salmonella enterica
atgaaacaaacacaacggcatgacgcgatcattgaactggtgaaaaaacaggggtacgtcagtacggaagagctggtggagcatttttctgtcagcccgcaaaccattcgtcgggatcttaacgatctggcggaacagaatatgattttgcgccaccacggcggcgcggcgttgccctccagctcggtgaacatgccgtggcacgatcgtaaggcgacgcaaacggaagaaaaagagcgcatcgctcgcaaagtcgcggcccagatccccaatggctcaacgctgtttattgatatcggcacgacgccggaagccgtagcgcacgccctgttagggcacagtaatttgcggatcgtgaccaacaatttgaacgtagcgaacacgctaatggcgaaagaggattttcgtattatcctcgccggcggcgaactccgcagccgcgacggcggcattattggcgaagcgacgcaggactttatcgctcagttccgtctcgatttcggcattctcggtattagcggtattgatagcgacggctcattgctggaatttgactaccatgaggtacgcaccaagcgcgcgattatcgaaaattcgcgccacgtgatgctggtggtggatcactctaaatttggccgtaacgcgatggtaaacatgggcagcattagtatggtcgatgcggtctacaccgataccctgccgccgccgggcgtgatgcaggtgttgacggagaaccatattcaactggagctgtgttaa

SEQ ID NO: 373599 - DNA, 1554 bp, Salmonella enterica
atggctaatccacttttgttccgttcgctgttaagggacgtgccgctggccaacgccagcaatcagcaaggcgcagcggcctttgccttcaccccgcgccataaactggcgcaaatggtgatgaccggctgcatgaacgagactttttatgccagcggccaggcgcagctaaatgatgttctggcgacggcgaaagatctcgacgatctgtttttagcgcaactggcgatttatggccgcgaacgcgggatgatgaaggatatgcccgcgctgttgaccgccattctggcggcgcgtggttcggcgctgctgccggtagtatttgcgcgggtgatcaacaatggtcggatgctgcgtaactttgtgcaaattttgcgcagcggcgtgaccgggcggcgctcgctggggacgcggccaaagaagctggtgcagcgttggttacagaacgccagcgaagagcgtttattgcaggcatcggtgggcaatgcgccgtcgctggcggatatcgtcaaaatggtgcacccacggccgcaagcggcgtggcaggaagccttcttcgcctggctgattggtaagccgtgcgataagacgcaactgccggaaaaaacgcgcgcgctgctggcgtttcgtgaaggcgacatgggcgcggccttacccgatgtgccgtttttactgctgaccaacgcgccgctgagtcgcgaacagtgggcacaactggcgcagcggatgagttggcaaacgttgcggatgaatttgaatacgctggcgcgtcatgacgtgtttgagaatgcaacgcttgccgccagcgtggcgcagcggctggcggacagggcgcaggtgcgccagtcctgggtctatccttatcagctgttgtcggcgtggagcaatctgcaaagcagcgtgccgcaggttattcgcgaggctttagtgcaggcgatggagtacgcgctggagaacattccgccgtttcgcggcaacgtggtggtctgcccggacgtgtcggggtcgatgaagtcgtcgataaccggctatcgcaagggggcgaccagtaagatccgctgcgtggacgttgccgggctgatcgccgccgccgtgctgcgtaatcatccgcaggcccgcgtgctgccgtttgaatgcgatgtggtcgacgtgcagcttgatgcgcgccagtcggttatgcacaacgcgcaaaagctggcggcggttggcggcggcggcaccaactgctccgcgccgctgcgtaggttgttgaacgagcgggcgcgggtggatctggtgattatggtgtcggataacgaatcgtgggttgataagtcgcgccatggctcaacggccaccatggagtgctggatcgaactgaaaaagcgcaacccgcaggcgcgcctggtgtgtatcgatctgctgccttacggtaccacccaggcggcggaacgaagcgatattttgaacgtcggcggcttcagcgacgaggtgtttacggtgatagataactttgttaacggtcgctatggcagcgcgcactggctggaagagattgaagccgtgacgctgtaa

SEQ ID NO: 373600 - DNA, 561 bp, Salmonella enterica
atgacataccacgctgatttccttgatactgaacaacgcgttgctgacgccatcccggagagggatgttaatcccttttccggcccttcaacgatgcggcgaagagtgctggtgagtcaggacggcgagccggttatcgtgctgtgtctttttgtcgcgctggaagaggggcgctggatcgttgagcagtgcttcagcggcatcatgaataatgataagactattgcgatattatacggtcagcacgttcacttatttgatacggattcacatcaggttaagagcctgtttcttgatgattatgttggccatatttattcaatacccgatgtttgggatcataaggcctcgctgagcgagaatttcctggtcacaacctttcagtatacgtttcttatccacgtgagttccggcattatctggcgatcggaaccgtgtggtattgatggcgtcattattcacgatatccgggagggtattatttatggcagtggtgagtgggacccgccggatggatgggcgccatttaacctgcggctgagcgacggccatcgggcctga

SEQ ID NO: 373601 - DNA, 927 bp, Salmonella enterica
atggagcttcgccagttacgctatttcgtgcgtattattgaaaccggcagtatgggcagcgccgcacaggatcttgatattggcgtttcagccttaagtcaacagatgtcccgtctggaaaacgagctcgccatccgtctactgcagagcacctcgcgcggcgtaacgccaaccaacgccgggctggccttttattcacaggcgcaactcgccctgcgtcatgccgacgacgcgattctcgccgctagagaagcgcgcctttccggtcatgtgagcgtaggaatggcccccagtaccgcctccatactgggtataccgtttatccatgccatgcaggaaaactatgccgatgtccgactgcatgtggtggaaagcttgtccggtaatctggaaagaatgatcaatacccgccagattgatttagccgttgtctttcaaaaagataaaatcctgcgctggagcgccagaccgatccttgaagaacagctttttctgattggctcccatgccctgctgacggcgcttcctgataacccgatcacacctaaacaactggcaggcattccgctcattatgccaagccagggacacgggctgcgcggcaggctggacgctgtctgccaggaacatgcgcttaacgttgaaatcgtcgcggaaattgacggcctggcgttgttgatgcgcgccgtgcgcgacggtcttggcgccacgttgcagcccggcgcggcgatttctcatctggataacgacgcgctacgcgtgatcggcgtccataatccggtactcagccgccccaattttttagtcagcctgtcggatgatgaactgacgcccgccggccttgccgccagagtagtccttaccaaagttatgcgtcagttagtcgacgccggcgaatggccaggcgcaactctttacgcttactaa

SEQ ID NO: 373602 - DNA, 1407 bp, Salmonella enterica
atgcgtacgtttagtggcaaacgtagtacgctggctctggctatcgccggtatcacagcaatgtcggggtggatcgttgttccgcaggcgcaagcctccggctttttcgacgactccacgttaacgggcggcatctattattggcagcgtgaacgcgatcgcaaagatgtgaccgacggcgacaaatataaaactaacctttctcatgcgacctggaacgctaacctggattttcagtctggttacgctgcggatatgttcggtctggatatcgcggcgtttaccgcgattgaaatggcagaaaacggcgacagcggtcatccaaacgaaattgccttctcgaaaaagaataaaggctacgacgaagactattccggcgataagagcggtatcagtctttataaagccgcagcgaaatttaaatatggcccggtctgggcacgcgccggttatattcagcctaccggtcagacgctgttagcgccgcactggagttttatgccgggtacttatcagggtgcggaagccggcgccagttttgactatggcgatgcgggcgcgttaagtttttcctacatgtggactaacgaatataaagcgccgtggcataccgaaatggataagttttatcaggcggataaaaaaaccaatgtggactacctccactccatcggcgcgaagtacgacttcaaaaatgatctggtgctggaagcggcgtttggtcagtccgaaggctatgtcgatcaatatttcgcgaaggccagctataaatttgatttaggcggcaatccgttcaccaccagttaccagttctacggcgcgcgcgacaaagtagacgatcgcagcgtgaatgatatttacgacggtacggcctggctgcaggcgttgaccttcggctacaaagtcgcggaagtggttgacctgcgtctggaaggcacctgggtgaaagcggacggtcagcagggctattttctgcaacgtatgacgccaacctacgcctcttcaaacggtcgtctggatatctggtgggataaccgctccgactttaacgctaacggtgaaaaggcggttttcttcggcgcgatgtatgacctgaaaaactggaatctgccgggctgggctgtgggcgcgtcttacgtttacgcctgggatgctaaaccggcaacctggcaaagtaacccagatgcttactacgacaaaaaccgcactatcgaagagtcctcatacagtctggatgcggtctataccctgcaggaggggcgtgccaaaggcaccatgttcaaactgcactttaccgaatatgacaaccactccaatattccaagctggggcggtggttacggcaacatcttccagtatgagcgtgacgtgaaatttatcgttattgcgccattcactattttctga

SEQ ID NO: 373603 - DNA, 1221 bp, Salmonella enterica
atgacaccaggcggacaagctcagataggtaacgttgatctcgtaaaacagcttaacagcgcggccgtttaccgcctgattgaccagcatggtcctatctcgcgcatacaaattgccgagcaaagccagcttgcccccgccagcgtaacgaaaattacgcgtcaactcattgaacgcgggctgatcaaagaagtcgatcagcaggcctctaccggaggccgccgcgctatctctatcgtcacggaaacccgtaacttccacgccattggcgttcgcctggggcgtcatgacaccactttaacgctctacgatctgagcagtaaagtggtcgctgaggagcattatccgcttccggagcgcacccaagagacgctggaacacgcgctgctcaacaccatcgccgtctttattgatagctgtcagcgtaaaattcgtgaattgatcgctatctcggtgatcctgccagggcttgtcgatccggaaagcggcgtgattcgttacatgccgcacattcaggttgaaaactggggactggtcgaagcgctggaaaaacggtttcacgttacctgtttcgtgggacacgatatccgtagcctggcgctggcggaacactacttcggcgccagtcaggattgcgaggactcgattctggtgcgtgttcatcgtggtacaggcgccgggattatctccaacggacgcatcttcattggccgtaacggcaacgtcggcgaaattgggcatattcaggtggagccgttgggcgagcgctgccactgcggtaatttcggctgtctggaaaccattgccgccaatgcggcgattgaacaacgggtgctgaatttgcttaaacaagggtatcaaagccgtgttccgcttgacgactgcacgattaaaaccatctgtaaggcggcaaaccggggcgacagcctggcctcggaagtcattgagcatgttggtcgccatttgggcaaaacgatcgccattgctatcaacctgtttaatccgcaaaaaatcgtcattgccggcgagatcattgaagccgataaagtcctgttgcccgctatcgaaagctgtatcaatactcaggcgttaaaggcatttcgcaaaaatttgccggtggtacgctccacgctggatcaccgttctgctatcggcgcatttgccttagttaaacgcgccatgctcaacggaacattgctgcaacgtttgctggaaagttga

SEQ ID NO: 373604 - DNA, 1176 bp, Salmonella enterica
atgacaaatcaaccaacggaaattgccattgtcggcgggggaatggtcggcggcgcgctggcgctgggtctggcgcagcaagggtttacggtgatggtaatagaacatgccgcgcctgcgccgtttgtggctgacagccagcctgacgtgcggatttcggccattagctcggcatccgtggcgctgctcaaggggctgggtgtttgggaggcggtgcaggggatgcgtagccatccttatcggcgactggagacctgggagtgggaaaacgcccatgtggtgttcgacgccgctgaactcaagctgccgctgttaggctatatggtagagaacaacgtcctgcaacaggcgctgtggcaggcgctggaaacgcaccccggcgtgacgctgcgcgttccggcttcactggcggcattgcaccgccgccacgatggttatgcgctggaactggccgacggcgaatgggtaacgccgaagttagtgattggcgccgacggcgcgaattcgcaggttcggcaaatggcgggaattggcattcatgcctggcaatatgcgcagtcgtgtatgcttatcaccgtcaagtgtgaaaattcgccaggcgacagcacctggcagcagtttacgccaacggggccgcgcgcctttttgccgctgttcgatgattgggcgtcgctggtgtggtatgacgctccggcacgtattcgccagttgcagggtttatcgatgacgcaattgcaggtggaaattaaccagcactttccggcgcgtctgggggcggtgatgcctgtcgcggcgggcgcgtttccgctaacccgtcgtcacgcgttgcagtatgcgcaaccggggctggcgctggtaggcgacgcggcgcataccattcatccgctggccgggcagggcgtcaacctggggtatcgggatgttgatgcgttgattgatgtgctggcgagtgcccgtagctatggcgagtcctgggccagccattcggtgttgaaacgctatcagacgcggcgcatggcagataattttatgatgcaaagtggaatggatctgttctatgccgggttcagcaatgaactgccgccgctgcgtattttacgcaatatggggctgatggcggcgcagcgcgcaggcgtgctaaaacgtcaggcgctgaagtatgcgttggggttgtag

SEQ ID NO: 373605 - DNA, 1095 bp, Salmonella enterica
atggtggttaatctgtatccggtatttgcggccagacagttaagccgggtagtgttgacgatgcaaaccgtctccagtttacagggggcggaacatcatgttcgccgccaggaactgtctcgccgcggcttgagcgcccgctatcatttcgacgatctgcttaccgaaaacccggaaatgctgcgtcgtctggcgatcattaaaaattatgccggtacggacgcgactatcttaattaatggcgaaagtggaacgggaaaagaggtgctggcgcaaagtattcataatgccagccaacgcgtcaacggcccgtttgtcgccattaactgcggcgcgatggcccctcagattctggagagcgaactctttggctatgtcgccggcgcatttaccggcgcgtcgccgaaaggcaaaataggcctgtttgaattagcgcaccacggtaccatttttctggatgagattagcgaactggataaaccgctacagacgcgcttattatgggtattgcaggagcggcagattatgcggctgggctcagaccagatgatacctgttgatattcgcgtgattgcggcgaccaatcagacgttaacgaagctcattgcggacgggacatttcgcgaagatctttactatcggcttaacgtattaaaagtgaccaccatcccgctacgcaaacgtccggaggatatcaaagccatcggcctgtcgctgcttactagtttcagccagcattataaacgcccggcactaacgttaaccccggcgctgtggcaagagcttcagcgcttcgcctggcccggaaacgtcaggcagttaagcaatattatcgaacggctggtgctctctattgatcactccccggcaacgctggatgagggacgcctcttgctggacgatctggaagaggggagccgacgcgagccaaatacctgccacgactgccagatgctggctggcgattataaaacgattcgcctgcgtattctgagaaaattattagaggcggaaagggataataaatcgttagtggcgaaacggttaaatgtcgatcgtacctcgctgacgcgctggatacgcgagtcggcctga

SEQ ID NO: 373606 - DNA, 447 bp, Salmonella enterica
ttggcaaaccgtaccattcaggaagagggcggcacgcttaaatgtcaggctcgggggatttcgctggcccgcgattatgcgcaacaactctccatgcaaaaaccgcagcaagcgccggttagcgagctgctgttggcgatggagtgcggcgggtcagatacgacatcggggctggcgtctaacccttcctgcggggtcgcctcggataagctgatacgctgtggcggaagctcaattctttctgaaacgacggaatttattggcgccgagcatgtgatggcgaaacgcgcggtgacgccggaggttggtcaacagcttattgatttagtggtcggctgcgaggcgcgagcaaaagcgctgggcgaggatattcgcgggggacagccgacgccgggcaatattaaaggcgggttgactaccattgaagaattgaagaaaaatcgttag

SEQ ID NO: 373607 - DNA, 429 bp, Salmonella enterica
gtggcgactatgtgcacgtccacaatgtggaaagcgaacgcggacgtggtgactggaaataatataaaacaagggaaaatgattatgagcaatgagacttttttgggtttccgccgccctgacggccgttttggcatccgtaattatgtactgattttacctaccagcgtttgtgcgaataaagtcgcccaggatattgcccggcaggtaaaaggcgcgacatgggtgaataacgattttggctgctgccaggtggcaggagatgcgcgtctgacggaaaagacattgattaatgtggcgaataatcccaacgtcggcgctattgtggttgtgggcttaggctgtgaaggcgcggagccgctgcgcatcgcagaagagattaccgcatttggcaaaccgtaccattcaggaagagggcggcacgcttaa

SEQ ID NO: 373608 - DNA, 240 bp, Salmonella enterica
atggctgttgtgatgattatcagaaagtattttcttattattgctctccttgttatgccatggctggctattccttcagtctctgcggcggataaaggggggtttaacacgtttaccgataacgtcgcagaaacgtggcgacagcctgagcattatgatttgtatgtccccgccattacctggcatgcgcgctttgcctacgataaagagaaaacggatcgctataacgagcggccgtag

SEQ ID NO: 373609 - DNA, 1386 bp, Salmonella enterica
atgctaacagttatagaactccttatcggagtcgtcgttattgtgggtgtagcgcgctacatcattaagggatattccgccactggcgttttatttgtcggcggtctggttctgcttattatcagcgcgctgatggggcataaggtattacctgccagcgaaaccagtaccggctataccgcaacagatattgttgaatacatcaaaattttgcttatgagtcgcggcggcgatcttggcatgatgatcatgatgctgtgcggctttgccgcctatatgacgcatatcggcgcgaatgatatggtcgtgaagctggcgtcgaaacctttacagtacataaactcgccctacctgttaatgattgctgcctattttgtcgcctgcctgatgtcgctggccgtctcttccgcgacggggcttggcgtactgctcatggctactctcttcccggtgatggtcaacgtcggcattagccgcggcgcggcggcggctatttgcgcctctccggccgccatcatcctctcgccaacgtctggcgatgtggttttagccgcaaaagcggcggagatgccgttaatcgatttcgcgttcaaaaccacgctgccgatttccatcgccgccattatcggtatggcgattgcgcactttttctggcaacgctatctggataaaaaagagaacatttcacatgagatgctggacgtggcggagattaccaccacggccccggcgttttatgcccttttgccgttcacgcccattatcggcgtactgatttttgacggtaaatgggggccgcagttgcacattattaccattctggtgatctgtatgctgctggccgccgtgctggaattcgtgcgcggtttcaacacgcaaaatgtgttttccggcctggaagtggcttatcgcggcatggcggatgtgtttgccggcgttgtgatgctgttggtcgcggcgggcgttttcgcccaagggctgagcaccattggctttatccaaagtctgatctcgattgccacttcttttggctccgccagcattattctgatgctggtcttagtgattttaaccatgctggccgcgatgaccaccggttcaggcaatgcgcctttttacgcctttgttgagatgatccctaaactggcgcactcctccggcatcaacccagcctatttatctatcccaatgctgcaagcctcaaacctggggcgcacgatttcgccggtctccggcgtcgtggtcgctgtcgccgggatggctaaaatatcaccgtttgaagtggtgaggcgcacgtccgttccggtcatcgtcggtctgttgatcgtcattatcgccacggaaattatggtgccaggcgcctcttccgccgttaccggcggctga

SEQ ID NO: 373610 - DNA, 681 bp, Salmonella enterica
atgacagaaccattaaccctattgatcgttgaggatgaaacactgctggcggaaatgcacgcagaatatatccgccatattcctggctttaaccagatatggctggcgggcaatctggcgcaggcgagaatgatgattgaccggttcaaacctggattaattctgttggataattatctgccggatgggaaggggattacgctgctgcatgaattaatgcagtcgcgctatcctggcggcgtcgtgtttacgaccgccgccagtgacatggagacggtagcggaagcggtacgtagcggtgcgtttgattatctggtcaaacctattgcttatgaacgtttgggacagacgctgacccgctatcaacagcgcagacgtatgctggcgagctcggatagcgcaagccagaagcagatagatgaaatgttcaacgcctatgcgcgcggcgaaccgcaaggggatttgccgaccggtattgatgccttaacccttaatgcggtgatgaagctgtttgccgatccaaccgtacgccatacggctgaaacggtcgcgcaggccttaacgataagccgcaccacatcccgacgctacctggaatattgcgcgagtcggcacctgattgtcgcagagattattcatggcaaagtgggcaggccgcagcgtatttatcacggcggctaa

SEQ ID NO: 373611 - DNA, 1530 bp, Salmonella enterica
atgacgcagaaaaatgaatctcaacgccaggatcgcgtagcagcctggagccgtcacgctgaaagcgaactgagcgcttaccaaagtgcggcaaaattggatctacaagcgcaaaaaccgcgcgaccacaaactgtgcgccagcctggaagaggccatccgccgttccggtttacgcgacggcatgacgctttcctttcaccacgcgtttcgcggcggcgatctgacgattaacctggtgatggaaaccatcgcgaagatgggcttcaaaaatctgaccctggcctccagctcgctgagcgactgccatgcgccgctggttgaacacattcgtaacggggtggtcagccgcatctacacgtcaggcctgcgcggcccgctggcggaagaaatttctcgcggcctgctggctgagccggttcagattcactcccacggcggccgtgtacatctggtacaaagcggcgaactcaacattgatgttgcgtttcttggcgtgccctcctgcgatgaattcggtaatgctaatggttataccggcaaggcctgttgcggttcactgggctacgcgatggtggatgccgacagcgcgaagcaggtcgtgatgctgacggagcaactgctgccgtatccgcataacccggcaagcatctctcaggatcaggttgatctgatcgtgcaaatcgaagaagtcggtgatgcaaacaaaatcggcgctggcgcgacccgcatgaccactaatccgcgtgaactgctgatcgcccgcagcgcggcggaagtcattgctcactccggctacttcaacgaaggtttctccctgcaaaccggcaccggcggcgcatcgctggcggtcacccgcttcctggaagacaaaatgcgtagccgcaacattgtggctaatttcgcgctgggcggtatcaccgccaccatggtcgacctgcatgaaaagggcttaatccgaaaactgcttgacgtgcagagcttcgatcgtaacgctgcgcaatctttggcccgcaacccgaaccatatcgaaatcagcgctaaccagtacgccaactggggctctaaaggcgcttccgtcgaccgtctggacgtggtggtactgagcgcgctggaagtagacactcacttcaatgttaacgtgctgaccggctccgacggcgttctacgcggcgcgtccggcggtcactgcgataccgccgtcgcggcggcgctgtccatcatcgtcgcgccgctggtacgcggtcgcatcccaacgctggttgataacgtcaccacctgcgtcacaccgggctccagcgtcgacattctggtcaccgatcacggtatcgccgtcaatccggcgcgtccggagctggctgaacgcctgaaagcagcgggaatgaaagtggtatcgattgagtggctgcgcgaacgcgcgcaactgcttaccggtcagccccgccctatcgaattcaccgaccgcgtgattgctgtcgtgcgttatcgcgacggttcagtgatcgatgtggtgcatcaggtgaaggaataa

SEQ ID NO: 373612 - DNA, 1464 bp, Salmonella enterica
atgtctttatccaaagataatatatggaagttgttggccccattagtggtgatgggcgtcatgttgctaattcctgttccagatggtatgccgccgcaggcctggcactattttgcggttttcgtcgcgatgattgtcggtatgatcctggagccgatcccggcgacagcgatcagttttatcgccgtaaccatttgcgttatcggcagcaattacctgctatttgacgcttcagaactggccgatccggcgtttaaagccagtaaacaggcgctgaaatgggggcttgccggtttctccagcaccacggtctggctggttttcggcgcgtttattttcgcgctgggctacgaagtgaccgagctggggcgccgcattgcgctgtttttggtaaaattcatgggtaaacgcacgctgacgctcggctatgcgattgtcattatcgatattttgctggcgccgtttactccctccaatacggctcgtaccggcgggactgtcttcccggtcatcaagaacctgccgccgctgtttaaatcgtttccaaacgatccttccgcacgccgcatcggcggttatttgatgtggatgatggtgatcagtaccagcctgagctcttcgatgtttgtcactggcgcggcgccaaacgtgttaggtctggagttcgtcagcaagatcgccggggtccagattagctggctgcagtggtttctcagctttctgccggtagggattattttactgatcgttgcgccgtggctctcctatgtgctttataaacctgaagtgacccacagtgcggaagtcgcggcctgggctggcggcgagttaaaaaacatggggcgtctgtcccgcaaagagtggacgctgattggcctggtgctgcttagcttaggattgtgggtttttggtggaaaaatcatcaacgccactgccgtgggtctgctggccgtctcgctgatgctggcgctgcatgtcgtgccgtggaaagacattacgcgctacaacagcgcctggaacaccctggtgaacctcgctacgctggtggtcatggccaatggcttaacccgctccggctttattgactggttcgccaataccatgagtacgcatctggaaggtttctcgccggatgcaaccgtcattgtactggtactggtgttctatttcgcgcactatctgttcgccagtctttccgctcacaccgcgactatgctgccggtcattctggcggtgggtaaaggcattccgggcgttccgatggaacaactgtgtattctgctggtgctgtctatcggtatcatgggctgtctgacgccgtatgccaccggcccaggtgtgattatctacggctgcggttacgtgaaatccagagactactggcggcttggcgcaatctttggcgttatctatatcgcgatgctgttgctggtgggctggccgattctggcaatgtggaattaa

SEQ ID NO: 373613 - DNA, 297 bp, Salmonella enterica
atgatacggctggataaggcgataaaagacagcgcgctagggcagtttctggcagataattacggcaagaccgttagccgcgctgagtttgatagcgtcgtcgcacaaatgtggggccaggataatgtcaaagccgttaaagtaaactgccatggcaatcccgcctatttaacagagattcagttttcattaaaggcgtcgatgattaacgccccgctctcctctgcctcattcctgccgcagccgcatcccggcaactgcgggaaacagtttattatcgataaagccggttattga

SEQ ID NO: 373614 - DNA, 183 bp, Salmonella enterica
atgaaagcattgacgtatcacggtccacatcacgtaaaggttgaaaacgtacccgatcccggcattgagcagcctgacgatatcattttgcgtgttaccgccaccgcgatttgcggatctgatttgcatctctatcgcggcaagatcccacaggtaaaacatggtgatatttttcggccatga

SEQ ID NO: 373615 - DNA, 1356 bp, Salmonella enterica
gtggagtgggcggcagaaatctgcggcctgtctgcggatgtcattcgccagctggcggaagagtttacggcggttaagccggccacggtctggattggttacgggatgcagcgtcatgtcaacggcggcgccaacgttcgcgctatcgatgcctttgtcgctatgtccggcaacatcggtgtcgaaggcggcggcgcgcgttatggccatctgcatacctggggctttaactataacgccatgctgcagaagccgccggtgggcgctattggcataccgggagcggcgggcaccaccagtgaattcggggctgccgctggcagcgacgccgtgcagtactccgatcgctctctgaatatcaaccagacggcgcaggggattctggaggccaacgatccgccggttcgtatgctgtgggtcgcctgtaaaaacccgtttgcccaggatttcgatcgcagcaagatgaaaaaagcgtttgaaaaactggaaatggtggtctgcgccgatcagttcttcaacgaaacggtgcaacacgctgatatcgtgctgcccgttaccaccgcgtttgaagagtggaacgtggatgcttcttactggcactactggctttccattaatcagccggcgattaagccgatgtatgaagcaaaatgcgaccttgaaatcgctaccatgctgtcgcgcaccattaataagatggcgccgggttcctgtaccttcccgcaagagttcgatcacaagcgctggctggatcaggagttcaacgacggtatggcgaaaatgtttggcatctcttcctgggacgatctgctggacgggccgaaaaaagcgatcctgccaagttctgccgcctggtacgatcgcaagttcaaaacgccgtcaggcaagtatgaatttaaatctgaactggcggagaaaaacggccacaccgcgctgccggaatacaaaccggaagccgagagcaaactgcctttccatctgtttacgccgcacgtgcagtttggcctgcactcgctgtttatcaacctggactggatgcaggtgttctacccggaaccgttcgtttatatccatccttcttccgcgaagagaaagggcatcagcgagaacgatctggtcaaagttttcaatggcaccggtgaagttgagctgcgggcaaaagtcaccaccaacgtaccggaagattttctggtgatgtatgaagcgtggttcccgaaacggcagtacaacgtgcaaaacgtcgtggccgatacgcctgctgatatggggctgatgaaaactggcgcgccgggcgccgctatccacagtcagtttgctgacgttgtattgatcggtaaaggggagtccgtagcatga

SEQ ID NO: 373616 - DNA, 1401 bp, Salmonella enterica
atggggcaattgtcagaatcacatgcattagggggcgggctgaaatcacgccacgtcaccatgttatcgatcgccggcgtcatcggcgccagcctgtttgtcggttccagcgtggcgattgcggaggccggccctgcggtactgctggcctatctgttcgcaggacttttagtcgtcatgattatgcgaatgctggctgaaatggccgtcgccacaccggataccggttctttttccacctatgcggataaagcgatcggcccctgggccgggtataccatcggctggttatactggtggttttgggtgctggttattccgctggaggccaatattgccgccattattctgaattcatggataccgggtattccggtatggctattttcattagtgattacgcttgccttaaccggaagcaatttattgagcgtcaaaaattacggcgagttcgaattctggctggcgctatgtaaagtaattgccattctggcgtttatcgcgctgggcgcgacggcgattagcggtttttatccgtatgctgaggtaagcggtatctcccggctatgggatcacggtggttttatgcctaacggcttcggcgcggtgttaagcgccatgttgatcaccatgttctcttttatgggcgcggaaatcgtcactattgctgccgcggaatccgatacgccggataaacatatcgtacgcgccaccaattctgttatctggcgaatttccatcttttacctgtgttccatttttgtggtggtggcgctgatcccgtggaatatgccgggtctgaaaagcgtaggttcgtaccgttcggtactggagctgcttcatattccgcacgcaaaattcattatggactgcgtgattttattgtcggtgaccagttgtctgaactccgcattatataccgcctcccggatgctctattccctcagccgccgcggcgatgcgcctgcgataatgggaaaaactaaccgtagcaaaacgccctgggtggcggttctcctctctaccggcgcggcctttttaaccgttatcgtcaattattacgccccggcaaaagtgtttaaatttcttatcgacagttctggcgccatcgcgctgctggtctatctggtgattgcgatttcgcaattgcggatgcgtaaaattctgctggcgcagggcggagaaattaagttgaaaatgtggctttatccgtggctcacctggctggttatcggctttatctgctttgtcctggtggtgatgctgtttcgaccggcacagcaactagaagtcatttcgaccgggctgttagggctgggcataataggtactgtccccattatgtctcgctggaaaaaactgataaggtggcaaaaagcccccctgcaaaacctacgttag

SEQ ID NO: 373617 - DNA, 1269 bp, Salmonella enterica
atgtatgattttgtgattatcggcggcggcattatcggcatgtcgaccgccatgcaacttattgatctctatccggatgcgcgcatcgcgttgctggaaaaagagtccgcgccagcctgccaccagaccgggcataacagcggcgtgatccatgccggggtgtactacacgcccggcagcctcaaagcgcggttttgtctggcgggcaatcaggcgaccaaaaccttttgcgatcaaaacaacatccgctacgacacctgcggcaaaatgttggtcgccacctcggagctggaaatggcgcggatgcgcgcgctatgggagcggacggcggccaacggcttagagcgcgagtggttaagcgcggcggagctgcgtgaacgcgaacccaatatcattggcctgggcgggatttttgtcccttccagcgggattgtcagctatcgcgatgtcgcgacggccatggcgaaccgctttcaggccaaaggcggcgagatcatctaccatgccgaggtcagcgcgctaacagaacatgccgctggcgttgtcattcgcacctcgcaaggtcgggaaatcgaaaccgctacgcttatcggctgtgcagggctgatggcggatcggctggtcaaaatgctgggcgtggagcccggttttattatctgccctttccgcggcgagtactttcgtctggccccgcggcacaaccggatcgttaaccatttgatctacccgatccccgatccggcaatgccgtttctcggcgtccatcttacccgcatgatcgacggcagtgtcacggtcgggccgaatgcggtgctggcgcttaaacgcgaaggctaccgtaagcgcgacgtttccttcaccgacaccctggagattttccgctccgccggcattcgccgcgtactgcaaaaccatctgctttccggactgggcgagatgaaaaactcgctgtgcaaaagcggctatttgcggcgagtacaaaagtattgccccagcctgaccgtcaacgatctccagccctggccggcaggcgtgcgggcgcaggcggtttcaccggacggcaaactgattgatgattttctgtttgtcacgacgccgcgttccattcacacctgtaacgccccctccccggcggcgacatcagcgatacctatcggcgcgcatatcgtcagtaaagttcaggcgctacgcgcaagccagagcaaccccggacgtacgctgcgtgcggcacgcagcgtggacgcactacacgccgcatttacccgttaa

SEQ ID NO: 373618 - DNA, 312 bp, Salmonella enterica
atgcctggatgtataagtgcctgttcgtgcgttgtcagctcgacgcctcccgatcctaagaccccccctgcgcctaagtggatagagttaaaaggttattgtgttacatgtactagtcaggaggatattcgtccacctaaagggggtgaatcaaagcaaaaaatgtcagcccttgaattagtgatggcacgacgtcttttaaaagacctgggggtaacacaacatccctggcaagacccgacagtaaaatccactaactgtgggttgccatttttcccggtagatcctggggaacgagaaaccgatgtttga

SEQ ID NO: 373619 - DNA, 840 bp, Salmonella enterica
atgttgtatcacgttgttattgaaaagaaaccagtaaaaactggcaaagatggtgctgaagaaaacaaaacagatctcaccaaagagcagctgattgctcgcttcatagaaccttacgagctaggcaacccaattacagtaaacggcacgactattcaaacatcagaaataaacagattaactgttaaggctactgaagccagcattgaatctttcatacctgcgatagaagcagaagatcgaaattcaagtgtgattatgtttggcggaccgtcttacctagaacgtgcgatatatcgagctcctgatgtaactgatgaattcatcactggtcccgctggcagcaaaaaaccgatcgcatcaaaaaaaccaaataaatcaacaacaaatacaaagtctgacaaagttttcattgttcacgggcatgatgatgcagcgaagatcaagactgctcgttttgtagaacaattggattacaaagctattattctgcatgaacaagcaagctctggtagaaccataatagagaaaatcgagcagtttactgatgtgggatttgctgttgtgctatacacgccggacgatataggcaatgccaaagacaatgcagacgacctacagttaagagcccgtcaaaacgttgttttcgaacatggttttttgataggtaagttaggaagagatcgtgtagtagctttggttgatggagcaatagaacttccgaatgatattagtggggtcgtctacataaaaatggacgaggcaaacgcatggcatcttcagttagccaaagaaatgaaacaagctggttttaacattgatatgaacaagcttgtgtaa

SEQ ID NO: 373620 - DNA, 960 bp, Salmonella enterica
atgaaaagcacaaaacgtacccctagtcttcaaagtcccccaaagatttatcccctgaatcaatcgcctctattcaagcttaaaaataaaagaaaattacttgaaatcatagggctatccaagaaacaagcagacaagctaatgcttgactcagcgtacaaagaatttgtaaatgatgccggaaggacaatacaggaaccaattgctcagctcaaagcggttcataggaaaatcggcgttttattgagcagaatcgaactacctccatatcttcactctggtcggaagaagcattcaacacttactaatgtagaatcacataagctagcaactgaacttctgaaactcgacattcataagtttttcccctcgactagggctgcaaaggtctacaaggcatttgtagaaaaatttgagatgtcacctgatgtagcttatatcatgaccaatctctcaacctttgcaggaaaagtgcccacaggcagtccgataagcatggctatggcgttttgggccaataaagacatgttcgacgagcttagcaaccttgcggcctcaaacagcttagtatttacggcatatgttgacgatgtggcgttctctggttcgaaaatcccaaaaggatttgccgcccaagctaaaaaatgtattcgttcccatggactcacctctaaagacaaaaaagagcgattttatccgtcatcagagggaaagctgcttacggggatagtcattcaggatggggaacttaaggtacgttgggcacataacgattcaataggaaaagaattcgctactttggctgaagcaaaagacaacgctacaaaaataatccatctagaaaagctagcaggtaaactgcatgcagccggtcaagttgacttcagacaaaaagatagagctcgtttttttacacagcagctcaaagccacaaaaaagcgctcagaacaaggtacttaa

SEQ ID NO: 373621 - DNA, 228 bp, Salmonella enterica
atgagtcgtaagacacgtaaacgtcgaaagacaaatacaagtcgaaagacacgtaaaaaataccaggctagtgttcagcaaacgttttgtgtgaaggaaagactaaagaaatactccaaagatgccggtaatctcttgtttaccttagttatcagcgaagtgatttctgctgtttttcattctgaagctgttgcctccatctttgcatccatcaagggattcctgtaa

SEQ ID NO: 373622 - DNA, 654 bp, Salmonella enterica
atgggacgctggcttgccggcaggctcatgaaagaactggggctggtgagttgtcagcagcctacccaccggtataaacgtggtggtcatgaacacatcgttatcccgaatcgccttgagcgacagttcgcagtgacagaacctaaccaggtgtggtgcggtgatgtgacatatatctggacaggcaagcgttgggcttacctggcagttgttctcgatctgttcgcaaggaaaccggtgggctgggcaatgtcattctcgccggacagcaggctgaccatcaaagcgctgggaatggcgtgggaagctcgcggtaaaccagccgaagtgatgttccacagtgaccagggtagccactatacaagcagacagttccggcagttactgtggcgttgccggatcaggcagagtatgagccgacgaggaaactgttgggacaacagcccgatggaacgcttcttcagaagtctgaaaaacgagtgggtgccagtgactggttatacaaactttagcgaagctgctcatgcgattacaaactatatcgtcgggtattacagctcgttaaggccgcatgactataacggtggattactcccaaacgaatcggaaaaccgatactggaaaaactctaaagccgtggccagttttagttga

SEQ ID NO: 373623 - DNA, 303 bp, Salmonella enterica
atgaaaaaaagaaatttcagtgcagagtttaaacgcgaatccgctcaactggtccttgatcagaactacaccgttgcagctgcggccagtgctatggatgtgggcctttctaccatgacgcgatgggtaaagcagttgcgggatgaacgacagggcaaaatacctaaagcctcccctataaccccggaacaaattgaaatacgtgagctgaagaaaaagctacaacgcattgaaatggaaaacgacatattaaaaaaggctaccgcgctcttgatgtcagactccctgaacagttctcgttaa

SEQ ID NO: 373624 - DNA, 183 bp, Salmonella enterica
atgctgtttgatggcatatggtacactcctgagtcacagttgtgccacacgcccaaagagaaacggcctgaaactccaagagaatcaggccgttatatttggtggagctggcgggagttgaacccgcgtccgaaattcctacataccatttttagtatagtaaaaacagtgtattgcgtttaa

SEQ ID NO: 373625 - DNA, 633 bp, Salmonella enterica
atgagtttaatcaaggcggggaatgatagtggtgggcgcgatgcgattaacaggcttattaaggcttacaatttcagctcacgacagcagctctgcgaacatctggaagtatcaaaaagcactatggctaacagatacttaagggatagtttccctgctgaatgggtaattcaatgcgctcttgaaacaggaatttcccttctatggctggctacgggacaaggagatatgtatgcgtgtgagaacgaagaaagaaatctcaaaaacgaaacctccgtcacggtaagaccactttctaaaattgttgctcctagcatcaaacatgttgaactgaagaacggtgaactgcagccaagtgatgaaattcttcttgatagcagactgctcgatggtgactcatccaactctttatttgtaaaaacagctactgatagctttgttgtggatacgtctgttaaacaagtcagtaatggcttctggttagtcgatatggacggagttaaaagcatcgtcaaaatcgctcgcgttccaggcaacaaaattgtagttcaccaagatgaaacatcatttgaatgctcggtcgacgacattgaagctatcgggcgtgcagtcaaagtaatcaagagcctctaa

SEQ ID NO: 373626 - DNA, 510 bp, Salmonella enterica
atgtttgattataagatttccaaacatccacactttgacgaagcctgccgggttttcgcgctgcgtcacaacatggcgaagctggcagaacgcgcgggaatgaaagtccagacgctgcgtaacaagctgaacccggaacaaccgcatcagctcacgccgtcggagatctggctgcttaccgatcttactgaggactctacgctcgttgacggttttttggctcagattcactgcctgccatgcgtaccgatgaacgaagtggcaaaagagaagctgccacattatgtcatgagcgctactgctgaaatcggacgtattgctgccggtgctgtatcgggtgatgtgaaaactactgcaggccgccgcgatgttatcagtagcatcaactctgttactcgcttaatggcactggctgccgtttccatacaggcacgtttgcaggctaacccggcgatggcaagcgcggtggataccgtgacgggcctcggcgcttcattcggtctgatctga

SEQ ID NO: 373627 - DNA, 459 bp, Salmonella enterica
atgactaaacaaagctccgaatatttccagttgcattactgctattaccttgagcttatgacagcgacacttcacggtagggctgacaaattgatgactgctattcagattattagcggtactgctgtcatagccgataccgggctggaatgggtattcgctttgcccgttgttgtaatcgcaacaattcaacttgtgtggcaacccgcaattatttccgagcgtgctagcgtacaaagccgtcagtacggtgaattgctttatgctggggatgaattgaccccggaactgattgcacaaaaattgaaaacactgcatcactctgattccgcacctttcggttctttgttaaatccagcctacaaaagagcagctattgcatgtggtcggtctgacgacactaagctcagcttccaggaaaagcttttcgcctggtttgcaggatgcctgccacgttaa

SEQ ID NO: 373628 - DNA, 342 bp, Salmonella enterica
atggctattgatggcccggtggcgacagttccactaagccccggcaaacgcctggatgggttgaatcatattgctgaattacgcgcaaaagtgttcggcctgaatattgagtcggagcttgaaaggttcattgaagatatgcgcgaccaaagggatgttaacaataaacaaaatgagagggcactggcagccatattctatatggcaaagattccagcagaacgtcatagcgtcaatattagtgatctgactactgacgaaaagcgggaactgattaaagcaatgaatcattttcgtgcagtggtgagcttatttccaaaacggctaactatgccgaattaa

SEQ ID NO: 373629 - DNA, 234 bp, Salmonella enterica
atgcgaaatattgaaacccgtatcactaaaaccggaccagatgatgctggccttaatcagctgctgactgatgcgcgcatggaagaacgccgtggacgcgctgatttgatggcagcacgtctggactctttggctgcccatatcgtgtcacgtcagcttaaccacacggaagcggctgagctgctgcgtcaagaagcggtgaagattcagaacgaagcgcaggagatccactga

SEQ ID NO: 373630 - DNA, 228 bp, Salmonella enterica
atggctgattcaatggacctcgtacagcagcgcgttgaagaagaacgccagcgccacatccataccgcccgcaataaaacgccgggcgtttcccgtgttctctgcattgattgcgatgcaccgatcccgccagcacgccgccgcgccattccgggcgtgcagtgctgcatcacctgtcaggaaatcgcagagctgaaaggcaaacactacaacggaggtgctgtatga

SEQ ID NO: 373631 - DNA, 858 bp, Salmonella enterica
atgagcaccatcctgaaatgggcgggtaataaaaccgccatcatggcagaactgaaaaaacacctcccagaaggcccgcgactggttgaacctttcgcgggttcatgcgctgtgatgatagagacagactatcctcattatcttgtcgcggatattaatccagacctgattaatctctatcaggtgattaagaatgatgttgaatacttcatcaaagagggcagatatctttttgaagcccgtaatgatccagaggcatattataagacgagacaggagtttaacttgcgccatggtggcgcaattgaacgggcattgtatttcttatatttaaatcgccatggttatcgcggactgtgtcgctataacttggacggttattttaatgttccttacggtaattataaaaagccgtacttccctgaaaacgaaatacgtgcatttgcagaaaaagcaaaacgcgcaacgtttatctgcgccagctatgacgagacactggcactgctgcaaacgggtgatgttgtctattgcgatccaccatatgacggcacgtttaacggatatcacacagctggttttacagagaatgatcagttccatctggcgtctattcttgaacgccggtcatcagaaggtcatccggttatcgtgtccaacagcgatacgtctctgacccgttcgctttatcgtgattttactcgccatcgtataaccgctaagcgcagcatgggcgtggctgccggtgatagtaaaactgcagtagaaatcatcgccacaaaatcagcatgctggtttggtgttgatttggcgtctggtcctgatatctcggtagaaactgaggtgcgggcgtggcagtga

SEQ ID NO: 373632 - DNA, 2430 bp, Salmonella enterica
gtggcagtgagtaaattcacattacataatgcaccaaccaccggcggttcgaatgaggccgccgtggtctttccatggaataccccaaaaaaagcggttaacccgtatctggacccagcggaagttgcgccggagtctgcgctttcaaacctgatcgctctttacgctgcggataacgagcaggagcagttgcgccgtgagacgctgagcgatgaggtctgggaacgctatttcttcaatgaatcccgtgatcctgtccagcgtgaaatagagcaggatcggctgattagccatgccaaaacggcgcgtgagcagcaacgttttaatcccgatctggtcattattgccgacgtgggcgcccaaccggcgcatatcagcaagccgctacttgaacggattaaatatttccatagcctgggcagagcaaaagcttattcccgctacctgcgcgaaacaatcaggccgtgtcttgagcggctggagcgcgtgcgtgacagccaggtgtctgcgtctttccggttcatggcgagccacgacgggctggaggggctgctggtactccctgaaatgaatcaggatcaggtcaaacgcctatccacgctggttgcggcacatatgagcatgtgtcttgatgcggcctgcggtgatctgtttgtcagtgacgatgttaaaccagaagaaatccgccaggcatgggaaagggttgctgcagaagccatgcgccttgaggtcattccgccagcctttgagcagttgcgccgcaaaaagcgccgccgtaagccggtgccttatgaactgatcccaccgtcgctggcccgtatgctgtgcgcggactggtggtgtcgcaaattgtggcagatgcgctgcgagtggcgggaggagcagttgcgcgccgtctgcctggtcaacaagaaagcctcaccgtatgtcagctacgaagccgtgatccacaaacgcgagcagcgccgcaaatcgctggagttcttccgctcgcatgagctgatcaacgaagacggcgacacgctggacatggaagacgtggtgaacgccagcaacagcaacccggcgcaccgccgtaatgaaatgatggcctgtgttaaggggctggagctgatcgcggaaatgcgcggagactgcgcggtgttttataccatcacctgcccgtcacgcttccacgcaactctcaacaacggcaggcctaatccgaagtggaccagtgccacggtccggcagagcagtgactatctggttgatacattcgccgctttccgcaaggccatgcacaagaccgggctgcgctggtacggcgtccgcgttgcagagccgcaccatgacggcaccgtgcactggcatcttctgtgctttatgcgcaaaaaagaccgtcgttccatcaccgcgctgctgcgtaagtttgccatccgtgaagaccgcgaggagctgggcaccaataccgggccgcgcttcaagtccgagctaatcaacccgcgcaagggcacgccgacaagctacatcgccaaatacatcagtaagaacatcgacgggcgcgggctggctaaagaaatcagcaaagaaaccggcagaccactgcgtgatagcgccgagcatgtcagcgcctgggcgtcgctgcaccgtgtccagcaatttcgtttctttggtattccggggcgtcaggcataccgcgagctgcgcttgctggcaggtcaggcggcgagagtacaaggcgaacgcaaagcgggtgcgccggtactggataatccgcgtctggatgcggtactggcagctgcggatgcaggttgctttgccacctacatcatgaaacagggcggtgtactggttccccgcaaacatcaccttgtccgcacagcttatgagcttaacgacgaaccgagcgcctacggcgatcacggtatccgtatctatggcatctggtccccgattgcagagggcaagatttgcacgcacgcgatgaagtggaaaaaggttcgtaaggccgttgacgttcaggaggcggcagccgaccagggcgcttgcgccccttggactcgtggcaataactgtccccttgctgaaaatttgaaccaacaggagaaagataaatcagctgatgggggcaccagaacggacattacccgcatggatgacaaggaattgcacgattacctgtacagtatgagcaaaaaagatcgccgggagctggcagcaaggttgcgcctggttaaaccgaaaaggcgtaaagactacaaacagcgaattacagatcatcagcatcagcagctcgtctatgaactgaagtccagaggatttgatggcagcgagaaagaagtcgatttgctccttcgcggtggcagtattccatcaggagcaggcctgcgtatcttctatcggaaccagcgtctgaaggaagatgataagtggcggaaccagtattaa

SEQ ID NO: 373633 - DNA, 189 bp, Salmonella enterica
atgcaggactattttttggagtctttgaagctccagcgcattgatttttttcttaagcttgtagcggctagtgagtgtagtgatgaagagaaggggctggccctgcagtgggtttctgaactgacagatgaactcatggcaaaaatcagaacccacgaatacaaccgctcaatggatgtcatcaattga

SEQ ID NO: 373634 - DNA, 234 bp, Salmonella enterica
atgcgcattgaaataatgatcgataaagagcagaagattagccagtctaccctggacgcccttgaatccgagctttaccgcaatctgcgccccctgtatcccaaaacggtaattcgtatccgcaaaggtagctctaacggtgtggaactgaccggattgcaactggatgaagaaagaaaacaagtgatgaaaattatgcagaaggtgtgggaagacgacagctggctacattga

SEQ ID NO: 373635 - DNA, 732 bp, Salmonella enterica
atgtcaatcagatatcgccttgtttttcgtcaagaaaagaataataggctaaaaatgaaaattaataatgtagcgttaacaatatctcttgctgtaatcctaactggttgcgtgccacatgcttctaaccgaaatatcactgctattgaagtggtgaagcctgctattgggcaaagtgctaccgcctacatgggcgatcccattatcacatctgctactggatttaaaacggacgtactagaacttggtgcggctaatggtgcattgtcttctatcgctgctggtacatattgcagtgaggggaatggaatttaccgcaattatcataaccctcaagctgttgcgttaaaaaatctctatgggcaaatcggtaactatgttgattatgttagttacgatgctgcaaaaaatgagatatcaccgccaaatggcacttcttattctgcatcagaaatttctatcaaacgtgttcctgatggactgtgtcgagtgagtaactcattggttaagactatcgaatacaatggaaatgcaggcggtgtaatgaagttcacctatcgtgaatttgcaaacgatatggctcgtgcagcatttacaacagatttttctgtagattctaagggaagtgatgttatcgcttacaaaggtgccaagttcaaagtgaacaaggctgataactcgtctatttcttatacaattatttctggctttgacaaggctgtcacgttctag

SEQ ID NO: 373636 - DNA, 1698 bp, Salmonella enterica
atgcatagaattgttaaggctcatcttgatagcttcgtaaagagttacggtattgaaaatcatgaagaggatgtgcagttcgagttgttctgtaacaaagccatgctatcttctcgaatcagtatggattttgaaatagatgatgtaacgaccggagctggtgatgatggcatggatggtattgctatcataattgacgaagagttatgcatctctccggaagatgcgtcttctattttttcctctcaacgtaaaaatcacgatgtcgatatcgtttttatacaatcaaagcgtagcgaatcatttgatttaggcgattttttaaaatttaaagcatctgtttttagattcattgatgagtctccatactcttgtttagatgatatccaaaaaaatgcacatgaagtatttgacgtggtgataaaaaatgttcctaagataagaggcggccgcccaagttttaccgctaaatatgttgccacaggaatatataagagccctagagagttagagtccgcgcgaaaactttttataaaagaaatcgaagaattaggttatttttgtaatgttagtgttgagtttgtagatcgtgatgaattaactaggacttggattgatacatactctgtggttaatgctgaattgccattgtttagtaatgctcctctaccaaaaattaatgggatcgaagaggcttatcttgcggttgtaaaagcaaaggattttgttagtaatcttttaatgacggaggagggttctcttcgtaatcatgtttttgttgagaacgtccgagctttcttgggaatagacaaccctgttaatgcgtcgattgctgagacaattaaagatagagatgcggcctcaagatttcctgttcttaataatgggattaccatagtaagcccagatgtaaagcttcaaggcagtatattgcatttggaaaattttcaaatagtcaacggttgtcaaacatctaacgtactttatgagtgccgtgattcattagatgatactatgatggttaatttgaaggttgttgaaacattgaatgaagatgttttttcagaactagttcgtgccactaacagccaaactaaagttgacgaaacacaattctattctcttcgtccaataattaaaaaagtcgaagcgtactttgacacatatgaaggacaagacggccgcttatatttagaaagacgtgaaagacaatttatcggtagagatatacctgcagtaagggtgttttcagttcatatggcggctaaatgtgtcgcagctatgtttttccgtcggccagatctttcatacagatacccaaagcgaatgtacgaattactggctgagaaaatattttctaatgacacgaaagaaattgtattttatgcggcatgtctaacgttatatagacttcacttgcttacatcgaatgcagatatcccacaaaacattaggaagtataaatggcatctaatggctgttgtttgcgtgttaattgctggaaaggacattccaaagtttggctcaaagaaaatggatatttattgtaataaaattataactgagatgacaaaacatggagataaaataaaggcaacctttcaaagagctgtcgatattgttttgtcgatcgatgacattacggatgatagaatgaaaaggcaagcgattttagacgagatgcttgccaagatttag

SEQ ID NO: 373637 - DNA, 1041 bp, Salmonella enterica
atgagtgaactcgaagccttaaccagctcaacgccaacagaagctacggtgcctaaaaacgcaggcgtaactgccgaggctttcagctttggtgacccgatcccggtgctggaccgccgcgagctgctggactatgtggaatgcgtacagatggacagatggtatgagccgccagtaagctttgacgggctggcgcgaacctatcgcgccgccgtgcatcacagctcaccgatagcagtgaaacgcaacattctgaccagcacctttatcccgcatccactcctgagccagcaggcgttcagccggtttgtgcaggactatctggtatttggtaacgcctatctggagaaacggaccaaccggctcggcggcattctgtcgctggagccatcactggcgaaatacacccgccgtgggatcgatttagacacctactggtttgtgcaatacggcatgacaacgcagccctacgagttcaccaaaggcagcatctttcacctgatggagccggatttaaaccaggagatttacggcctgccggaatacctgtctgccatcccttccgccctactgaacgagtccgctacgctgttccgtcggaagtattacatcaacggcagccacgcgggttttatcatgtacatgaccgacgccgcacagaaccaggaggacgtgaacaacatccgccaggcgatgaaaagcgctaagggccctggcaattttcgaaatctctttatgtactcgcccaacggcaaaaaggacgggattcagatcatcccgctgtcagaggtggcggcaaaggatgaatttctgaatatcaagaacgtaagccgtgatgacatgatggcggcgcaccgcgtaccgccgcagatgatgggcatcatccccaataataccggcggctttggcgatgtagaaaaggccagccgcgtatttgtgcgcaatgaattgatacctttgcaggagcgaatgaaagaaattaatgaatggatagggcatgaggtcattaaattcaaagcatacattcttgaagtaatataa

SEQ ID NO: 373638 - DNA, 1719 bp, Salmonella enterica
atgctgctgtactttcagggataccgcgtagcccgcattgctgaaatgctgggcgaaaaagttgcaaccgttcacagctggaaaaaacgcgacaagtggggcgactatgggccgctggatcagatgcagctcaccaccgccgcacgctactgccagctcattatgaaggagcataaagaagggaaagatttcaaagaaattgacctgctggcgcgccagtcggagcgccacgcgcggatcggcaagtttaacaatggtggcaacgaagccgacttaaaccctaacgtcgccaaccgcaacaaaggcccacgccgtcagccggaaaagaatgttttcactgatgaacagatcgaaaagctggaagaagtcttccacgcctctatgttcgactatcagcgtcactggtttgaagccgggaaaacaaaccgcatccgcaacctgctcaagtcgcgccagattggtgccacgttttattttgcccgtgaagcattgattgacgccctgctgaccggacgcaaccagattttcctttctgccagtaaggcccaggcacacgtctttaagcagtacatcatcgactttgcaaaagaggttgatgtggagctgaaaggcgatccgatggtgctgcccaatggcgcagccttgtactttctcggcaccaacgcccgcacggcgcagagttaccacggcaacctgtaccttgatgagtatttctggataccgaaattccaggagctgcgcaaggttgcctccgggatggccattcacaagaaatggcgacaaacctacttttccacgccgtccagcctgacgcacagcgcgtatccgttctggtccggcgcgctgtttaaccggggccgagccaaagcggacaaggtggatattgacctgacccacagcaaccttgcgcgcggcctgctctgccctgacggacagtaccgccagatcgtcaccgtggaagatgcggtgcgcggcggctgtaacctgttcgacctcgaccagctgcgcatggagtacagcccggacgaataccagaacctgctgatgtgcgaatttattgacgatctggcgtcagtattcccgctcagcgagctgcaggcgtgcatggtggacagctgggaagtctggaccgattttcaggcactggcgctgcgcccgtttggctggcgagaagtctggatcggttacgacccggcgaaaggtacgcagaacggtgacagcgcaggctgcgtggttatggcaccaccaactgtaccgggcgggaagttccgcattctggagcgtcatcagtggcgcgggatggactttcgcgcccaggcggacgctatcaaaaagctaacgcagcagtacaacgtgacctatatcggcatcgactcgaccggcgtcgggcacggtgtttatgagaacgtaaaagcgttctttcctgccgtgcgggagtttgtctacaaccctaacgtcaaaaatgccctggtgctcaaggcgtacgacattatcagccaccgccgtctggagtttgacgccgggcacaccgacattgcgcagtcctttatggctatccgccgcgccaccaccgccagcggcaaccgtccaacctatgaagccagccgcagcgaagaggccagccacgcagatttggcctgggcaacgatgcacgcactgtttaacgaaccgctgcagggcgaatccgccaataccagcaacattgtggagattttttga

SEQ ID NO: 373639 - DNA, 1083 bp, Salmonella enterica
atgaaaaagaaaacccgctttgcctttaacgcttacctgcagcagttggcgcgcctgaacagtgtggaggttgaagaactctccagcaagtttaccgtggagccgtccgtgcagcagacgctggaagaccagatccagcagtccgccgctttcctgacgctgattaacatcacgccggtcactgaacagtcaggacagttgctggggctgggcgttggcagcaccattgccggaaccaccgataccaccaccaaagagcgcgagcctaccgatccgacgctgatggaagacgtggaatacaaatgcgaacagaccaactttgatacggtgctgacctacgcaaaactggacctgtgggccaagttccaggacttccaggtgcgtatccgcaacgccatcgtcaagcgtcaggcgctggaccgcatcatgatcggctttaacggcgtgaagcgcgccaaaacctcaaatcgtgctgaaaacccgctgctgcaggacgtcaataaaggctggttacagaaaatccgcgaagacgcgccggatcatgttatgggcagtaaaaccgcagaagacggcaccactactgcggagccggtaaaagtaggtccgggtggtaagtatgtaaaccttgacgctgtggtgatggatgccgtcaacgagctgatcgatgtggagtatcaggatgatgatgagctggttgttgtctgtggtcgtgaactgctgtctgacaagtatttcccgctggtcaacaaagagcaggacaacagcgaaaaaattgccgccgatatgatcatcagccagaaacgtatgggcggcctgcaggctgtgcgtgcgcctttcttcccggcaaatgcattgttaatcacccgactggataacctgtccatctactggcaggaagacacccgccgccgttctgttatcgacaacccgaaacgtgaccggattgaaaactttgaatccgttaacgaggcgtatgtggtcgaggactaccgctgcgcggcactggtggaaaacatcgaaatgagtgatttcactccgcctgccgcacctgttgtagccgcagagtcaggaaatggagagtaa

SEQ ID NO: 373640 - DNA, 465 bp, Salmonella enterica
atgaagtttgttgcgcccgaacaggcaccggaacaggcggaggtcatcaaaaatacgccgttctggcctgatgtggacctgtcggaatttcgcagtgtgatgcgcactgacggcacggtgacgcagccgcgtttaaagcaggtcgtgctgacggcgatctctgaggttaacgctgagctgtacgacttccgcaaccgtcagcagatgctgggctggcggacacttgctgaggttcccgcagaaatgctggacggtaaaagcgagcgtatccggcactaccacaacgctgttttttgctgggcgcgcgctgtgcttaatgagcgttatcaggactatgacgccacggcgtcaggcgtgaagcgaggggaggagctggcggaggccagcggcgatctgtggcgtgatgcccgctgggccatcagccgggtgcaggatgtaccgcactgtacggtggagcttatctga

SEQ ID NO: 373641 - DNA, 204 bp, Salmonella enterica
atgaaagtgcgtgcgcatcagtatgacacggtggacgcgctttgctggcgtcattacgggcgcacgcagggtgtcactgagcaggttctgcatgcaaatccggggctggctgagtacggcccatttttaccgcacgggctgcaggtggagctgccggacattacggcgtcaaccacggcgcagaccgtccagctatgggactga

SEQ ID NO: 373642 - DNA, 234 bp, Salmonella enterica
atgaaatggttaaaaagttactggctgccgttctcggttctggcgctccttgtgatggttgatgtgaatttcccggcatctcatgcgcttttcccactggcgctggttatgtggtttgagtatgccgctttttcactggtttgttgtgctggtttgtactcctgcaccctgacgggggggggatcggctacgcgtccgtcagttgctcagcagggtgctggggctaatggataa

SEQ ID NO: 373643 - DNA, 447 bp, Salmonella enterica
gtggatgagctgcagaaggtggatgactggctgacggcgctgctggcgaatctggagcctgccgcgcgcagccgtatgatgcggcaactggcgcaacagctgcgccggacgcagcagcagaacatcaggctgcagcgtaatcctgacggcagcggctatgagccgcgccgggtgactgcccgcagcaagaagggacgcatcaaacgccagatgtttgcaaagcttcgcaccacaaaatacctgaaaaccaccgccagtgcggactccgccagcgtgcagtttgatggcaaggtgcagcgcattgcccgtgttcaccattacggcctgcgggatcgcgtcagccgaaaaggcccggaggtccgctacgcagagcgccgcctgctgggcgtgaatgaagaagtggaaaccgtcacccgcgacaccctgctgcgctggctggcggggtga

SEQ ID NO: 373644 - DNA, 1575 bp, Salmonella enterica
atgagcgcaaaattttataccctgctgacggagatcggcgcggcgaaactggcaagcgccgccgcgctcggtgtcccgctgaaaattacccatatggcggtgggcgacggtggcggtgtgctgcccacacccagcgcgcaacagaccgcgttagttgctgagaagcgtcgagcagcgctgaatatgctgtatatcgacccgcagaacagcagccagattattgctgagcaagtgatcccggaaactgaggggggatggtggattcgtgaggtcggcctgtttgatgaaaccggcgcactgatcgccgtgggtaactgccctgagagctacaagccgcagctgacagaagggagcggacgtacgcagaccgtgcgcatggtactgattaccagtagcaccgataacatcaccctgaaaattgaccctgcagtagtgctggcaacccgtaaatatgtagatgataaggcgctggagctgaaggtatatgtagacgacctgatggcaaagcatcttgctgcgccggacccgcattcacagtatgcgcagaaggacagcccgacactcacagggattccaaaggtaccgacgccagcggcgggtaacagcactaaacagattgcgaacacggaatttgtggcatcgtctattgcggcaatggtggattctgcgcctgcagcactggatacgctgaacgagctggcagcggctctggggaatgacccgaactttgccacgacgatgataaacgctctggctggaaagcaaccgctggacaatacactgacgaatttaagcggaaaagatatcgccggccttctcacatacctcggtttaggcgaaacagcaaagcaagctgcgggcgcagtccagaaaactggcgatgagatgagcgggaagttaaccctgccacagacatcttccttcggcgtgaatactaataacacactgggcggtagttccatcgctattggtgataacgataccggctttaaacagaatggtgacgggatactggatacgtttgcgaatagccagcacaccgttcgtgtcgctcccggtgaaatgatggttctgggagctattcgcgcaggcaaagaaaaaaaactgtcactgacgagtaataataattcgacaatgacagccacgtttaatttatggggcgacgcaaacaggcctacagtgattgaactggacgacgaccagggatggcatttatacagccagcgaaatcctgatggttcgattgtctttacggtcaatggcgatatcaccgctaacacgcttcgtgcaggcggggccatctatcagaataacggcgacatctttggttctgtctgggggaatagctggctgagtctgtggattaataataatttcgtcgcagatgttcagttaggggctggcacatcagtgactacctggaacaatgcaggttcctggcctaacactcccggatatgtagttacctccgtctggaaagatgcacaaggcgaaaatattgatggtattaattatgcgcctttgcaaaaacgagtcgggaatcagtggtataccgtacaagggggaacggcataa

SEQ ID NO: 373645 - DNA, 588 bp, Salmonella enterica
atgaaaaaatatcagaatatcaaaaatttcagacttattgacgaccccgtaagcaggggtaaaactcaggccgaaataaatataggtgcatatttcctggaatcggaagacgggcaggactggtatgaatgtcagtcattattttctgatgatactgcaaaaattatgtacgatcctgaaggggttatctggggtgttgttaatcatccagtcccgcaacgtggaaacacatatgctgtatcaatgttgtggccggttaatatgtctgttgcggaaatagacgctgctgactgtcctgatgattgtcgtggtgatggctcatggttgtacagagatggtaaggttttacccgttccggtggattatcaggctaaggccgaaaccacccgacagaaattacttaacgatgcagataatgccattaaggactggcgcacagaattaacgttgggaattatcagtgatgaaaataaagcggctttgattttgtggatgaactatatcaatgttcttaaatcgcttgacttaacagacgtttcagatgaggccaccttcaccgcaatcaggtggcctgcattaccacaataa

SEQ ID NO: 373646 - DNA, 408 bp, Salmonella enterica
atgagcgattattattacagctttaaagagaaaggttttttctacaagccggataccgaatcgggcgatttcccgactgatctaattcctctgactgatgaacattaccatggacttatgcagggtcaggtggacggaaaatatattgagcacaggaaaggaggcccggtactggttgagcatcgcgaatatacgcctgaagaactggttgcacaggctgaatccagaaaagcggaacttcttgctgaggcagagtcagtcattgcgccactggcgcgagcggtaaaattaaaaatggctacagatgaggaaatcaagcggctggaggcatgggaactctacagcgtactggtaaaccgggtggatacctcaaaccctgactggccggataagccagtcagccagtag

SEQ ID NO: 373647 - DNA, 1020 bp, Salmonella enterica
atgccatttacgaccgttttctgcattttcataaacctcggtttaggcgaaacagcaaagcaagctgcgggcgcagtccagaaaactggcgatgagatgagcgggaagttaaccctgccacagacatcttccttcggcgtgaatactaacaacacactgggcggtagttccatcgctatcggtgataacgataccgggctcaaagggaacggcgacggtaatctggcatttatggctaacaacgtgctggcaggatattttaatgaaaatgaattgcagcacagtaaaaagatgctgactaaaaattttcaggctcttgttgataataactggccggagggggcggggggattttctggtcagttaagcagtgaagcaccgtttagtgtaccaatggttcaccgtcagaataatgataataattttttcccgctcctgaaaggaaaggtctcactggagtctggctatcctgtagccgcctctttcggaatattaactagtgggaatactaatttcccacaaattgcaattcatgcaaaaacagactttgatgttaacgataaaatatgggtatttgatgttgcaaccggagaatttcgcgcaccgggaaggattactgctacagaaattttattgagcggtaaaagccgtgttggtcctgatggtaatttatatggtgatgtgtggggtggctggctgaatgacttccttattaataattacaaccgtaaaaatactgccagcctcggtgattatggctgggttcgtgacgaaagcaccgggtttataatgcaatgggggacacttggtagctcaaacggaacctacaatttcccgcgagagtttccgacatcctgctttgctgtatttgtcaccaacactaatcagcagggaggttcagtggataatgcgtttggatacccggtgagtaaaagccagttttttgccgcaactaaagcatcaacagacggaaatgtcgtaaatggctatcctgtagcctggtttgcgatcgggagataa

SEQ ID NO: 373648 - DNA, 2181 bp, Salmonella enterica
atgacccgcgccgcccccgatgtagaagaggtactcagtgagcgcgcgctaagccaatgggcgcaggccatcagccatgtcgccggtcattatcgcgttgcctgttctcccggttcaattcaggccaacgccccgtggtttaggggtaaaagcagaacgaccgccttaacgcagctcgcgcggcaggcgggtttatcctttcatgcgccggacatagacaaaacggcatttagtcagtggcgattgccgttggttgtcgagctccgggacgggcagttattggtcatcgaacatgttaatggcgaagatgcggtagacgtttttgtgattgaagaagagggtcagcgtaacctcctgacgctcagcgagttattgccggagatcctctatgttgccgcgctacgcccgctatcggcgctcaaggatagccgcgtcgaccgctatatctcccgctttaaacctgactggatgcgcgagctggttctgcaggatattcgcccttatttaccggtaatggtcgccgcctttctgattaacgtgctgtcgctggccgggattgtgttctctatgcaggtttacgatcgggtgatccccgctcagtcatatcctaccctgtacgttctctccttcggcgtgctggtagcggtgctgttcggttttctgctgcgtgaagcgcgtacgcacattatggacgtgctcggtaaacgcgccgatatgcgcatttccgatcgggtattcggtcatgcgttaaggctgcgcaacagcgctattccccgttccacaggcagttttatctcgcagttacgcgaactggagcagatccgcgagatgattacctcttcaacgctggcgaccattgtcgatctgcctttctttttcctgtttatgatagtcttggcgattattgccccaccgctggcatggatagcgcccgtggcggctctgctgatgatcctgccgggcgtcgcactgcaaaaaaaactggctgtcctcgccaaccaggccgcccacgaagcgacgctacgcaatgcagtcttggtcgaaagcgttcaggggctggaagatattaaactgatgcaggcggagaaccgctttcttcagcagtggaatagctatatccgtattaccggcgagtcgggtctacgcacccgcaaactcacgcaagggcttatcagttgggggatgtcggtacaaagtctggtgtatgccgcagtgattatgttcggcgcgccgatggttattgaaggcagtatgactaccggcgccgtggtcgccgcgtcgatgctcggctcgcggatgatcgcgccaatggctaacctgtgcggcgtgctggcgcgctggcagcaggtgaaagcggcgaagatgggtctcgacaacattatgcaactgcccaccgagacacagcatgacgatagcctgatacaccgcgacatcctccacgggcattacctctttgaaaacgctcagtttcgttaccataacgacgatcaacgcataccgctgcgcctcgtgcgtctggagatcatgccaggcgagcggattgcgatactggggcgtaacggcgcgggtaaatccacacttttacaggcgatggcgggcggcctggagatgattcagggagatgcccggcttgataatctcagcttgtcgcacatcgatatggcggatttacgccgcaacatcggctttcttagccagaacgcgcggcttttcttcggcaccctacgagagaacctgacgctcggcgcgccgcacgccaacgatgaacagatttttgacgcgctcgaagtcagcggcggcgccgtcttcgtcaggcggctggcaaaagggttggatcatcccattatggagggtggtaacggcctgtccggcgggcagcgtcagtccctgttgctggcgagaatgctgctgcgctcccccaatattgtgctacttgacgaacccagcgcctcgctggacgagcatacggaacgagagtttattcagcggttacatcagtggcttggcaatcgaaccctggtcgtcgcgacgcaccgggtaccaatactggagctggttgagcgtgtcgttgtcctgaaagaaggacaactggtgatggatgcgccaaaagcgcaggcgcttaacgcggatcggatgcaaagtcaccgtcgggagtggaaaaatgaaaatcaatcagcatga

SEQ ID NO: 373649 - DNA, 1011 bp, Salmonella enterica
atggcgatttatacccgaacaggtgacgctggcaccacatcactgtttaccggccagcgggtgagcaaaacccacccgcgggttgaagcctacggcacgctggatgagctgaacgccgcgctgagcctgtgcgcctgcgccgctgcggatgaaaatcaccgcaccttactcgaggccatccagcagcaacttttttggtttagcgcagagctggccagcgacagcgagcagccgtcgcccaaacagcgctacatcagcagcgaagagatttcggctctggaagccgctatcgatcgggcaatggcccgcgtcgaaccgctgcacagctttattttacccgaacgctgcgaagccgcgagccgcttacattttgcccgcacgctggcgcgccgcgccgaacgccgtctggttgaactggcaactgaagtcaacgtacgccaggtgctgatgcgctacatcaaccgcttatcggactgcctgtacgccctggcccgcgcggaagatagcgatgcgcaccaggccaacatcatccatgaagttagcaagcgctatctggctgccagccagccgacccgcagcaaggagacaacacccgtggccctctcattccacgatctgcaccagctcacccgcgccgccgttgaacgcgcgcagcaactgcaggttccggtagtcgtcagcatcgttgacgcgcacggtacggaaactgtgacctggcggatgccggacgccctgctggtcagcagcgaactggcgccgaaaaaggcctggaccgcagtggcaatgaaaacggcgacccatgagctgagcgatgttgttcagccaggcgcggcgctttatggcctggaaagtcatttacagggaaaagtggtcacctttggcggcggttacgccctgtggcgcgacggcatattaattgggggtcttggcatcagcggcggcagcgttgagcaggacatggacatagcacagaccgccatcgcggctattaacgtgggaattcatcaatga

SEQ ID NO: 373650 - DNA, 765 bp, Salmonella enterica
atgagcattagtcgtcgttcttttttgcagggggtgggcatcggctgctctgcctgcgcgctgggcgcttttccgcccggggcgctggcgcgcaacccgattgccggcattagcggtaaaaccacgctaacaccaagcttgtgcgaaatgtgttcctttcgttgccctattcaggcgcaggtagtcaataacaagaccgttttcatccagggcaatccttctgcgccgcagcaggggacgcgcatatgcgccaggggcgggagcggcgtcagcctggtcaatgacccgcaacggattgtaaaacctatgaaacgcaccgggccacgcggcgacggtgaatggcaggtgattagctggcaacaggcttaccaggaaatcgcggcgaaaatgaatgccatcaaagcgcagcatggccccgagaccgtggctttctcttccaaatcgggctcgctttccagccatcttttccatctggctacggcctttggttcgcctaatacctttacgcacgcctcaacgtgccctgccgggaaagccattgcggcaaaagtgatgatgggcggcgatctggcgatggatatcgctaacacgcgctatctggtttcgtttggccacaatttgtatgaagggattgaagttgccgatacccatgagttaatgaccgcgcaggagaagggggccaaaatggtgagcttcgatccgcgtctgtcgatattttccagcaaggcggatgagtggcactctattcgtcccggggggatttag

SEQ ID NO: 373651 - DNA, 759 bp, Salmonella enterica
atgaagatatcatcaggcgcaattaatttttctactattcctaaccaggttaaaaaattaattacctctattcgtgaacatacgaaaaacgggttcgcctcaaaaataaccagtgttaaaaacacgcatgcttctttaaatgaaaaaattaaaacaggaaagagctcatcgattgagttcgcgttaccacaaaaaataaaagacttctttcagccgaaagataaaaacaccttaaacaaaacattgattactgttaaaaatattaaagatacaaataatgcaggtaagataaatatttcagcagaagatgtctcaaaaatgaatgcagcattcatgcgtaagcatattgcaaatcaatcacgtgattataattacagagtgacaggtgcggccccgctccccggtggagtctctgtatcagctaataacaggcccacggtttctgaaggtagaacaccaccagtatcaccctccctctcacttcaggctacgtctttcccgtcatcacctgccgactgggctaagaaactcacggatgcagttttacggcagaaagccggagaaacccttacggccgcagatcgcgatttttcaaacgcagatttccgtaatattacattcagcaaaatattgcccccagcttcatggagcgagacggcgatattattaaggggttcaacttttcaaattcaaaatttacttattctgatatatctcatttacattttgacgaatgccgattcacttattcgacactga

SEQ ID NO: 373652 - DNA, 1203 bp, Salmonella enterica
atgacagaaacgtcatctcaccgctataaaccacgcaatataataaatgcgccaaatgtaaaatcgtctattttttcccggagccaacaacgcggcgacagcgaaaatatccagcgctggttaagcaaccatttttatcgttggatcatcggtgactttcctcatgtttatcctgtgcgttccgtcgccgattatgccgtttattttagcgctgatgcagaaatccccgcctggctggcgccaaagctgggtggcgatgagcgcttttactaccttaacgttcagcacccgcaacttgtggcaatggaaagagatttagtggaatttctttcgcgtcaggaaggaacgcggctggaaactaaactgcagcgcatcaactgctttaccgtgctggcaatgcgcgaagcggagcatcaaaaaatgcagcgcctgcgtgaacaaggttggtatccctccaacagcgaggcgctaaaaccggtgatgacggtgaataacggtgtgctggttgaacttgatgcaacaaatcccggcctgcgcagtgagatggcgtatgaatcctggcatatgcaacactgcgtcggagattttgataataaaggtgcgctttccggcggctacggcgattactacgcccggcaaatggaacaacaaaaacttcacctgttcagcctgcgcgacggcaataatattccccacgtcacaataagcctagtggttggtaataacggcctgagtattgatcagattaaaggtaagcaaaatcgctatcctattaagaaatatgctaacgatgttttatctctgttacgccatctgcaaccacttcctgagcgccacgctgattgcgaagggatgggaatagtttatgaatcgacgccggaatattcaggttggaaatttattactcatattcatgacctcaattttctgctcaatgtgctgcatgacaattttcatttaatggagcacttccctacgcctccggtggctttacagtggctgctgctgcacagcaccccggaggcgctgcgctaccttcaggttgttgatcctaacgtggcgacggctgcggaaatgctgtttccgcagcatgaatggcaccctacgcttgccgggaaaaacaccagtagcgaacctttcgaaattgaaagcctgacgctacaaaccacgcgctatctttctgcaaccagggaggagcgctaa

SEQ ID NO: 373653 - DNA, 720 bp, Salmonella enterica
gtgataatacaaagaaaatctctatttctttgcgccctgcttctactctgcgccaccgccagggctgaaattacggagcagcagatcgaggccgactgcgcaaaaattccagtttttgccagccagggcgaacagctttacaagacccaaaagtatgccaaagcgcgcgacgcttttgaacagcaggctgcatggagcgaaagctgcgcccttgacgacagcgccatcgcgacggcctacaacaacgtggcgctaacctggatacgcgaaggcgagtggcgtaaagcccgcgcctggctgatgctaaggccgaatgatagcaagtcgatctacaacctgaaactgatcaaagataagctatcggccctgccgccaccggtttttgcggcgggtgaatactggcgctatgccgggcgcgcctcctggaacgtgcttagcgtgaaggcattacccaccccatcgcgctatcaggttaattttcagggttactggttcggtttaatggggatctacttcggccccaatatcggcgagttctccgcaacggtaacgctggaaaacgataaaaccatcgtggcgcttcgggaaggcgatgatattcactgcgacatttcgctggctttttcttctgaaaccattgatgccagcaccgatacgtttgtggactgcggttttagcgcaaatgtccgcgccgacgggcactatctgcgcgttgaataa

SEQ ID NO: 373654 - DNA, 744 bp, Salmonella enterica
atgttaatgccgactatgaatagttatagattaactttttctttaagtttactgcgttcggccatattgtttggcattattttaacaagtgttggttgtaataatcaaaagagtaaagaattggttctctctgttgattccacgcagttttcgcaattggcttgttattataaggatattaattccgatgataatgtaatggagttaaaattaccaggtgaatataaagagaaaactaacttatttaatcaacaggaaattaaggtgccggtaaaaggtgagaattttctttctccgtatattggtgatggtgtccgttattatgaattagggtactttggacatgatggtaatatttacaaattgataatttataataaaattggagagtctgatacgtcattgcttaatgtgcaaataaatagttacgatgcaaaaggaaacctggtggatgctttattgcttagtagcttttttgcttatgaagatatcgtgcgtttttctgattttgtcatccgccaggattacacaataagcattgatagttattttatatataggtggtatgaagacagcaaagatggtcatcttgtaactataaagtttaaagatcaggcgcctcagatttatataaaggaacaatatcaaatggaaaatggtcggttcaaattgatatccagaaatgaagtatcacagggtaaaaaaaagaagcgagcgttaaatataccatgcttacgacattaa

SEQ ID NO: 373655 - DNA, 498 bp, Salmonella enterica
atgtcaaaaaaatttttctctataattatggtcatatcattcgttgcggcgataacagcttgccagtcttctattcctgaatatgtcaggagtaccctcaacgggcactctatccaggatgttttggtgtatatgaagggattgcctttagataaaaggtatgatttttattattatggtacacgtgctaaaagaccatatccattatggatggctgatggtattgcccctatgggatcgaaggctattcctctattgagagacaaactttccaccacaaatagctcttttgaaaaaatgacaattatatatttgttatctgtgatgtcagttcatggttgctatgatgttaagtctgacagcgaattgttttcgttggttatgcagaaggaacgtgaattaaatgatgataattatcatgattatatcactaatatgaacgatttttatgagtttggaagttctttaaatagtacagaaagaataaagtgtgaataa

SEQ ID NO: 373656 - DNA, 378 bp, Salmonella enterica
atggataaaattattgctgactatgtggataaatttagttctttttcggactctatatcagaaacaattgtgtccgttaatgagtattggattcctgatgagtcaccgttgattatgctattttcgcagattggtaagtctttggtagcgatattttctgaacttgattgtgttaaaaaagagttattttttaaatatattgaagatgggatggcttcagataatgatgaattagccactgccatagcaacaggtcttgttgaggcaatagttacatcgacagacgccaatcaacatttatggggggaaatagaggggttgttgggagtaaaatctaaggaacatgctctggcttggaggaattttgggaaatcatga

SEQ ID NO: 373657 - DNA, 435 bp, Salmonella enterica
atgcgatttgttattatatttataatgttaatagtatcattttacacatttggtggcaaaatggctaagtctaaagacgataataaatggaggtcggaatccacttccaccatctataatctaacggatgagcaaaaattcgagcttgaaaacaaatcgaaagatggagactcggaagcatcatttcgattatatcaatattattgcttcaccataaataacattgacgaacaattaaggtatttggagatatctgcatctcaaggaaatatcatagctcaatataattatggtatttatttatccaatacaaatccagccttttcaaagtattatgatttggacaaagctatttattggatgggattggcttcaaaaaatggtgatataggtgctcaaaacaagctacaagaactggaaaaattaaagaattag

SEQ ID NO: 373658 - DNA, 867 bp, Salmonella enterica
atgaaagttattgaaaaatacaaacaaaaaaaagaaagaagagagatttttctatatgaaaagtataaaaactacaccatagaacaactcactcctattttgtatgataatgacaccttaaaaagaaaagctgctatattttgcctgcaaatattaagtgaagacgatgtttttaatttatccatgaatctttgtcattccagggataactataaaaagaaaattggagttactattttaagtcaaatgaccatgtcatatgagaaactgcgaaaatctttttgttttttagaaaacatgttccaactcaataaatcagtcttgataagagcctctattatcaatgcgttagggtatttttgtaaaaaagacaaacatttcgaaaagaaatttattaatttatgcactaaagtaattcatgataaatcggcaaatgttcgatgtgcaattgcagcagcactatcaaatattaatgataactcgacaatacctttattgctatgtttacttcgtgataataatagcgacgtgaagaattgggctgcattttctataaatttcaatcaatatgacaccgaggatatcagagaggagtttgtggggatgttattggatacgaatgatgatataagaattgaggttatatcaggtctggcagagagaaaggatgaacgtgttctggaaaccataattaaagaacttaagaaaggtgtgatttttgatgaaattattattgcagccgggaatgccgggagtaaagaattacttcctattctaaatgaactattaaatgaatttagagatgaacgtattatagacaaaattaatgaatcgataaaaaaaataaaagaaaatgtttgtgaataa

SEQ ID NO: 373659 - DNA, 234 bp, Salmonella enterica
gtgagcggaaaaccagcggcgcgccagaatgatatgacagcaaaaggcggcccgatagtccagggttcagcgggagtgctgagaggcgcgccgacaggcgtggcgtgttcggtatgtccgggtggaatgacgtccggcgagccgataaacccgctgccgggggcgaaggtgctgccgggtgagatcgacttcacgccgcccggcccgctgccgttcatactcacccgcgcctaa

SEQ ID NO: 373660 - DNA, 216 bp, Salmonella enterica
atgtttcagtatagcgagggggagccatcaattccagtaattgttccattaaatgttagtggaaataatatctcattcaatctgccaacaaatacttatgacagaggtaggttcgatggggaaatattacaaggtggttggttgattggtgaatttgaaagaaataagcaaaagttaaaattaacacgtaaaaatagctactggcaatacaggtga

SEQ ID NO: 373661 - DNA, 690 bp, Salmonella enterica
gtgtacctggagcaggtgatacggctgccggggcagcaatatgataaggagtcggggctgtattataaccggcaccgttactataatccggggcagggaagatatattacgcaggattcgatagggctgtccgggggattaaatccttatacttacccgctcaatccggtcgtaaatatagatcctctggggttagtcaatataaatttattccctgaaaatcaatatattcatgatatagccgatcatattacaattcccggggttttcactgttggagtacatggcagtcctttatatgttgaagatgcttcaggtaaccctgtagatgtgaaaaaattggcggacatgatcaggaaagatcggaattatagaaaaggcaaaccgattaagttgatttcttgcaatacagctaaaggtggagaaggatcttttgctagccagttggcgaaagagcttaacgtgaatgtgactgggccggatactctttggagtgtatggtgggaaaatgataattctggtattcctcaaatggatagtgtattaacagcaccaactgattctcagccatggactcgtggacatcctactgtacttgatgagaaagatagggggaattgggtgacatttggtcccgatggtaacgagatctcatctgttaaaagtgagttgagaagccctcagagataa

SEQ ID NO: 373662 - DNA, 564 bp, Salmonella enterica
atgagaagccattgggatgtggaaaataaattgcattggcgtttggatgtggcgatgaacgaggatgattgcaggataagaaggggaaatgtcaagagcttttttgaaataataaaatcgggtgaatatgaaatttggggatgtgagataatgagatggataagaataaatatacttaaatgtacgttagtattttgcctggcttgtggtttttcatttgcaaaaacaccatgtactaatatgtctgataaattgagtgctgcacaaagagattctttgcaaaataatatcaaaaggcaactaaaaacagaacgattaaatatacttgaattttttaaagagcaaaatagttcaatcgtctatatagaaacatatggtgccgatgaggcgtttgttttttattctggagatgagtttaaggatgattttatcacaatatggagtggtgcggctgaaatatcagaggaaaaaaatatagaaaaatgggtaaaagatcattttccatatattccagataggttggctcgatgtttcgcatggtacacaatctataggcatgactga

SEQ ID NO: 373663 - DNA, 444 bp, Salmonella enterica
atgaaagcgaataatgtgattatttttgtgattctatttttatcctctgtgagttattgttttgctgatatgaagatattaaaaataaatcagtcccattatatgagtccttataataaagagcctggggatagaaacttatgcaataaatgggttttaaatgcaagtcagatagaaaaaatatttttgttaagtgataaatataaggaaatgagtgataccatgactggattttggctctggtttccttgtgaaataacgggtgagttgatttataataagaaaaagtggcatttttctattaatgctgctgccacggcagaatggtccgatggtaaggaaacgatatactgggggtgttccagggaaaaatgtgatgacatgtttatacttccatatccaggccggagttatataggtggtggtggcaaattgatttggtga

SEQ ID NO: 373664 - DNA, 420 bp, Salmonella enterica
atgagcgattttataaaatatctatttatttttccttgcttatggtgcgcaaattcttttgcgattactcaaactcaatgggatggtaactttagagtcgaggaacttggcgagcagttaaatgatgggagtcaggtttttttacaatataatttaaagatagatagtaaaaataatcgtgcttctttatccatgacaacctggcatgcggggataacatgcattggtgactactctttaaaaatcaattctggtgttttggcattatactataacggcgacgaggaaaatgcatgtccatatccatcaccgcaatttgagataagcaataaaggaaaagcatattatataaaaggaaaaatgttttcatattctcagcctggtaagtggttgccactcaaacgtattacactaaaataa

SEQ ID NO: 373665 - DNA, 618 bp, Salmonella enterica
atgatgaaaatgagccgcacggccatcgcgttgagtctgctgggaatggtcgcgcatcccgtttgtgccgctccgtcgtttgaagagacggcaagacaggtgattatcgcttttcagcagcgagacaacgcgaaaattaatgccctgattgataaaaaagttgggatgtatgtgctgtaccgaattggggctggggttgattataagtggatgaaaagttttgatattaataagccgatacccggttttaactacctgttggggcaggtaggttggttttcagagcatattcctgtggataacgaatttgatcaccacacggaggctgagtacgtttgtgaaaagggatgggatcacgccggtttttttgtcagctataccggtactaataatgcgctgctgacgtttagcatggtgaatggagcggatagtggagatcaggcgtcggatacccgtatagcaaacgccaggcggcttgagctgcaatcagagcgagtggtggcagtgccgaaaaaatggggtgatggtttgatttttcatctgagcgaacttcatggcttgggcaaagggtggagtttaacgctgctggatttggtcacggaagattgtagtgcgtga

SEQ ID NO: 373666 - DNA, 1242 bp, Salmonella enterica
atgccgcaacaaaattatctggatgaactcacgcctggttttacgccattactggcaataaaagaggcttcacgttgtttattatgtcacgatgcgccctgtagtcaggattgcccggcgcaaaccgatccggggaaatttattcgttctatttactttcgcaattttaaaggcgcagcggaaactatccgggaaaataatgcgcttggtgctgtctgcgccagagtctgtccgacggaaaaattatgccagcgcggatgtacacgttccggaatagataaacctattgatattgcacgcctgcaacgttttattaccgattttgaacagcagactgccatgcagatttatcagcccgggagtaaaacacgcgggaaagtcgcgattattggcgcgggtccggcaggtttgcaggcaagcgtgacgctcacacatttaggctatgacgtcaccatttacgaaaaacagccgcagcccggcggatggctgcgtcacggcatcccggcatttcgtctgccgcaaagcgtactcgatcaggaaattgcccgcattgtagaaatgggcgtcaatattaaatgtaattgtgacgtgggcgggtcgctatcgcttgcgcaactcaaagccgaatatcgcgccgtgctgatgaccgtcgggatgtcctgtggctctgatttaccgttatttgagcaagccagtcacgtagagattgccgttgattttttacagcgcgcccgtcaggccgacggcgatattagcgttccgcgtagtgcattaattattggcggcggcgacgtagcgatggatgtcgccagtacgttaaaaattctcggctgcccttccgtcacctgcgtggcgcgggaagaattagcccaatttcccgccagcgaaaaagaatttaccagcactcaggcattaggcgtatcaattattgatggctttacgcctgtcgccgtcagcggaaataaagtgaccttccaccatgtacgccactcaggagaactgacgctggaagcggaaaatattattttggccgtggggcagcacgcgcgactggatacctttgcggagataaaagcgcagcataatattatcgacacgcataattatcaaaccgacgacccggcgatctttgccgctggcgatattgttaaaggtgataagaccgtcgtttatgcggtaaaaaccggaaaagaagccgctcaggccattcatcattatttagaggaggcctgctcatgttaa

SEQ ID NO: 373667 - DNA, 1236 bp, Salmonella enterica
atgttaacaaaagatttgtctgttaccttttgcggcgttaagtttcccaatccgttttgtctttcttcttctccggtaggcaattgttatgagatgtgcgccaaagcctatgataccggctggggcgggatcgtttttaaaaccattggtttttttattgccaacgaagtctctccacgttttgatcacctgacgaaagaagataccggttttattggtttcaaaaacatggagcaaattgctgagcatccgctggaagagaatctggccgccattcgacggctaaaacaggattatccggataaggtgctgattgcttccatcatgggggaaaatgagcagcagtggcaggaactggcgcgtctggttgaagaagccggcgcggatatgattgagtgtaacttctcttgcccgcagatgacctcgcacgccatgggaagcgatgtagggcaaagcccggaactggttgaaaaatactgccgcgccgtaaaacgcggttcatctttgccaatgctggcgaaaatgacgccgaatattggcgatatgtgtgaagtcgcgctggccgccaaacgcggcggggccgacggtatcgccaccatcaacaccgtgaaatccattactaacatcgacctgaaccgcaaaatcgggatgccggtggttaacggtaaatccagtatctccggttattcaggaaaagcggtgaaacccattgcgctgcgttttatccagcagttgcgaatgcaccctgagctgcgcgatttcccgattagcggtatcggcggcattgaaacctgggaagacgctgccgaatttctgctgctgggcgcggcgaccctacaggtgacgacaggcattatgcaatacggttaccgcattgtagaagatatggcgagcggcctcagccactatctggccgatcagggatttgcctcattacaggagatgatcgggctggcgaatggcaatattatcccggcggaagacctggatcgcagctatatcgtctatccgcggattaatcaggagaaatgcgtcggctgcggacgttgctatatctcctgctatgacggcggtcatcaggcgatggagtgggatgaacacagccgcacgccgcattgcaatacggaaaaatgcgtcggttgtctgctgtgcggtcatgtctgcccggtcgcctgtattgatttaggcgaggtcaaatttaaaaaaggcgaaaaagagcacgcgttaacgctgtag

SEQ ID NO: 373668 - DNA, 1011 bp, Salmonella enterica
atgagtgcgttaaacaagaaaagctttttgacctggctgaaagagggcggaatttacgtcgttcttttagtgctgctggcgattattattttccaggacccgacttttttaagtttgctgaatttaagtaatattctgacgcaatcttcggtacgtattattatcgcgctgggcgtggcgggactcatcgtcacccaggggacagacctgtcggcggggcgtcaggtagggctggcggcggttgtggcggcaacattactgcaatcaatggaaaacgccaacaaagtgtttccggaaatggcgaccatgccgattgcgctggtcatcctgattgtctgcgcgattggcgcggtgattggcctggtgaacggcatcatcattgcttacctgaacgtgacgccgtttattaccacgcttggcacgatgattatcgtttatgggatcaactccctttactatgactttgtcggcgcttcgcccatttccggctttgacagcggcttttccacctttgcgcagggctttgtggcgatgggcagtttccggctctcctacatcaccttttacgctctgattgcggtagcgtttgtctgggtgctgtggaataagacccgctttggtaaaaacatttttgctattggcggcaacccggaagcggcgaaagtttctggcgtaaacgtggcgctgaacctgctgatgatttatgcgctctccggcgtgttttatgccttcggcggcttactggaagcagggcgtattggttctgccaccaataacctcggctttatgtatgaactggatgcgattgccgcgtgcgtggtcgggggcgtatcgtttagcggcggagtgggtacggtcttcggcgtggtgaccggcgtcattatctttaccgtcatcaactacggcctgacctatatcggggtaaacccgtactggcagtacattatcaaaggcggcattatcattttcgccgtggcgctggactcgctgaaatacgcgcgtaagaagtag

SEQ ID NO: 373669 - DNA, 351 bp, Salmonella enterica
atgcagatgatcgaaattgcgaaggcgttttcctataacgctaagatcgttattatggatgaaccgacctcatcgctaactgagaaagaggttaatcatctgttcaccattattcgcaagctgaaagaacgcggctgcggcattgtttatatctcgcataaaatggaagaaatttttcaattgtgcgatgaaattactatcttgcgcgacggtcagtggattgccacccagccgctggaagggctggatatggataagatcattgcgatgatggtcgggcgttccctgaaccagcgcttcccggataaagaaaataagccgggcgacgtgattctggagtacgtaacctga

SEQ ID NO: 373670 - DNA, 498 bp, Salmonella enterica
atgggcagcacgatttctccgtcgtcgggtgaatatttgttggaaatgcgtggcattaacaaatcatttcccggcgtgaaagcgcttgataatgtcaacttaaacgttcgtccgcactctattcatgcattaatgggcgaaaacggcgcaggcaaatcaacattattaaaatgtcttttcggtatttaccaaaaagattccggcagcattgtatttcagggaaaagaagtggacttccattcggcgaaagaagcgctggagaatgggatttcgatggtacaccaggagttaaacctggtattacaacgttcggtcatggataacatgtggctgggacgttatcccaccaaaggtatgtttgtcgaccaggataaaatgtaccaggataccaatgcgatatttgatgagctggatatcgatattgacccgcgcgcgcgtaggaacgttatccgtttcgcaaatgcagatgatcgaaattgcgaaggcgttttcctataa

SEQ ID NO: 373671 - DNA, 717 bp, Salmonella enterica
gtgctgccgctggccgccatcgtggcgggcgggtggataatcgtcgcccgcacgcgccggcgggtgcgcctgcgccgggagccgctgccggcggaccccccggtttgcggcgcgcgcgccgggtggggcgtttacgtgccgggggccgtcattgcgctggcggtcggcgccggcagctacgccctgaccggcagctatccgcaggtgagggcctggcagcaggcaacggcgcagacgccgggactgctggcgcgggcgctggacccgcaggcgcagccgctgaatgaggaggagatggcgcggctggcgctggggctgcgcacccgcctgcaaaatgatgccggcaatgttgagggctggctcatgctggggcgcaccggtatggtactgggtaatgccggtaccgccaccggggcgtatgcgaacgcctaccacctggacccgaaaaaccgcgatgcggcgctgggctacgcggaggcgctgacgcgctcgtccgacccggaggataaccgctgcggcggggagctgctgcgtcagctggtgagccgcgaccacacggatatccgggtgttaagcctgtatgcgtttaacgcctttgagcagcagcgctttggcgaggcggtggcggcctgggagatgatgctgaagctgctgccggcgggtgacgcccggcgggcggtgatagagcgcagtatccggctggcgcaggagaaataa

SEQ ID NO: 373672 - DNA, 1620 bp, Salmonella enterica
atgacgttgccctttaaaccccatctcattgcccttgtgtgcagtgccgggttatttgccgcttcgggcgtactgtatgttaaaagccgcgctcccgaagcgcccgcgcaggcggcgactcccgcccctgagcaaacgcagaccgctgtgcccgcgcctgtcgcgaaaacgacctttaccactgcgcaaattgatcaatgggtcgcgcctgtcgcgctttatcccgatgccctgctttctcaggtgctcatggcctccacctacccggcgaacgtggttcaggccgtccagtggtcgcgagataaccccacactgcagggcgatgccgctattcaggcggtggccagccaaccgtgggaccccagcgtcaaatcgctggtcgcctttcctaagttgatggcgcttatgggcgagaatccgcaatgggtgcaaaacctgggcgatgcgttcttagcccagccacaggatgtgatggatgcggtgcaaaggctgcgtctgctcgctcaacaaaccggttcgctaaaatccacgccacagcaaaccgtcaccagcgtgccgaagtccagcgcttctaccgccgtcacgacgacaaccaccacatccgccagtacgccagcaacaccgtcgaccgtcatcaaaattgaacctgcgaatccgcaggtggtgtacgtgccgaactataaccccgcgacggtgtacggcgcctggcccaataccgcttatccgccggtgtatttaccgcctcctccggggcagcagtttgccgacagttttgttaaaggttttggttatagtctgggcgtcgccaccacctatgcgttgttcagcagcatagactgggatgatgacgatcatcaccaccatgacgacgaccatcatgatgattaccatcatggtggtaacggttatcaacataatggcgataatatcaacatcaatgtcaataatttcaaccggatatccgggcaaaacctgccgggccaaacgatgggctggcagcataatcccgcctggcgcaatggcgtcccctatccgaataataccgttgcgcaacggttccatcccaccaatgttagcggcgggttaagcgcaacgcagcaagcgccagtgtctcgcgacagtcagcgccaggcggccatgacgcaatttcaacagcgcagccatacggccaacgcttctttgccagcgccaggcacccgcgatgcccagcgtaaggcggcatcgcagcagttaaatcaaattgcccagcgtaataattaccgtggctatgacggaacacaaaacagcagtcgtcgcgaggcggcgcagcagacactgaataaatccaccacgcagcagcatcgttccgagctgaaggctaaagcccagcagcaccctgtttcacaacagcagagagacaccgcccgccagcgtattgaatcctctacgccgcaacagcgtcaggcatttcgccagaatatgcacgccaatgtgtttagcgggaacgacagtcgatcgccgtcatggcaatcgcaacagctacgcggcctggaaagccgtcgcggcagtcacttaaacaccgagcaacgcgccgccgcgcgggaacatttttctgaacatcatgaatttcatcgccgttaa

SEQ ID NO: 373673 - DNA, 792 bp, Salmonella enterica
atgaaaaaggttatgttaagcgctctgttactgtcgttacccttgctgggctacgcgcaggaacggttcccctccccggaagcggccgccagcgccttcgccgcggcggtagccggaaaaaacgaaacgcagcttaccgcgctactgggcgatgactggcggcaatttctgccgccggaaggtgccgatcccgaggccgtggcccgcttcaatcgtgactggcgcgaaggccatcgcattgtacagaaagacaatacggcgcacctgaatgtcggacgagaagactggcagctcccggtgcccatggtgaaagagactggcggctggcgctttgatatggcggcagccgggaatgagatcctcacccgtactattgggcgaaatgaactttctaccttacaggccatgcatgcttacgttgatgcgcagcaggactattacttacaaaaccatcgctgggcgcacaggataatcagtagcgaaggccaaaaagatggcctgtactggccaaccaaagcaggcgacgtccccagtccgttaggcccaaactttagtcccgcagcgccagacgagggttaccacggctaccatttccgtattatcagcgataacgacggtcacggcgcggcgcttctggcctggccgatgcattacggcgaaaccggggtgatgagttttatggtcaaccaggacgatcgtatttatcaggcggatttaggcaaggagacggagagtaaagttcaggctatcacgcgttttgcgccagacgcgcagtggcaggtcgccgaataa

SEQ ID NO: 373674 - DNA, 330 bp, Salmonella enterica
  misc_feature (235)..(244): n is a, c, g, or t
atggctatcgaaatcaaagtaccggacatcgggacagatgaagttgaaatcaccgagattctggtcaaagtgggcgacaaagttgaagctgaacagtcgctgatcaccgtcgaaggcgacaaggcctctatggaagtgccggcgccgttcgcgggcaccgtgaaagagatcaaagtgaacaccggtgataaagtgtctaccggctctctgattatggtcttcgaagtggcggggnnnnnnnnnngcgcctgccgcagcagcaccagcgaaagcggaagccgctccggctgcggctgctccagcagcagcgacgggcgtgaaagacgttaa

SEQ ID NO: 373675 - DNA, 1407 bp, Salmonella enterica
atggataagggcagactttcggtaagagagaaaatcgggtatggtatgggcgacgccggatgtaacattatttttggcgctatcatgctgtttgttaattatttttatacggatatttttggtcttgccccggcgttagtcggtgttttactcctttcagtacgcgttatcgatgccgttaccgatccggtgatgggcgcgcttgccgatcgtacccaaagtaaatatggtcgtttccgcccctggctactgtggattgcatttccctacgcgctgttcagcgttctgatgttcacgacgccggactggggctataacagcaaagttgtctatgctttcgtcacctattttctgctttccgtgacctacaccgccatcaatattccctattgctcactgggcggcgtgatcaccaacgatccaaaagagcgcgtggcctgtcaggcttatcgcttcgtgttagtcggcatcgcgacgctgttgctatcgttaacgctattgccgatagtggattggtttggcggcggcgacaaagccaaaggctatcagttggcgatgaccgtgctggcgattatcggcatgggtatgtttctgttctgctttgccagcgtccgcgaacgcgttcgccctgccgttccgacgcacgatgatatgaagaatgatttcaaagacgtgtggaaaaacgatcaatgggtacgcattctgctattgaccttatgtaacgtctgcccggggtttatccgtatggcagcgaccatgtattacgtcacctgggtgatgggacaaagcacccatttcgctacgctttttattagccttggcgtggtcggtatgatgatcggcagtatgctggcaaaagtcttaaccgatcgctggtgtaaattgaaggtatttttctggaccaatatcgcgctggcgattttctcctgcgcgttctatttctttgatccgaaagctaccgtgatgatagtggcgctctactttctgctcaatattctgcatcagatcccttccccgttgcactggtcgctgatggcggacgtcgatgattacggcgaatggaaaaccggcaaacgcattaccggtattagcttctccggtaatctgttcttcctgaaactgggcctggcgattgccggggcgatggtcggctttttgctctcctggtacggttatgacgccagcgccaaagcgcaaagcgcctcggcgatgaacggtattatgctgttgtttaccgttatccccggcgttggctatctgattaccgcaggcgtggtacgtctgctgaaagttgaccgtgaactgatgaaaaaaatccaggacgatttggaaaaacgtcgcactaattaccgcgaattgagtgagttgcaggagctcaacgccgctgaaagcgtaaggaaagcctga

SEQ ID NO: 373676 - DNA, 243 bp, Salmonella enterica
gtgacagtggagttaaatatgccagaggtcaaaaccgaaaagccgcatcttttagatatgggcaaaccacagcttcgcatggttgatttgaacctattgaccgtgttcgatgcggtaatgcaagagcagaatattacgcgcgccgcccacacgctgggaatgtcgcagcctgcggtcagtaacgccgtagcgcgtctgaaggttatgtttaatgacgaactttttgttcgatatggacgatga

SEQ ID NO: 373677 - DNA, 267 bp, Salmonella enterica
atggcgcttggcggcatcgcccgtaaaaatcaggtcattatgcaggtctgctgcgacgtactgaatcgtccgttgcagatcgtcgcttccgaccagtgttgcgcattaggcgccgctatctttgccgccgtcgctgcgaaagtccatgccgacattccagccgcccagcaaagcatggcgagcgcggtagaacgcactctgcgcccccccctgaacaggcgcaacgcttcgaacagctttaccgccgctaccagcagtgggcgctaa

SEQ ID NO: 373678 - DNA, 1521 bp, Salmonella enterica
atgaaagagactgtaaccatgctcaaccagcaatatgtcgtaccggaaggattacagccctaccagggggtaacagcgaacagcccgtggcttgccagtgaaacggaaaagcgtcggcgtaaaatttgtgactcgcttgaagaggctatccgtcgttccgggcttaaaaatggcatgacgatatccttccaccatgcgtttcgtggtggcgacaaagtcgtcaatatggtgatggcgaagctggcggaaatgggattccgcgatctgacgcttgcctccagctcattaattgatgcccactggccgcttatcgaacacattaaaaatggcgtggtgcggcagatctacacctccgggctgcgcggcaagttaggggaagagatctccgctggcctgatggaaaacccggtacagatccactctcacggcggccgcgtaaaactgattcagagcggtgagctgaatattgatgtcgctttcctcggcgtgccgtgctgcgacgaatttggtaatgcgaacggctttagcggcaagtcacgctgcggctctttggggtatgcgcaggttgatgcgcagtacgctaaatgtgtggtgctcctgactgaagagtgggtcgaattccccaattatccggccagtatcgcgcaggatcaggttgatttaatcgtgcaggtggatgaggtaggggatccggaaaaaatcaccgcgggcgcgattcgtctgtccagcaacccgcgtgaactgttgatcgcccggcaggcggccaatgtgatcgaacactcaggttatttttgtgacggtttctcgctgcaaaccggcaccggtggcgcatctctggcggtcacccgtttcctggaagacaaaatgcgtcgccacaacattactgcgagttttggcctgggcgggatcaccggcacgatggtggatctgcatgagaaagggttgatcaaagcgttgctggatacgcaatcattcgatggcgatgccgcccgttcgctggcgcagaacccgcatcatattgaaatctcaaccaatcaatacgcgaaccccgcctctaaaggcgcggcatgcgaacgcctgaacgtggtgatgctgagcgcgctggaaattgacgtgaatttcaacgttaacgtgatgaccggtttaaacggcgtactgcgtggcgcatcgggcggccatagcgatacggcagcaggggccgatctcaccattattaccgcaccgctggtccgtggccgaatcccatgcgtagtggaaaaagtgctgactaccgtcacgccaggggcaagtgttgatgtgctggttaccgaccatggtattgcggtgaaccctgcgcgtcaggatctgcttgataacctgcgtgctgcgggtgtggcgctgatgaccatcgaacaactgcaacagcgcgctgagcaactgaccggtaaaccgcagccgattgagtttaccgatcgggtggtggctgtggtgcgttatcgcgacggttcagtgattgacgtgattcgccaggttaaaggctga

SEQ ID NO: 373679 - DNA, 834 bp, Salmonella enterica
atgaaggggagattattgcaacggcttcgtcagctcagtatcagcaacagtttacggggcgcatttttaacgggcgcattactgacgctgattgtcagtatggtcagcctttattcctggcatgagcaaagttcgcaggttcgctattcgcttgatgaatattttcctcgcatccactccgcttttttaattgaggggaacctgaatctagccgtggatcaactcaatgaatttttgctggcgccgaacacgacggtacgtttgcagttacgtacgcagattattcagcatctggataagattgagcgtctcagtcaggggcttcagcttgctgagcgccggcaactggccgtcattttacaggatagccggaccttgctggcggagctggacaacgccctctacaacatgtttttggtgcgggagaaagtcagcgagctttccgctcgcatcgactggctccatgatgatttcaccacggagctaaattcgctggtacaggattttacctggcagcaagggacgctgctcgatcaaattgaggcgaatcagggcgatgcagcgcagtatttgcaacgttcgcgcgaggtgcagaacgagcagcagcaggtatataccctggcgcgaattgaaaatcagattgttgatgacctgcgcgacagattgaatgagctcaagtccggcaataatgacgggatgctggtggagacccatattcgctatctggaaaacctaaaaaaacggcggatgagaatattcgtgcgctggatgactggcccagtacgatcacgctacggcaaaccatcgacgaactattggaaatcgggatggtaa

SEQ ID NO: 373680 - DNA, 1179 bp, Salmonella enterica
atggtaaaaaataagatgcccgataccatgcgcgattatgttgcggcgcaaaaagccttactggacgccagccgcgccagagaggctacgctagggcgctttcgcacgctgcttgaggcgcagttaggtagtagtcaccagcaaatgcagacgctcaatcaacgcctggaacagattgttcgcgttagcggcgggcttattttagtggcgacgctcctggcgttgctactggcctggggactcaaccactattttatccgttcccgactggtgaagcgttttaccgcgcttaatcaggctgtggtacagatagggctggggagaaccgactcgactatcccggtttacgggcgcgatgagctaggacggatagcccgtttgctacgtcatacgctgggccagctcaatatgcaacgcaggcagcttgaacaagaggtcgccgaacgcaaagagatagaagccgacctgcgcgccatgcaggatgagttgattcagacggcgaaactggcggtagtcggccagaccatgaccacgctggcgcatgaaattaaccagccgctgaatgcgctttcaatgtatttatttacggcgggacgcgcgattgaacaaggtcagagcggacaggcgagaaatacgctcaccaaagcggaagggctcattaaccggattgacgccattatccgttcgctgcggcagtttacccgccgggcggagctggaaacgccattgtatcccgttgatctgcgccaaaccttcgtggcggcatgggagttattagccatgcgtcaccaatcccggcagggagcgctttcactgccaaccgacaccgtatgggttagcggcgatgaagtgcgtattcagcaggttctggtgaatgtgctggcgaatgcgcttgacgcctgttcgcatgatgcggcgatcgcggtgacgtggcagacgcagggagaggcgctggaggtttatattgcagataacggccctggctggcctgtggcgctgttgccctctttactcaagccgtttactaccagtaaagctgtcgggttgggtattgggctgtcgattagcgtgtcgctgatggcgcaaatgaagggcgacctgcgtctggcgtcgacgctgacgcgtaacgcttgcgtggtgctgcaattctctgtaacggatgtcgatgatgttgaatga

SEQ ID NO: 373681 - DNA, 939 bp, Salmonella enterica
atgaaaaaacatgctattgcagtaatgatgatcgccgtattttctgagtcggtttatgcggagtctaccttatttattccggacgtctctcctgatagcgtcacgacatccctttccgtgggtgtgttaaatggtaaatccagggagctggtttatgataccgacaccgggcggaagctgagtcaactggactggaaaataaaaaatgtcgccacgttgcagggggatttatcatgggaaccctattcgttcatgacgctggacgcccgcggctggacgtctttggcgtcgggatcgggtcatatggttgaccatgactggatgagcagtgagcagccaggctggaccgatcgttcaattcatccggacaccagcgtcaactatgctaatgaatacgatttgaatgtgaaaggttggttattgcagggcgataactacaaggcgggcgtaacagcgggctatcaggaaacccgttttagctggacggcaagaggcgggtcttatatttatgataatggtcggtatattggtaattttcctcatggcgtgcgcggcataggttatagccagcgtttcgaaatgccctatatcgggctggcgggtgattatcgtattaatgactttgagtgtaatgtactgtttaaatacagcgactgggtaaatgcgcatgataatgacgaacactacatgcgcaaacttaccttccgtgaaaaaacggaaaattcacgatattatggcgcttctattgacgccggatattatattaccagtaatgcaaaaatctttgctgagtttgcttacagtaaatatgaagaaggtaagggcggtacgcaaatcatagataaaaccagcggtgatacggcgtattttggtggcgatgccgcaggtatagctaataataactatacggttaccgcggggttgcagtatcgcttctag

SEQ ID NO: 373682 - DNA, 126 bp, Salmonella enterica
atggacaatttttatgatctgtttatggtctccccgctactgctggtagtgctgttttttgtcgccgtactggcaggatttatcgattctatcgccggggagggctgctcactatccctgcgctga

SEQ ID NO: 373683 - DNA, 549 bp, Salmonella enterica
atgaacaatacgcaccattacgaacagttaattgagatttttaacggctgctttgccgaagaatttaatacccgtctgattaaaggcgacgacgaaccgatctatcttcctgctgacgcgcaggtaccgtaccaccgcatcatctttgcgcatgggttttacgccagcgcgctgcatgagatttctcactggtgtatcgccggtaaggcgcgccgcgaactggttgactttggttactggtactgcccggacggacgcgacgcgcagatccaaagtcaattcgaagacgttgaggtgaagccacaggctttcgactggttgttttgcgtggcggcggggtatccctttaacgtcagttgcgacaatctggaaggcgatattgagccggatcgcgtggcgtttcagcgccgggttcatgcgcaggtaatggcgtatctggagcagggcattcctgaacgtccggcccgcttcatcaaagcgctacagaattactatcacacgcccgaacttaaggcggaacagttcccgtggccggaagcgcttaattaa

SEQ ID NO: 373684 - DNA, 861 bp, Salmonella enterica
atggatcgaatatcatgtcaaaaatgcgatgtcgtactgccgctggtagcaattgcaaccccgattgaatacacccgcaacccgctgcgcgtctttgaacttgattttgaagaaaacctgcggattatccgttattgcgtgaaataccgtaaacgcgtggttttcccgtctacctctgaagtgtacggcatgtgtacggacgcctcttttgacgaggacaaatcgaatctgatcgtcgggccggtgaataagccgcgctggatttactccgtttccaaacagcttctcgaccgggtgatttgggcttatggcgaaaaagagggattgcgcttcacgcttttccgtccctttaactggatggggccgcggctggatagcctgagcgcagcgcgtatcggcagttcacgcgcaataacgcagttgattctgaacctggtagaagggacgccgatcaagcttatcgacggcggtcagcagaagcgctgttttaccgatattcgtgacgggatcgaagcattattccgcattattgtgaatgagggcgatcggtgcgatggcaaaatcattaatatcggcacccctgacaacgaagccagtattcaggaactggcgacgctgttgctcgatagttttgacaagcatccactgcgctgccatttcccaccgtttgccggtttccaggtcgtcgcaagccgtagttattacggcaagggttatcaggatgtcgcacaccggaaacccagtatcgacaatgccaggcgctgtctgggctgggagccgtctattgcgatgcgtgatacggttgaagaaacgctggacttctttctgcgcagcgtagatgtcgcggaacgcgcatcatga

SEQ ID NO: 373685 - DNA, 507 bp, Salmonella enterica
atgagtagtccacaagaaaatttatacgatacaattcgtattgtaaaaaggaaaatcattcctttggcctttattctttacttttttaactatatggatcgtgtcaatattgggtttgctgcattacgcatgaatgaatctctcggtattacgcctgaggatttcgctaatatttcttctatattcttcatatcatatttaatctttcaaattccgagtagcattggcttgcaaaagcttggcgcaagaaaatggattagttccattattatcggctggggagcggtaacagggctgatttttttgctaaagatactcaacatattttgctggctcgcatttttttgggggtatttgaagctggctttttcccgggcatggtttattatcttgcatgctggttcccggctcgtgaacgcggaaaagtcaatagtttcttcatgttatctattgctgttgcatcggtattggctgcaccgatgtctggttggatcatcgagcatttga

SEQ ID NO: 373686 - DNA, 837 bp, Salmonella enterica
gtggacgtaaggcaaagcatccatagcgagcacgctaaaacgctggacacccaggcgctgcgacgcgagtttttaatagaaaatatttttgtcgctgatgaatatacgatgttctacagccatatcgaccgtattattgtcggcggcattatgcccgtcagccattctgttgaaatcggcggagaggtgggtaaacagcttggcgtttcccggttactggaccgccgcgagctgggcgtcattaatattggcggcgcgggcgccattatcgttgacgggcagcgccatgatattggtcatcgtgatgctctgtatattggtaaaggggcgaaagagctggtcttcgtcagcaatgaggcgagcagaccggcgaagttttattacaactgcgcgccagcgcataccgcttatccgacgaaaaaagtgtcgcctgccgacgttgcgcccgtcaccttaggcgataacctcaccagtaaccgtcgcaccatcaataaatacttcgtaccggatgtactggaaacctgtcagctcagtatgggactcaccgaactggcgcccggtaatctatggaacaccatgccatgccatacccatgagcgccgtatggaagtttacctctatttcaatatggaagaggacagttgcgttttccatatgatggggcagcctcaggaaacccgtcatattgtgatgcgtaatgaacaggcggttatttccccaagctggtcaatacattctggcgttggcaccaaagcctatacgtttatttggggcatggtgggagaaaatcaggtcttcgatgacatggatcacgttgcggtacaagatctgcgctag

SEQ ID NO: 373687 - DNA, 1050 bp, Salmonella enterica
atgaaatcactgatactgtcaggtgtattttttttctttgctgtctgtgattctgcgcaggcagctatcgaatggtcatattgtaatgccactgggagtgttaacatccagaatattaatattaaagcagggcaatatggcacaggtgatgaactacagacaattaaagacattcccttcagttatacctgcataactgcaattaatacttattcagaaccttataatgccactatcagtcttaagaatgtgcaaccaatggtggaagccctgaaaaagagcggtcttggtatggagttgtttattcaggagggtagtcgagatcctgttaaattttcatggcgggagatacaggcaggttttgccggctggtccagctcaaagatatttggtcaagagttggaacagaataaaacatataatctgagtggaaagcttactgtacgtatttatgttgaacaaagttttaaatatggttttttgaacataaacgttccggcaagtacatttgatattcttccctataaaccatcaaccgtaccgtcaccaactaaaccgtatacacctttgtcggtttctgcctttaatatcaggatgattcctgacaactcaggcaaggttattatttctccttctgctaccatcaaaatggggcatttttatacggaatataaggaaaccatggtgcccagggaagtacctttcaccgttacagcacaacagaatgtcggaacgcagaccccgttcgttgccccactggctatagagttcaggaccaacgatctgacactggcagatgctgacagcaccgtaattcttaagaataataaacaagaaaacaatggattcagactgtcggtaattgatgtggataataacacaccagttaaatttaatctgaaaacagatatggaatctatccatcttgataacggtgctggtggcaaaattataaaacagtataaagcaaaggtcgaagctatacccggtgcggtaattaaaacaggtgctttttcagccgcaatgacagtgattgttacttacaattag

SEQ ID NO: 373688 - DNA, 204 bp, Salmonella enterica
atgctcaccaaccgcggagcgccacattcttgtggtatgaaatatcggctcaggggactgagcccgcttgcaaacatctcagagaaattctgttttcacaatcactttaccatagtaaagcgaaaagtgttattcaaagttttggcccgttttttcggttatgcgaccttgatcaagcaacgcctgttcgatggtctgttgtag

SEQ ID NO: 373689 - DNA, 894 bp, Salmonella enterica
atgaaacgtccggactacagaacactacaggcgctggatgccgttatacgtgaacgaggattcgagcgcgccgcccagaagctgtgcatcacgcaatccgctgtctcacagcgcataaaacagcttgagaatatgttcggacaacctttgttggtgcgtaccgttcctcctcgccccacggagcaagggcaaaaattactggctctgctgcgtcaggttgaactgctggaagaagagtggctgggcgatgaacaaaccggctctacgccgctgctgctgtcgctggcggttaacgccgacagtctggcgacctggctgcttccggcgctggcgccggtactggcggactcccctatccgtctcaatttacaggtggaagatgaaacgcgcacgcaagaacgtctgcgtcgcggcgaggtggtgggcgcggtgagtatccagcatcaggcgctgcccagttgcctggtcgacaaactgggcgcgctcgactatctgtttgtcgcgtcaaagccgtttgccgagcgctattttcccaatggcgttacccggtcgtcgctgctgaaagcgcccgccgtcgcgttcgaccatctggatgatatgcatcaggcctttttgcaacagaatttcgatctaccgcccggcagcgtgccgtgccatatcgttaattcatccgaagcgtttgtacagcttgcgcgtcagggcacgacctgctgcatgatccctcacctgcagattgagaaagagctggaaagcggcgagttgatcaacttaacgcctggtttgctacaacgccggatgctttactggcaccgctttgccccggaaagccggatgatgcgcaaagtgaccgacgcgctgctggagtacgggcacaaggtgctgcgtcaggattag

SEQ ID NO: 373690 - DNA, 213 bp, Salmonella enterica
gtggccgacccgctcaatgataccttcaatgcggctattaaaaataaaaacgcgcgatgggaacaagcgctgtctttgctgcagataaatagcatctttggaacgctggccagcgacaacgcagactttttaaacgacattcagaaggcctttaaccatattgaattacatggcgtcacggccaccattcaccgtttatcttcaaagggttaa

SEQ ID NO: 373691 - DNA, 1485 bp, Salmonella enterica
atgagcgacgtgacattacttgccgaagtaacgacttttttacgccaacgacacggacaatttattgcaggtgaacgtcaggccggaaacggcacgaacttctcggtcactaacccagccaccggcaaaatcatcgccgacgttgtgtcggcaacccctgcgcaggcagaagaggccatgcagagcgccagacgggcgtttgatgtctggcgtaaaatgccaacgttacaacgcggcgcattactgctgaaactggctgatactcttgccgctcatcgtgaagagttagctcaactggaaagcgtctgttcaggtaaaacgattatgctgtcgcgcggtcttgaactcgatcagtcagtggccttcctgcgttactttgccggttgggcaggaaaaataaccggtgaaacgctgaatgtctccctgccatcaatgggagaagagagatacacagcgtttacccaacgccaacccattggtgtggtcgtcggtattgtgccgtggaatttctccattatgattgctatctggaagctggccgcagcgctggtatgtggctgcaccatcgtcattaaaccaagtgaatataccccgctgacactgctgcgagtcgctgaactggctaaagaggcaggtttccctgatggcgtaattaacgtggtaaacggtgctggcggtgagatagcgcaacagctgatcgcgcatccagattgcgccaaagtgagtttcaccgggtcagtcgcgacaggtgagaaagtccggcgttcggcaacatcgtcaggaaaacgcgttaccctcgaactgggagggaaaaatgcggcgctgtttctcaatgatctcacggcacaagccatggtcaacggtattcttgaagccggttatctgaatcaaggacagatttgtgctgccgcagagcgtttttatctgccccaggaaaaactggatacggtcatgacgctcctcagacaacggttatcggagatcgtgcccggctcgcctttagatgaaaaaacggtgatgggcccgctggcgaatcagattcagcttgaaaaagtgctgcgtctgattcaacgtgcacgggaagaaggggataccattgtttatggcggtgaaactttacccggcgaagggtactttttacagccgacagcggtaaaagtgcgtagtaaaaacagtacgctgatgcacgaggagacctttggccctgtctgtagctttatcggttatcagaatgaaaaagaggcgctttcgcatatcaacgattcgccattcggccttgctgcaagtgtgtggtcggaaaatatgtctaaggcattacgctacgctgaagatattgatgctggcatggtgtgggtcaatatgcataccttcctcgatcccgcggtaccctttggagggatgaaaggatcgggcattggtcgtgaatttggcagcgcgtttattgatgactataccgaacttaaatctgtcatggtccgttattaa

SEQ ID NO: 373692 - DNA, 1212 bp, Salmonella enterica
atgaaaaatcgttatttccctaccgctgtagggttgtattttaattactttgtacatggcatgggggttatcctgatgagcctgaacatgtcatcgcttgaacagcaatggcataccagtgccgcaggcgtatctattgtgatctcttcgcttggtattggccgactaagcgttttgttaatcgccggtatgctttccgatcgctttggtcgccgtccttttatcattctggggaccgcctgttacctgatttttttcattggcattctttatgctcagacgatttttgtcgcttatgcctgtggctttttagcgggtatggccaacagttttttagatgcaggtacctatcccagtttgatggaagccttccctcgctcccccagtacggcaaatattctgatcaaagcatttgtctctggcgggcaattcttgttgcccattattatcagtttattagtctgggctaatatgtggtttggctggtccttcctgcttgccggggcgatcatgcttattaatgctctgtttttattacgctgcccttttccaccctatcctggtcggatattgaaacccaaaatctcgcaagcgcctgttgcaggcgtacatcattgctccctcatcgatctgatcagctacaccctttatggctatatctcgatggcaaccttttaccttatcagccagtggctggcgcagtatggacagttcgtcgcaggaatgtcgtatacccaatccatcaaactgttaagtatttatacctgcggctcgctactgtgcgtttttataaccgccccgctggtcagaaaaacaattcgctctaccacattattgatgttttatacctttatctcttttattgcgcttctgacggtctgcctgcatcctcaggcctatgttgttatgatcttcgcattcgtcattggattctcttccgccggtggcgtagtacaaatcggcctgacgctgatggcggcccgttttccacaggagaaaggtaaagcgaccggcatttattacagcgccggcagtatcgcgacgttcactattccgttgatcacagcgcggatttcagaaatgagcattgcacatattatgtggtttgataccggtatcgccgcaacgggatttctcctcgcactgttcatcggctaccgaagtcgggctgaatcacaacatcacgctgaagcagcgtcaactgcgcaataa

SEQ ID NO: 373693 - DNA, 231 bp, Salmonella enterica
atgtcgaagaggatcgttaaagaagcccgcgcggtgtttattaaaccggcgcagaagattgtcgacaaatatggtctcgatgggatcgatcttgactgggaatattcgtttaacgtcgcatttaaaagcgcttcgtcagctaataggccccaaaaacgggtcaccctcgccgtcggcgcgaatgcggaaagtccgaaaagctggctggacgtgaaagctatagccccgtag

SEQ ID NO: 373694 - DNA, 870 bp, Salmonella enterica
atgaaatcttgggtaaaaatgaatagttggacatcagaagacactaaagcagtgaaaacgtggtttgatttagacaaatatcgcgagtttgaaaacatttctattaatatgctttaccatgaaatatgggcgagaacatatttcttcaaaccagtaatagaagaaggaatgcagaaaacggtattgaaaaactatatgcagatattggatggtgatccttttcttatcaaagagaagcacttaaattatatggattccgaaaataaatcatatcaacccccatacttttttattactactgttgatcgaatagcaaatatcagttttgcttgcatgagaaaggctttattcataagagcaaatacagaacaatataaaattgattccactattgagaatgaatacatatccgaaataattcctgaacaatttcctactaccattatgttagaaatcgatcttgcgggtggaagcgatgatgagatagcagaagccctgcgagtatcattaccgcaatggcgaaaagtaaagggcgttaaacctgcaccacttgatgcagtcaggtttggttatggggcaataaaaaaattaattagctatcgaataatccccatgcttgatttgcttgcatggtcagaaagaaaaaaagtacttctgtcagacgatagactatcccgattgctatacacggatgaagacgatgataaggcaattcgccaaggatatcatattagggatgcggatcgccctttcgcaatgaaaactgtagaaactgattttcttaggcagtttaatttttttatcaataaaaatcagcatgttaaagaaatgagggtttcggatgttatgaaactctcagactctgagtga

SEQ ID NO: 373695 - DNA, 204 bp, Salmonella enterica
atggaaaatcaagctcgtctcatccgtttaccagaagtcatgaagaaaactggatttggtaaagcgtggatctataggcttatcagcaagggatgttttcctcaaccagtaaaaattggtcttcgtgcagtagcctttgtagaaagcgaagtagataaatggattcatgaaacgattaattcttcgagaaataaagtttcttag

SEQ ID NO: 373696 - DNA, 774 bp, Salmonella enterica
atgcatgagttaccgctggtcttttttacggtctttacccagagcgcggtcggcgcgtttattctgctgctgattggcggcgcaatggggctggtcgcgccgcggcgcaaggctattggtctgttctcggtgatgtgcctgtttgggcttggcgtcattgtcggcaccttccacgtcgggcaaccgctgcgtgcgctgaatatgctgctgcgcgtcggacattcgccgatgagtaacgagattgtcttgtcggcggcttttgcggcgctcggcgggctgggggcgctcggtttgttgctgaaccgggcgacgccgctgtgtaacgcgttggtctggttggcggcgatagtcggagtagtcttcttatacgccgttccgcagatttaccaactgccgacggtggcgacctggcgttcatcttacaccacggcaatgatgatattgacgccgttgattggcggcggcgcgttggcggcattgtttggcgtgcgccgtctggggctactggtcagcgtattggcgattttggtgagcttttgtctgcgcccgggctatatggcgacgctgatgagcgccgatagcgctctgaccgctgcgcaacatagctggtttaccgcccaggcgatattgctggcggcgggcgtggtcggggtggtggtctgcgcacgcctgaaatcgagcgctgcggtgctggccatgacggcagtggtggttatcgcggcggagttggcgggtaggattgcgttttacaatctgtggacgctgccaatgtag

SEQ ID NO: 373697 - DNA, 1431 bp, Salmonella enterica
atgagcatctctctgacaacaaagctgagttacgggttcggtgcgtttggtaaggatttcgccatcggcattgtgtatatgtacctgatgtattactacaccgatgtggtgggactctcggtcggcctcgtcggcaccctctttctggtcgcgcgaatctgggatgcgataaacgatcccatcatgggctggattgtcaacgccacgcgttcgcggtgggggaaatttaagccgtggatattgatcggcaccttaaccaattcgctggtgcttttcctgctgttcagcgcccatctttttgagggaaccgcgcaggttgtatttgtctgcgtaacctacatcctgtggggcatgacgtataccattatggatatcccattttggtcgctggtgccgaccattacgcttgataagcgagaacgcgaacaactggtgccgttcccgcgtttcttcgccagtctggctggcttcgtcactgccggtataacgctgccgtttgtgaactacgttggcggagcggatcgtgggttcggctttcagatgtttacgctggtactgattgcgttttttatcgcctcgactatcgtgacattacgcaacgtacatgaggtgtactcctccgacaacggtgtaacggcgggccgcccacatctgacgttaaaaacgatcgttggattgatatacaaaaacgatcagctctcttgcctgttgggaatggcgctggcgtataacattgcctccaatattatcaatggctttgcgatctactacttcacctatgtgattggcgatgccgatctttttccctattacctttcttacgccggcgcggcgaatctgctgacgctgattgtcttcccccggctggtgaaaatgttatcgcggcggatattgtgggcgggcgcctccgtgatgcccgttctgagttgcgcagggctcttcgcgatggcgttggcggatgtccataatgccgctttaatcgtggcggcgggtattttcctgaatatcgggaccgcgctcttttgggtgcttcaggtaatcatggtggcggatacggtcgattatggggaatttaagctcaatattcgctgcgagagtatcgcttattccgtacagacgatggtcgtgaagggcggctcggcgtttgcggcgttctttatcgctctggtgctggggctgattggctacacgccgaacgtggcgcagtctgcgcaaaccctgcaggggatgcagtttattatgattgtcctgccggtactgtttttcatgatgacgttggttctctacttccgctactaccgtttgaacggcgatatgctgcgcaaaattcagatccacctgctggataaataccggaaaacgccgccattcgtcgaacagccggatagcccggcgatttctgtggtagcgaccagcgatgtaaaagcgtga

SEQ ID NO: 373698 - DNA, 606 bp, Salmonella enterica
gtgctagtaatacaagtgagtcgcaataatattaaagactatttacaattcctgaataaagatctctcacaccttcccgtctggcaacgcaacgccgatcccttattgaccgccaactgtctgacgccggatatcttcagggtcgccgcccgctacagcgcgatggaaacaccggatgaaattgttagtgaacgtacccgtgcgctccttttcaccgttttatcccgctttcttgaccacaaaaaatttatttctttgttaatgcacatgctgcgcagccgcatcagtgacagcgtttaccacatcattcagagcgatattcataaagactggaatctgagcgccgttgccagctgcctgtgcctgagtccaagcttgttaaagaaaaagctcaaaaacgagaataccagttatagccaaataatcacgacctgccgaatgcgttatgccgtaaaccaattattaatggacggaaagaatatctctcaagtctcacagctgtgtgggtataacagcacatcgtactttatttccgtgtttaaagagttttatggtatgacccccctgcattatgttagccaacatcgggaacgatcggctgcctaa

SEQ ID NO: 373699 - DNA, 855 bp, Salmonella enterica
  misc_feature (795)..(804): n is a, c, g, or t
ttggttgattctgctcaggtagaaaagaaaggtaatggcaaacgacgaaataagaaggaagaagaggaattaaaaaagcagcttgacgatgctgaaaacgcaaagaaagaagctgataaggcgaaggaagaagcagagaaagctaaggaggctgcagaaaaagcgctcaatgaagcgtttgaagtacagaactcgtcaaagcaaattgaagaaatgctgcagaactttttggctgacaatgtagcaaaagacaatctggctcagcaaagcgatgcttcccagcaaaatacacaggctaaagcaacgcaggcttctaaacagaacgatgctgaaaaagttcttcctcaacctattaataaaaataccagtactggcaaaagtaatagcagtaaaaatgaggaaaataagctcgatgccgagtctgttaaagagccgcttaaagtcacattagcgcttgcggccgagagtaacagcggtagcaaagatgatagtataactaattttactaaacctcagtttgtaggtagcactgctcccaatgccacggttattattaaaattaatggtattgctgtcggtcaggctgtagcggatagtttgggtaacttcacctttacagcgcctgaaacattgactgatggaacatataatctggaggcagaggccaagactgctgatgggagcggtagcgccaaacttgtcattactatcgattccgttaccgataaaccaacatttgagctttcgcctgaaagtagtgtgtccggtcataagggcttaacgccgaccttgacnnnnnnnnnncttcaattgttggtacggcggaagagaatgctaaggttgacatttatgtag

SEQ ID NO: 373700 - DNA, 450 bp, Salmonella enterica
atgtttgttggcctgttgctcgtctcgctaattgttgccggtcggctggcaaatcactaccgcaataacgctatcacttacaagtaccagcgtgatactgctactcacaacctgaagctggcgaacgagacaattaccgacatgacgaagcgccagcgtgacgttgccgccctcgatgcaaaatacacaaaggaattagctgatgcgaaatctgagaatgatgctcttcggcgcaagcttgataatggtggtcgggtgctcgtcaaaggaaaatgccctgtgccatcctcagccgaaacctccagcgcctccggcatgggcaatgatgccaccgtcaaactctctccagttgctggacgaaacgttctcggtatccgggacggaatcatcagtgaccaaacagcactgagaacgcttcaggagtacatcaggacgcaatgcctgaaataa

SEQ ID NO: 373701 - DNA, 525 bp, Salmonella enterica
atgaataatccgtcagttattccggccttcgacttccgcgaaatggtgcaagccaaaaacggagaggtcgtaacaacgtccagaaaagttgctgaatactttggcaagagacatggggacgttctcaggaaaatagaacaggtgaaagctgattgctccaacgaatttagccaacgcaattttgcgtcggctgattatatcgatgagcaaggtaagcttcgcccaatgtatagccttactaaagatggctggatcatggttgtgatgggctttactggtaaagcggctgcggccatcaaagaaagctacatttctgcattcaactggatgtctgatcaacttagccgtcgactggctatgggcgaagaaatgcagcaccgctacgccatcaaagaaactcggtcaaagctgaaaggcacgatcggtagcaggctgatgaatgaacggaagaaggaaaagcgcgttctggctcttgagcacgaacacatcatgcaagtgacgcagcctgaactcctgatgggctga

SEQ ID NO: 373702 - DNA, 630 bp, Salmonella enterica
atggcaaaaccggactgggaggccatcgagacggcataccgggccggagtgatgtccctctgtgaaattgcgtcacatcatggtattagtgaaggtgctatccgcaagcgcgcaaagcgtgatgactggtcccgtgatcttaacgccaggattcagcaaaaggctgacgatctggtacgcaaacaggaagtacgcaaaacggtacgcaccaaaactgaacttacagaacgtgtactgatagaagccacagcggaggtaatagcctcggtacgcatggagcaccggggcgatatccgccgggcccgggaactcacaaacacgctttttgatgaacttggtgcgcagtgtgctgatgtgggggcgctggagcagctgggtgacatcatgttcgctcctgacgataaaggccgtgaccggctcaacgaaacttatcaaaaagtcatcagtctgccttcccgtgtgaaatctctgaaagacctgagcgacagcctgaaaacgttgatcggcctggagagagaagcatggagtataggtactgccagtgaaccagaaaaaacgcctctaccaggaaaaaatactgatctgacaactgatcaggcagcggagctatacaaaaaaatgatgggttaa

SEQ ID NO: 373703 - DNA, 1623 bp, Salmonella enterica
atgccgttaccattctccttcgatttcaaacatccagattaccagatggtgtttgaatggcggatggaacgcttacagcgcattcgccagcatcctgagatgctgcccgcgttgaagcagttttatcgtactaacccggctcagttcatcatcgactggggcatgacgacggacccgcgtaatatcgattatggcctgccggttaccatcccttttctgctattcccgaaacaggaagagtggattcactggattatggaacgctggggcaagcgggagaatggtatcaccgaaaaatcccgtgaaatggggctgagctggacggcgatcgggatggcctgttcgctttgcctgtttaacaaagagatggtcatcggcttcggttcccgtaaagaggaatatgtcgacagtactggtgaccctaaggcactgttctggaaggcgcgcaagtttgtagagacgttgcccgtcgagtttcgtgggtcgtggaatgagaagaagcatgcaccgtacatgcgtgttgaatttcctgagacaggcgcggtcatcaagggcgaggctggtgacaatattggacgtggtgaccgaaccacactctatctggtggatgaggctgcatttctgcaacgcccgctactgattgatgcggcgttatcgcaaaccacccgttgccgtattgacctgagttcggtcaacggcatggcgaacccttttgcgcagaaacgacacggtggaaagataccggtattcacattccactggcgcagcgacccccgtaaggatgatgagtggtatcgcagggaatgcgagaaaatcgacaatccggtggtagtggcgcaggagcttgacctgaactacagcgcatcagcggaaggtgtcctgatcccctcagactgggtacaggctgctgttgatgcacatatcaggctgggcatccagccaactggcaaacgactgggggcgatggacgtcgccgacgaaggtcgggacaaaaacgccttttcaacccgtcacggtttccttctggagaatgtgcgggaatggtccggcgtgggcagcgacatttaccagtctgttgagaaggtcttcggcttttgtgaacaggataatctcgaagagtttcgcttcgacgaggacggtctgggggctggcgttcgcggcgatgcgcgtgccattaacgaattacgcaaagccgcccgcaggccgccaatacttgccacaccgtttcgtggtagcggcgcggtattcgatcctgatgacgaagccgtacggggcgacaatgggcaggctgcacgcctgaacaaggatttcttcgccaacgccaaggcacagagctggtggtacttacgcaagctcttccggaatacctaccgcgccgttgttgaaggtatggcctacaacccggacgaaattatctccatcagcagcacgatggagagcaaagacaaactcatcatcgagctttcgcagccaacctactccattaacggcgtggggaaaatcgttgtggataaacagcctgacggtaccaggtcgccgaacctcgccgactcggtgatgatcagctacgcgccaatgaattcagccctcaatatctgggagctgctagggagacaggcctga

SEQ ID NO: 373704 - DNA, 1470 bp, Salmonella enterica
atggcacgaaacaaacaagcctcgcgacgaacggtgcaggccacggccgacggctacgagaactttgtcgcccgcgtggggatgcagacgcctaaccagcactccgcatcgacctaccgggcgaacttcaccagccgcaaccgtatgctggtggaatggtcctatcgctcatcctggctcatcggtgaagcggtagatgctatccccgacgacatgacccgcaaaggcattcgtatcacttctgagattgacgcaaaagaccgtggcactctcgaagcgcagctggatcagttgcaaatctgggatgcgctgaacgacgtactgaaatggtctcgtctctacggcggcgcggtgggcttcatcatgatagaaggtcaggcgcccatgaccccgctacggctcgaaaccattggtgaaggcaagtttaaggggattcttccgcttgaccgctggatgattaacccggtactgacccgccgcattaaagaaatggggccgaatctcggcaagcctgagctttatgatgtggtgaccaccgcaacgggcatccccgcctggcgtattcaccatagccgcctgattcgcttcgatggggtgacgctgccattccagcagaagatgaccgagaacgaatggggaatgtcggttgtagagcggatctgggatcggcttactgcgttcgacagcgccactgtcggtgcggcgcagctggtctacaaagcgcatctgcggacctacaaagtggaaaaactccgtgagcttattgcactgggcggcccggcattcgaggcgttgctgaaaaacattgatctgatccgccagtttcagagcaatgaaggcatgacgctaatggatgccaaggataccttcgaaacccaccagtacagtttcagcggtctggatgacattctttcgcagttcgccgagcagattagcggtgctgttggcattccattggtgcgcctcttcgggcagtcccctaaaggtttctcaacgggtgacgcagaccttgccaactattatgaccgggtcagttcattgcaggagcgtcgcttacgcctgccagtgcgccgggtgctggacattatgcatcgttcggagctcggtaagccgctgccggacgatttcacgtttgagtttaacccgctatggcagatgtcagatgtggaccgctcaacggtggctgtgaataccaccacggcgattgtcaatgcgctggatgcagggctgatgacaaccaaagccgctatgaccgacctgcgtgagaactccgatgttactggcatcggggcatccattaccgacgaggatatcgagaatgccgaagacgaagcgccaccaggcatcggcgaacttgtcgacaaaccgccagagccgacaggcggagatccgatatcgaacgagcctacggcagatagcgcgggcggtcggggatatcgtaaatgggcactacgatggttcaaacgatag

SEQ ID NO: 373705 - DNA, 609 bp, Salmonella enterica
atggaggccctggagcgctacagcgaaattataacgccgtgggcgacgaaggttgctgagaactttaccgctgacattgtgcgcaagaatgatgagcagtggcggaaacacagcaaaaccatcagtcgtgaactacgcaatctggtgagcaatgccccgccagggcaggtgatgaaatccatcgttgccgaacaggttaagtacattaaatcgctacccctcgaggctgctgacagggtatacgacatccagaatcgggcgattgaagctgttgtgaccggtgggagagcggagcattttgctaaagaaattgcagcatcgggtgatatagcaaagtccagggctgaccttatcgcccgtaccgaacttggacgtgcaaccggcgcgctcgatcaggcgcgagcgctgtcaatcggctcgaatggttatatctggcgtacagccgaagatggcgacgtccggcattctcatcgggagatggaagggaagtttgtcgaatggggacgacccccaacgcttgacggcatgaccggtcacgctggcgagctcccgaactgccgctgttataaagaaatcgtcttccccaaccatcattcttatctcgcctga

SEQ ID NO: 373706 - DNA, 1233 bp, Salmonella enterica
atgaaatattttttcaatacccggctgggggaaacccgctatcagctggctgacggctcgctgctgtgtagagacgtgccgataggtcgaacgggtaagcagctttacggcgctgctgatctgccaaacctcaagcctgacaagttcggtgagatagtcgtaacgcgctctcctgagcaggtattccatccggccacgcttgcctccttcgaagggatgagcatcacgatcctgcatccggaggatgaaaacgggaacgtccggctggtcaatcccgagaactggaaagagcttgcggtcggtcattttcagaatgtccggcgcgggactggtgagcagtctgatttgatgctggctgaccttatcgtcaaagacgaaagcgccattcagcttatcgaagatggtctgcgcgaagtgtcgtgtggctatgacgcggaatatgaacaggctgagccgggtaaggctgagcaggtcgatattaccggaaaccatgtggctcttgtccccaaaggcagagccggaaatcgttgtacaattggagacagagacacaatggcaaatcaaaagaaaagctggtggacccgcatgcgcacggccatcaaaacaggtgactcggacaccatgaacgaactgctggactcagcgccagcggctgtaacgggggatgaaggtgatctgccgggcggcgtcaatctcaacattaacctttcaccacaacaaccattgccggacaaaaagcctgagatgggcggagatgtgaccggcgacggcgaggacgatatcaaaaccctgctcaaggccctgctggctaagctggaaggaacggcaacaggcgataatgctgacacccctgatgataaagataagaaagacccgaccggcgacggcgaggacaacgaagaggaaaccacgattactggtgattctgcctatcgcgctgaagtcattatcccgggtatcgatctgagccgtaaggtgaaaccgaccgcatttaaacgtgatgtgctggcggccgcagacaaaacactggttcgccaggttgtcggtgacgctgatatccgcaaattacctaaacaatcggttgatatggcgtttaacgccgtatctgagattgccaaagggagaaacacccgcagcaccacgggcgatgcacaacgtccaggcatgggcatgaccagcatcgcttccctgaacaaacaaaacgccgacttctggtctaaccgcaaaggataa

SEQ ID NO: 373707 - DNA, 498 bp, Salmonella enterica
atgactgcatatctgtaccggatgcctgttggcattgccagggctatctctcgcccgcaggacttaaccgtcgaaccggtgatccttaaatccgataacgccttcgcagcgtatggtctggctggcaaatacgacgctgacggctttttcgtgccgctggcggagggtgacaccgtcgacaaggtgaagggtatctacgttcgtccgtatccgaccacatcgcagccagacatggttcgccaggtgggtactgataagaatttcccgggcgacgccatgaagcgtgggtacatgacggtaaacgtgggtgctgatgcttcgtccgttaaaaaagggggcgtggtgtacatcgtggtatcagccgatgcttccatcccggttccgcttggtgggatcacggcggcagaggtgacaggcaaaacagccgcgttacctgatgctttttttacgggggccggtgacgctaacggcaacgcagaaatctcctggaagatttaa

SEQ ID NO: 373708 - DNA, 942 bp, Salmonella enterica
atgattacttttgatcaggcaaccgttgatagctccggtgcctttctcatcggggagctggagcgactcgaccaggggctgaatctgccactggtgggttatacctggacacgtgatatccagttgcgcgaagacgtctctatcgcagatgacatttccagctggacgaataccagttttggcgtggcgggttctggcgctaatccgaatggtaaaaactgggtaggcaaagattcaactgccattgctggcgttaatgttgatatcagtaaagacggcaatccgctgaacctttgggggatggagctgggatggactgttgttgagctggctgcggcacagcaggtaggccgtccgatcgacactcagaagtacgacgggatgcagcttaaatggcagatggataacgacgaacaggtttacgtcggagacgaagcgcttggtttgaaaggtctgacgaatctcgttggtgtgatgctgaacaacgcgacgaagacctgggctaactccaccaacgatgagagcctcgacagcgtaaacagcattctgtcgaattcatgggcagcatccggttattccgtcgtgccttctgatctgcgcattccgccagagcagtattcattgctggcgagccgtaaggtttccgaagcgggtaaccagtcactgctgacctatctggctgtgaacactatcgctttccaccagaacggcgttccgctggaaatcaaagcggtcaaatggctgaaagggcgcagggttggcggtaaagaccgtatggtcgcctacaccaacgataagaaatacgtccgctatccactggttccgctgcaaagcgttcctgttcagtatcgtggtctgtaccagattgcgacctactacggcaagctcggtgcggttgagccagtgtacaaagaaaccctgtcctacgtggacggtatctga

SEQ ID NO: 373709 - DNA, 369 bp, Salmonella enterica
atggcgaaagaaaagctggttaccatccatgttcacaccccgtttacgctgacgctcggagatctctcaaaacaggagtttgggcggggacggcataacgtaccagaagaggtcgcgtcgcactggtttacccgggcgcacgctgagctttccgaaagcggatcgaatgaaactgatgaccagcaacccgttattgacagccttcaggcgcagattgccgataaagataaactgattgccgatctgaaagatgctctgctcaagctgcaggagcagaacgacagcctgcaggcgcagattacttccgcccggactggcggtaatggggtgaaagatgccaaagaatcaaagcctgccaacagtaagtga

SEQ ID NO: 373710 - DNA, 408 bp, Salmonella enterica
atgccaaagaatcaaagcctgccaacagtaagtgattttcgccgcgacttcccgcagtttgctgaccctgccagatatcccgaagcacaaatccagtttcgtctgaatctggccgatgtgctgctgagcgaaaacgccaccggcaaaaagttgtttccgtactttgccgagttgttcgttgcgcactatatgacgctctgggcggcagatagccgggcgatgctggttggcggtccgggcggttcaaccaatggtgttcagtcctctaagtccgttgacaaggtaagcgtcagctatgacaccagcgcgacgctaaaccctgacgcaggcttctggaataacacccggtatggcgctgaattttatcagctgatcacgatgttcggtgcggggggacgccagctatga

SEQ ID NO: 373711 - DNA, 555 bp, Salmonella enterica
atgagtttcaaaagcggtgtaacaacgagggttgataacgctcaggcaatactggatgcgctaaagtcgctaaccaaaaaggatgtgctggtcggtatccctgcggaagacagcgatcgggatgatgtgccgttcggtaatgccgggattgggtatatcaacgaatacggttcacctgcacaaaacatcccaccacgtccgcatcttgtacccggcgttaaatcagttgaagaccagacgatgccgcagctcaaagcagcggcgcaggctgcgcttgatggtaatgcggcgggagcggaaagagcactcaaccgcgcgggtacagtggctgcaagaggggtgaaaaatcacatcaaagctgccaattttactccgcttgcagatagcaccgttgaagcgcgtgcgcgccgtgggcgtaaaggtgcgaaagcggaacttgcgcggcgtgctgctggtgaatctccgggcaccactttggctaagcctctttacgatactggcaaatatctcgcctcaataacccatgtagtgagggataaagatgccgactcttga

SEQ ID NO: 373712 - DNA, 390 bp, Salmonella enterica
atgccgactcttgatgtaaccgatgttcttttcgacccggatttttgtgacttcaacctttgggtaacgcgtcgggtacagacagtggacgaagacgggattggtagcgacagcgaagttaaaacgcagtttgccggggttgttaccgttgaccgttcactggaaaaccgccgcatgcagtccgggcaggttatcagtggagcaatccttatcgtgacgattgagcgactcacgcaggggcagactggccgtgatgccgatatcgtgacgtatcagaaccgtgattaccgtgtgacattcttcgacccgtacaccgcatatggcgccggctttgtacaggcgcattgcgagctgctgccgttcgatggaggatttcccgttgagcaataa

SEQ ID NO: 373713 - DNA, 549 bp, Salmonella enterica
ttgagcaataattccagtacggagccgggatggcttacacctgtcagcggcgatccggattatgacgaggcgctcgacaggctgttaagccagtgggtacgcaacgtttccggtttgccgactggaatggttcgcccccgatggcagaaagatcagccgccactgctgccagttgaaacgaactggtgcgcgtttggcgttaccggattgcccatagataacagtcccgcattcactaaccagactgaagagggcgctcagctctggcgacatgaaacctttgagtgcatggcgtcattttatggcccggcgggcatgacgtttgcgtcacgttttcgcgatggtatttctgttgcgcaaaacaacgccgaactgaactcacttggcctgtccatgggggactacaccggtctgacccctttcccagaacttatcaaccagcagtgggttcgccgttacgacattactgtgcgccttcgtcgcaaggtggtgcgcgactacggcattaaatcgctggtggatgcaccagtttcatttttcggagactaa

SEQ ID NO: 373714 - DNA, 1146 bp, Salmonella enterica
atgccgcagggattacctgtatcaaacgtcgttaatgtcgacgtgatcattgggccgcgcgcggctactggtcgaaattttggttcgctgcttattctcgggacatccacggtcattccggtgaaagagcgccttcgcctctactcctcaaaggaggacatcggatctgatttcggcgtggacagccccgaatatgaagcagcaacagtctatttctcccagtcaccacgacctaaagaggtgtatgtaggtcgctgggctaaaacactggcaacgggtgaggcgggtgctgctgaaaatctgatggatgcggttaacgccgtaatgggctacaccaactggtatggtctcggtattgcagacaaagaggatattgcagatgacgactggctgaaagttgctgcagccgtagaagcttcgggcgtcagccgcattctggcaattaccaccagcgatcccgccaccgttgacgccacttcaaccggggatctggcctacaagctgaaggcggcaaaatacaggcgcacgttcgtacagtatccctccagcagcaagtacgctgcgctgtctgcatttggccgcgcgtttacggtgaatttcaacggcagcaataccaccattatcctgaaatttaaacaggagccggggatcacttacgaaactctgacgactgatcaggcggcggcgctggatgccaaaaaatgcaacgtgtttgtgtattaccagaacgatacggcaatcctgcagcagggcgtcatgtccagcggagatttcttcgacgaacgccacgggctcgactggctgcagaactacgtacagaccaacctatataacctgctctacaccagcacaaccaaagtaccgcagaccgatgcgggtgtgacgcgtctactgtccaatgttgagcagtctatggatcagtccgtgacgaacgggctggtggctgctggcgtatggaacggtggcccgattgggcagctggattccggcgatacgctgaccaaaggctattacgtctacgcgcagccgatttccgagcaggcgcagacagaccgcgaagcccgtaaggcaccggttattcaggttgcctgtaagctggctggcgcagtgcatttcgctgacgtacagatcaacgtcgttcgctaa

SEQ ID NO: 373715 - DNA, 444 bp, Salmonella enterica
atgggttcaacttacagttttatggacgtcacggcgtccctctccggcccgactggcgagattgacctgggctacggttccgccagttcagaggaggggatcaccgttgcaatgggcggccccaaaaacaccatgaccatcggtgctgacggcgaagtgatgcacagcctgcacgcggataaaagcggtacggtaactgtcaatctgctgaagacctcgccgacaaacaaaaaactgtcactggcgtataacgcacagagtcagtcctcaggtacctggggaaacaacgtcattgtgatccgaaataaggtgagcggagacatcatcacggcgcgcagtgtggcgttccagaaacagccggataacgccaacgctaaagccggtaatacgatgccctgggtatttgactgcggcaaaatcgaccagatcctcggagagttttaa

SEQ ID NO: 373716 - DNA, 453 bp, Salmonella enterica
atggaatgttcagtcaaaggccacgattaccgagtggcaaaactcagcgtttttgatcagctgaaagtgacccgcaaactgctgccggtgctggcgggcatgatgtcagatttcgggagcattcgctcccttctgcctgcagatggcaaaatcgacagcgctaagtttgatgcgcttaagccggtgtttgaaaccctgctgccgcgtatcgctgaggaactgtcttccctgaccgaagaagataccaacgcgattattcatccttgcctggctgtggtatcacgcaaacatatggggggatgggccccggtgtttaacagcggtcagttgatgtttgacgatatcgacctgctgaccatgctgcagctggtggcgcgggtggtcgccgattctctgggaaattttttgcaaggactccctaccaacgggacgcccaccccgccagcggaataa

SEQ ID NO: 373717 - DNA, 1953 bp, Salmonella enterica
atgaacgctgagactattaaagattttctcgtctcccttggatttggcattgatgaagccggatacgagaaatttgaatctgttcttgctggcgtcaccgcaaatgccataaaaacagggctggcggtggaaggtgcggcgctgtccgttgttgcgtttacggcgaaaattgcctccggtctggataatctctactgggcatctcaacgcaccggcgcgacggttcaggggattcagtcgattggctacgcagtttcgcaggtgggcggtagtgtggacgcggcgcggacttcgctggaaagcctctcccggtttgtgcgtaataatcccggcgcggaaggctttctgaaccgcctgggcgtacagacccgggacgccagcgggaatatgcgcgatatggccgccatttttacgggcgtcggccagaagctcagcagcatgccgtattaccgggctaaccagtatgcgcagatgctgggcattgatgaaaatacccttatggcgatgcggcgcgggatcgggcaatttagcgctcagtattctgaaatgacaaaggcgattggcttcaatgcggatcaggccgctgtgtcgtcaaatcggtttatgacttcactgaaagcattcggtgaaatggccggaatggcccgagacaaaatcggttccaaccttgctgaaggaatggctggttcgattgataatcttcgcaaacgcatactcgaaaatttccccaaaattgaaagcactatcacaaagattgtgaaggggattctttggctgggggatatcgtcggtcgcgtggcgtttcgaattgttgaaggtgtaggggatattatcgactggtggggaaaactggataaagaaacgaaaaccctgatagaggttatcggtggtctggttgtcgccatgcggatacttaactctactttctggatgtcacctgtagggctgattactggtctgatcgtggcgttcggtctcttgtgggaagactacaaaacatggaaagaaggcggtaacagtcttattgactgggaaaaatggcagccagcgatagacaaagctaaagatgcgatggtctggctccgtgatcacctgctcgaacttaaggactctattggcggctggaaaacgtcactggaactgctggcgacctttatcgccggtgcgtggattagcaaggtaacgggcgcatttgccagactggcaggtataccgatgccgccgtggttaaaaggctggatggcctacgcggcttacctgtatgacgatcgggagaatatcgtcgccagtgcgcaatcgtctatcgattatgccaaacaaaacattggcgatggaatgcgtgcactggggattgataccgattttggccgcaatccccacaccgtcaaaggcgctaatattcagccggatattcttggcgcagaacctgtacagcatgcacaatctgcgaagcgcacttcagccgacaggaacaacaatccgggtaacattcgcccggtgggcggtaacggcttccggttcttcgagtccgcccttcagggctgggaggcgatgaaaaaccagcttatgcgctactttacagggaaaacaaccgggcgggcattacagaccattcaggatattgtcagtacctgggcgccggctggtgacaacaacgacccgaaaatgtatgcgcaggatgttgcaaaatggatgggcgttttaccgaacactgtgttgaacctcgccaacccggaaactatggccgcgctgatgcagtcgatggcgcgcaaagaagggtattcaaactggaacagcccgctggcgtatcaggccgctggtggtagccttaaccagcagactgttataaatgtccacggcgtgaacaatcctcaggaagcggctaatctgatcgctgacaagcagggtgctgtcaatgccagggcggtacagcaattgaaaggacctgcgtaa

SEQ ID NO: 373718 - DNA, 651 bp, Salmonella enterica
atggattttttatctgttttgctgcagcagcgaacccgctcgataggaataattattcctgatgtggttattaccgaaaagcatactgacactctggaaattacggaacatccggttgaacaacccacgaatgctggtgccagtggtgagggcgctggttacatatcagaacacgcattcaggcgaccttcagaagttgtgatggaaaccggattttccggaggcggatcgctgcttgattttgctgatacttccgctattggtctttcactggggctgagcccgaaagaactgtatcaggagctgcttaaccagcagcgggatcgtattcctttcgatgtgacaaccggcaagcgtatttacaacaatatgttgataaaaacgctggaggtgacgactgacaagagcagtgagaatgtgcttctggcgacccttaccctcagggaggtgattattacctccacgcagtcaatcagggttgcctcgaaaaacaatatgaccgagggagtagggacgtctgctgtacagaatacaggtaccaaaacaacggtaccgccgaataattccattctgaaatcgctgccacagatggcgcaaaaaggtgtcaccactgtcgatgggtatctgagcaatttatttctgggaaggtga

SEQ ID NO: 373719 - DNA, 303 bp, Salmonella enterica
atggaggccgtagaaatcccactggtcgctgataatcagacttttgccaccacaattaacggtacggtttatcacctgtctgtcatctggcgcggagagtactgggttctggatcttgctgacagcaatggttccgccattatctcaggtatgccgatgattacgggggctgacctgctggcgcagtatcgatatatgaatctcgggttttcgctggtggtactctgcgacgtggcaggacaggaaaacccgacgcaattcgatctcggaacgttctcacacctctatgtcttcacggagtaa

SEQ ID NO: 373720 - DNA, 1032 bp, Salmonella enterica
atgtcaaaaaactggatgcgtcactttgaattattgctggttgacgataagggcgacgggataaaaatttctgagcttaaagtcactttcaatattcagaaaatgcctgcgaccatatttaatggattcgttggaaattttaaggtttataacctgtcccctaccactcagaaccggattatgcagaaggaattctcgcgtatacaggttatagccggatataagggacaaccggatgcaacgggtaattatcccgatgaaaacgttggtatgatattcaacggagatatccgttttactgtcaccgggaaagataatgcgacagacagttggatcatgttgcagtgtatcgacagttgggaaggccacctgaacgccagtgtgaaaaccacagtggctgccggctggaagtacagtgatcttttcagcctgggcatgaaatcattcgggccttatggtatcgagtcaggtgcagttcctgacatgcctgagacggtcttcccccgtgggcgggttgtctatcagagcacagccaggctgatgaatcatatcgccggacagtgtaacgcttactggtggtatgagaacaatcaggtcaacattgtgccggaagataactatatcggtgtcgctacggtgctgaatgccaatacagggctaatcggtatgcctcagcaaacaatgggtgcaggcgtaaacgtcaggtgcctgattaatccaaacattaagctgggtgggcttattcgtctggatcaggcatctgtctaccggacctctttgagtaatgaccagatagcgcaatctccagcacggctggatgaatcggaaagcgacggtaatctctacgttaacggcctgcccggcatgtcacagcctgccagcattaatactgacggtgattacattgtgggcagcatcgattatactggcgacactcgcgggcaggcgtggtatatggacctgctttgcctggctaaagatggcaaagaattgcttaactcgaaagggattgatgcggcgaaatacacatga

SEQ ID NO: 373721 - DNA, 336 bp, Salmonella enterica
atgaaaagactattgttggcagctttacttgtctgtatctccttcacttcctttgctgataccgggtgtggaccattcacgatcaactggaaagcgcaagacggacttgcaaggattaatggacagaaaccggagacacagaaaatcacctttctcaaacaaaaaggggattatgacaatgtgaacatccaatggatggttccgggtaatggacgttggttagggatggactttgtggccagaaatggcaagccgatcctcaatgttgaagttatccgcaaaaatatggacgagccgcgagagttctggacgtatgactgccggaaggtgaagtga

SEQ ID NO: 373722 - DNA, 378 bp, Salmonella enterica
atggctgaaaagcaggttaaagattacgaaaagtttgttgtacgcttccctgatgggatgcgtgatgcgatagctgagcgcgccaagcagaatggaagatctatgaactcagaaattgttcagatactcgaggacgcacttgaaaatcgtcctgttaaggttcagagcgaaatgaacatagatcttttcgctgagcagggcgtggatgatgacagaatcgtaatttcaaaaagtcaattactcgagaaggtcgataccgctgttcaggaggccatagaagcaacggctgagcacatggctataaaaatggctgaagctgcattcgactctttatcgtcgaaatatgatttcgtgccaaagagcaaaaagcccacctaa

SEQ ID NO: 373723 - DNA, 159 bp, Salmonella enterica
gtggaaaaaaatgaagcaaaaacaactctgcgttacccgcagaaagtgaaagaagagtttaagcgcatcgctgaagaagaggggctatctgaaaacgctgcgctggttcaggcgctggtttgggctttgaaattcagagggcaaatgcatgtccagtaa

SEQ ID NO: 373724 - DNA, 648 bp, Salmonella enterica
atgtccagtaaaaacagcgaagcccagcagtgcgctaacactaactgggcctctatgtcggaaaccgtatgcaaggaaaccaacatgaatattgtagcaaaatcagtttataacttccacggcgtgaatcttataccagtgaaagatgttgctggtatatggctgacatctgctgatatagccaaggctcttggttataaaagtaccaaatcaatttccaacttatttacgcagtatgaagatgagttttcccaagggatgacaatggtcatcgaatcagtgaccaatgggattaacggttctactcgtcgtatgaaggtgcgtgttttctcgcttcgtggtgctcacctaatcgcaatgttcgcccgtaccccagttgccaaagaatttcgtcgctgggtactggacattctggatcgggaagtagattcctcaggtgccgatcgtctaccgactaaatttcatcagagggtaatgctttaccttgataccaaagggggcgtcatcaatacgtacccattgaataaagatcaggtagtcatgtcatttgatgcatttgtcagctatttcaggaaaaagggatggatagtggccccaagggatgaggttgcaaaaggaataatgggggcaatacaagttttatcgtag

SEQ ID NO: 373725 - DNA, 786 bp, Salmonella enterica
atggattcgattatcaaacatttcgagtttaagtcaagtgaaggtatggctgtaagtattgatgcggcccgcttcaaaggaaaaccggtattccttgccgtgccacttgcaaaggctttgggttataccaacccggctgatgcattgaaaaaacattgtaagtcactgattaagcttaattatagcgaatcgcgagaattgggtttcggtgacaacccgcggggtatccaacttgttggtcaggcagacgtttttcgccttattatgcgcagctccctcccatcagcagaacgtgttcaggattgggtttgcgaagaagttctccctgcgttaatggataccggaacttacagtatcagaaaggaaaaaacatcatctggcctccctgaataccgtcttgcaaaggccgaacagttgaaggcgctggcgctggaaaaaaatatcgcatccgctcgtgagttgatggtgatgctgccccgtcttgaccctatgtcccaccagacgctggcggcttcgctgattaatccgattatcggttatgacgcgatccccttgccggtgattgaagagcattactacaccgcagcagaagcgggtgagaaaataggtgtcagcgccaataaaatcggtcgcatcgctaacgcaaacaaccttaaaactgagcagtacggcaagttcttccttgataaatccgctcactccagtaaacaggtcgaagcgtttcgctataacgctgagggcgtaaaagccttacgccatcttattcatggtgctgacgtagcttaa

SEQ ID NO: 373726 - DNA, 756 bp, Salmonella enterica
atgccagtttcactttcctctcaactcggcagtaaagaacaggctgatacaaggcttgccagctctatcatgtctgcgttgcgagtttcaatgcctggcatcgtccagtcatttgatcccgacaccgtaaccgcagttgttcaacccgctatcaaaggctatgagccggattcgaatggcgttagccagtcgacgacattaccgctgctggtggatgtgcccgtggtatttcctcgcggcggtggctgcacgctaacgttcccggttaaagctggtgatgagtgtctggtgatttttgccgatcgctgcatcgatttctggtggcagaacggcggggtacaggagcctgtcgacgatcgggtgcatgatttatcggatgcggtctgtatcgtcgggccgcagtcgcaggcgcagaaaataagcggaatcagcaccagcgccgcacaattgcgtaccgatgatggggctgcttttgtggaagtggccgcaggccataacgttactgttaaaacccccggcgcgctgactgctactgcagaaggcggaaccacgatcacatcacccatcattacgctaaacggtgacgtaaccattaacggcaatctgtcgcaggggatgggtgagggcggaggtagcgcaacgatgctcggtcctgtcacggtgactaatgatgtgaaggcgggcggtaagagccttatgacgcacactcatggcggcgtgcagacaggtggcgggaataccggcgcgcctaattaa

SEQ ID NO: 373727 - DNA, 354 bp, Salmonella enterica
atgcgataccgacgcgaagataccgaaggtgattacacttttggtagtggcgatgatacctggctgattaactcgccagaagctgtcgcgcaggcggtaaaaacacgattcgcattgtggtacgggcagtggctcctcgataagacagagggaacaccgtggattcagtctgtgctcggtaagcaaaagccggaaacctacaatctggcgatccgcaagcgcatcctcgaaacgcggggcgtgaaatccatcctctctttcaataccacagtgaacacgacgacgcgccgcgtccagttcttcgctgaaatcgacactatctacggaacaacgacagtaaccaacgaggcataa

SEQ ID NO: 373728 - DNA, 1200 bp, Salmonella enterica
atggccctcaatttggacacactcggcttatcggcaacggtaaccgctgaggggatcagtgcgcctgattaccagacgatactcgataccctgacgagctatttccagcagatttatggtagtgacgcttatctggagccggacagcaaagacggccagatggtggcgctggtggcgctagctattcacgatgccaataacacagccatttccgtctataactgcttctcacctgctacaggttacggcgcagcgctgaccagtaacgtaaaaattaacggtatcgcgcgcaaaggtgcaacgaactctaccgtggatttactgctcactggcaccgcaggaacaaccattacgaacggcacagtgaaagacactaataatgtgatatggcgtcttcctgcttcagtggtgattggggttgatggtgccgtgacgttaactgctatctgttcaagcagcggagcggttgcggccctggccgggactatcaccaccatcaatacaccgacccgtggctggacgtcagtaaccaacccggcagcggccaccgttggcgcacctgcagaaacggacgcagaactgcgcatcaggcaggggcagagtgtcgcgataccatccatcacaccatttgaaggtgtggacggggcgatcgctaatattgctggtgtgacgcgccacaagctctatgaaaatgatacaggaaagactgacggtaacgggcttcctccgcattccatctcggccattgttgatggtggcgatgttaccgaaatagccaggaccatccggggaaataaagggcagggggtccggacctggggaaaaacatccgtaaccgtaccggataaatatggcaatcctcacataatcagtttttcgcgaccaactgatgtccctgtttacggaaaaatcaccttaaaagtttttgccgggtacacctctcagataggtgtgcagattcagcaggctgttgcggattacattaacagactgatgattggtgatcaggtactgctgagccggatttattctcctgctaaccttggggtcgtcagtggtggaaatgcgcgctattacgatattcaggagctactgatcggcaaatctccggaagctgttgctgcggcgaatattaatattgcttacgacgaatctgcctcctgtaagccggaaaatattattattacggtggcagcatga

SEQ ID NO: 373729 - DNA, 681 bp, Salmonella enterica
atgagcaaatatacggacttaattactaactatcatgcgacaaaacctaaattctttgaacacatcgatttagtgaccaggccgttagctgaaacctcagccgcaataaatgggctaataaacgcttttgatattgatcatgcgacaggaatacaactcgatattctcggccaatggatagggttaagccggattgtaagccagccaataagcggtgtctatttcagctgggacactgacggactcggatatgaccagggcgtctggcaggggccatatgatccggattcgggttatacctcggtgagcgatgaaacctatcgcatcgttctaaaaacgaagatagcaattaacaactgggacggaagaaacgactctctgcctcccattcttgacgctgcactggacggggccggtctgaagatgcagatcgtcgataaccaggacatgaccataggtatctgggtttttcctgaaatagatatttcatcggtctctctcgaacttattgctgcgatacgacaagggtatctgacggtaaaggccgctggtgtatggggcggaagtattgaaattccttcggtggaaacgccttctgaaggaaacaggttttttgggtttgatatggataacgaatatatcagcgggtttgatgccggttcatgggggacattactctga

SEQ ID NO: 373730 - DNA, 1413 bp, Salmonella enterica
atggctaaaaatgattttaaaccgtttgcgacgggcaagggtgctaatgttacatcgcagcctgactgggaggcgctgccggcgctcctgtctggttttactgcgggcaaggcatcaagtgcacaggtaaataaagcgctgcgtcaggcaagcttcatcgctgcaacactggcacagtacacagccagcaagagcgggcaggatgtactcgatgatggtgacctgagcggctttatcgccaaaatgtccgctgcgttcggtaaggattttcagactcttgatgccacgctgacggcgctcgctggtcttgctaccggtgcagataaactcccgtattttacgggtaatgataccgccggacagacagatcttacttctgttgggcgcgacatcatcggaaaagccagcattgcggatattctcacatacctcggtttgggagaaacagcaaagcaagctgctggcgcagtccagaaaaccggcgatgagatgaacgggaagttaaccctgccacagacatcttccttcggcgtgaatactaataacacactgggcggtagttccatcgctatcggtgataacgataccgggctcaaagggaacggcgacggtaatctggcatttatggctaacaacgtgctggcaggatattttaatgaaaatgaattgcagcacagtaaaaagatgctgactaaaaattttcaggctcttgttgataataactggccggagggggcggggggattttctggtcagttaagcagtgaagcaccgtttagtgtaccaatggttcgccgtcagaataatgataataattttttcccgctcctgaaaggaaaggtctcactggagtctggctatcctgtagccgcctctttcggaatattaaccagtggaaatactaatttcccacaaattgcaattcatgcgaaaacagactttgatgttaacgataaaatatggatatttgatgtcgcaaccggggaatttcgcgcgccgggcaggattacggctacagaaattttattgagcggtaaaagccgtgttgctcctgatggtaatttatatggtgatgtgtggggcggctggctgaatgacttccttaataacaattacaaccgcaaaaatactgccagtctgggtgattatggatgggttcgtgacgaaagcaccggttttataatgcaatggggaacgcttggtagctcaaacggaacctacaactttccgcgagagtttccggtatcctgctttgctgtatttgtcaccaacactaatcagcagggaggttcagtggataatgcgtttggatacccggtgagtaaaagccagttttttgccgcaactaaagcatcaacagacggaaatgtcgtaaatggctatcctgtagcctggtttgcgatcgggagataa

SEQ ID NO: 373731 - DNA, 417 bp, Salmonella enterica
atgagcgattattattacagctttaaagagaaaggttttttctacaagccggataccgaatcgggagattgcccgactgatctaattcctctgactgatgaacattaccatgaacttatgcagggtcaggtggacggaaaatatattgagcacaggaaaggaggcccggtactggttgaacatcgcgaatatacacatgaagagttgattgcacaggctgaagccagaaaagcggaacttcttgctgaagctgagtcagttattgcgccactggcgcgggcggtaaaattgaacattgctacagatgaggaaataaagcggatggaggcatgggaactctacagcgtactggtaaaccgggtggatacctcaaatcctgactggccggataagccagccagtaatataatgttgtaa

SEQ ID NO: 373732 - DNA, 1467 bp, Salmonella enterica
atgaaaataggattccaaccagccatattgcaatatgcatatacaagtaacgaggcgacatcaaaccttgagttattaaataaatggagaatagaatccccagatattgagaaggaggagcgtaatagtatttacgacaaaataatagaagcaaatcataccgggagcttatcaattactgctcatcatgttacctctattccggtatttcctgataatttatccgagttgaatttatcttcatgctatacactggagtctattccaaatcttcctgatgggttaaaaagtttaactatatctggaaatcagaccattaaaatttcatatttcccagatagcttagagtcactatctatagatatgcaggcatatgaagaaaattatactttccccgcattaccttatggattaaagagttttactgcgtgctatggtaaatttttgcctccccttcctccgcatctatcttctttgtcattgcaaaatttccctgaaatatcatgtgctgagttaccatataaattagataaattagacttacaaaattgccctttcttgccattaatgaaaatgttacctgaggggttaaaagaactaagtattgaacttatacaaacagttcccggtactgttatagatgatattttgcctgataagctaaaaaaattaagtatcaacttttgtgataatattaaacttccagttaagcttcctgttaatttaaagtctatcaatttatcctcaaggacccctattgtatgggaaataccaacctgcaatctgcctgcacatatagatattagtaccgatggttatgttaagcttaatcctgaatttcttaccaggagtgatattacctttagtaacaaacctgcaggagatgcgttaagttttcagcctggagatgtggtttatggtttatgtaaggcaagagatcgagtaaatactttagttaattcgttatattatttttcaaaaaaagatattattattcaaaatacattaacagatgcggtctgggacaggaagaatagagccgtgtttaataaagatgagaagatagcagaaagattgaatgatgttcagagagggactttttttagagaatttttatctcaacataaaaaatacaatattaccgaagataaatattcagacttatccaatgaggagtgctggataaaaacaagtaaagccggtcttgaattccaaacacgattaagggaacggtcagttatttttgtcattgacaatttagttgatgctataagtgatatcgcaaataaaacaggaaagcatggtaattctattacagcacatgagctaagatgggtatatcggaatcgacatgatgatctggtaaaacaaaatgttaaattttttcttaatggtgaggctatttcacacgaagatgttttttcattagttggttgggataaatataagcctaaaaatggagtgtga

SEQ ID NO: 373733 - DNA, 843 bp, Salmonella enterica
atgaccaccgccttttttgtcgccgccgactggcttgccgaacatattgatgatccggaaatacaaattcttgacgcccgtatggcgccgccaggacaggaacatcgtgatatggcgggcgaatatcgcgccggacatattcccggcgcgctgttttttgatattgaagcgctttccgatcgcgcatcgccgctgccgcatatgatgccgcgcccggaagcgtttgcggtggccatgcgtgaactgggtgttcgccaggataaacacctggtcatatacgatgaaggcaatctgttctccgctccgcgggcatggtggatgctgcgcacgttcggtgccgagaaagtgtccattctggcgggcgggctggcgggctggcagcgcgacgaatggctattgcgcgaaggcgaggaagcgcatgaaggaggcgagtttgaggcgaaattcacgccgcaagccgtggtgcgtctcaccgacgtattgctggcaagccatgaaaaaaccgcgcaaatcgttgacgcgcgtccggcggcgcgttttaacgctcaggctgatgaaccgcgtccgggactgaggcgcggacacattcctggcgcgctaaacgtcccgtggacggaactggtgtatgagggcgaattaaagaccactgacgaactgaatgaggtttttttcagccacggcgtgagtttcgacagaccgattatcgccagttgcggttccggcgtgacggccgcggtcgtggtgctggcgctcgccacgctggatgtgcctgacgtcacgctttacgacggcgcgtggagcgaatggggcgcgcgtaccgatttaccggttgaacccgcttaa

SEQ ID NO: 373734 - DNA, 798 bp, Salmonella enterica
atgaaacatttacgcgtggtggcctgcatgatcatgctggcgctggcgggatgcgataacaacgataaaaccgccccgacgactaaaagcgaagcgccagccgtagcgcagccctcgcccgcgcaagacccggcacagctacaaaagctggcgcagcaaagccagggcaaagcgctcacgctattagacgcctccgaagcgcagcttgacggcgcggcgacgctggtgctgacgttttcaattcctttagatcctgaacaggatttctcccgtgtggttcacgtggttgataagaaaagcggcagcgttgacggcgcatgggagctggcgccaaatttaaaagagctaaggttacgtcatctggaacctgaacgcgtgctggtggtcacggttgatcccgccgttaaagcgctgaataacgccaccttcggcaagtcttatgaaaaaacgattaccacgcgtgatgtccagcccagcgtcggctttgccagccggggatcgctgctaccggggaaaatagcggaaggactgccggtcatggcgcttaacgtcaaccatgttgatgtgaactttttccgcgttaagcccggatcgctggcgtcatttgtcagccagtgggagtaccgtagttctctctctaactgggagtccgaccatctgctgaaaatggcggatctggtttataccggtcgttttgatcttaatccggcgcgcaatacgcgtgagaaactgctgctgccattaagcgatattaagccgctgcaacaggcgggcgtatatgtggcggtaatgaattag

SEQ ID NO: 373735 - DNA, 4104 bp, Salmonella enterica
ttgtttacccttagcgatatcggcgtgtccgcgcaccgttaccataatcggctggatatctttacgcaaagcctggaaaacggcgcggcgcagtcgggaattgagatcgttcttctgaatgataaagggcagacgctggcgcaggcgacgagcgacgcgcaggggcatgtgcaactggaggctgataaagcggcggcgctattactggcgcgtaaagaggggcagaccacgctgctcgatctcacgcttccggctctggatctgtcggaatttaatgtcgctggcgcgcccggctacagcaagcagttctttatgttcagcccgcgcgatctctaccgaccgggcgaaacggttatcctcaacggattactgcgcgatagcgacggtaaaacgctgcccgatcaacccgttaagctggaagtggtaaaaccagacggacaggtgatgcgtaccgtcgtcagccagccggaaaacgggctataccgtttgaattatccgctggatatcaacgcgccgaccggcttgtggcatgtccgcgccaacaccggcgataatttgctgcggagttgggatttccacgtggaagactttatgccggagcggatggcgctcaacctgacggcgcaaaaaacaccgctggcgcctgcggatgaggtgaaattctccgttgtcggctattacttgtatggcgcgcctgctaacggcaataccctgcaagggcaacttttcctgcgtccgctgcgcgacgctgtcgcggcgttgcctggcttccagttcggcaatattgctgaagagaatctttcgcgcagcctggacgaagttcaactgacgttggataaaggcggacgtggtgaagtgagtgctgctagccagtggcaagaagcgcattcgccgctgcaggtaattctacaggccagcctgctggagtctggcggtcgtccggtcactcgtcgcgtagagcaggcgatttggcctgccgatacgttaccgggaattcgtccacagttcgccgccaaagcggtatacgactaccgtacggataccaccgttaatcaaccgattgtcgacgaagacagcaacgccgcattcgatattgtttacgccaacgcgcagggcgagaaaaaagcggtgtccggtttacaggtgcggctcatccgcgagcgtcgcgactattactggaactggtcggaaagcgaaggctggcagtcgcagtttgatcaaaaagatctggtggagggcgagcagacgctggatctgaacgcggatgaaaccggaaaagtcagcttcccggtggaatggggcgcgtaccgtctggaggtcaaagcgccgaatgagacggtcagcagcgttcgtttctgggccggctatagctggcaggataacagcgacggtagcggcgcggcgcgtccggatcgcgtcaccctcaaactggataaagcgaattatcgtcctggcgacaccatgaaattgcatatcgccgcgccggtcgccggtaaaggttatgccatggtggagtccagcgacggtccgctgtggtggcaggcgatcgatgtgccggcacaaggtctggagctcacgattccggtggataaaacctggaatcgccacgatctctatctcagtacgctggtggtgcgtcccggcgataaatctcgttccgcgacgccaaaacgcgccgtggggttactacacctaccgctgggggatgaaaatcgccgcctcgatctggcgctggaaagcccggctaaaatgcgcccgaatcagccgctcaccgtcagggtgaaagccagcgttaaacacggcgaaatgccaaaacagatcaacgtgctggtctccgcggtcgatagcggcgtattgaacatcaccgattacgcgacgccggacccgtggcaggcgttcttcggtcaaaaacgctacggtgcggatatctacgatatttacggccaggtcattgaagggcaggggcggctggcggcgttgcgttttggcggcgatggcgacgaccttaagcgcggcggaaaaccgccggtaaaccatgtcaatatcatcgcgcagcaggcgcagccgatcacgctcaatgagcagggcgaaggggtcgtaacgctgccgattggcgactttaacggcgaactgcgggttatggcgcaggcatggacagcggacgattttggtcgcggcgaaagcaaagtcgttgtcgccgcgccagtgattgccgagctgaatatgccgcgttttctggcgggaggggatgtttcgcgactggtgctggacgtcaacaatctgaccgaccgcccgcagacgctgaatattgcgctcgccgccagtgggttactggaactgcttagccagcagccgcaaccggtcaacctggcgccgggcgtgcgcaccaccttattcgttccggtacgcgcgctggaaggttttggcgaaggcgaaatccaggcgaccattagcggtctgaatctgccgggagaaaccctcggcgcgcagcataagcagtggcaaatcggcgtgcgtccggcctggcctgcccaaacggtaaatagcggcattgcgctggcgccgggagagagctggcatgtaccagagcagcatctggcaaacgtctcgccagccacgttacagggacaactgctgttaagcggaaaaccgccgctcaatctggcgcgctacattcgcgagctgaaagcatatccatacgggtgcctggaacaaaccaccagcgggttattcccggcgctgtataccaatgccgctcaattgcagtcgctcggtattaccggcgatagcgatgaaaaacggcgcgccgcggtggatatcggcatctcccgcatactacagatgcagcgtgataatggtggttttgcgctatgggatgaaaatggggcggaagagccctggctaacggcctacgcgatggatttcctcattcgcgcgggcgagcagggatacagcgtcccgccggaggccattaaccggggcaatgagcgactgctgcgctatctgcaggatcccggcacgatgctgattcgttatagcgataatacccaggccagtacttttgccgctcaggcttacgccgtgctggtactggcgcgtcagcagaaagcgccgctcggcgcgctgcgcgaaatctgggagcgccgtagtcacgcggcttcaggactgccgctgatgcaattgggcatcgcgttaaacacgatgggcgatgccagacgtggcgaagaggccattacgctggctctgaatacgccgcgtcaggacgaacggcaatggatagcggattacggcagttctctgcgcgataacgctctgatgttgtcgctactggaagagaacaacctcagaccggacgtgcaaaacgcgctattaagctcgctttctgagcaggccttcggtcagcgttggctctctacccaagagaacaatgccttgttcctcgccgcgcattcgcgacaggccagcgcgggcgcctggcaggcgcagacctcgttagaggtgcagccgctgtcaggcgacaaggcgctgacccgtaatctggatgctgaccagctggccgcccttgaggtgacgaacaccggtagccagccgctatggctgcgtctggatagcagcggctatccctcatctgcgcctgagcctgccagcaacgttttgcagattgaacgacaaatactggggaccgatggtcagcgcaaatcgctgtcctcgttgcgtagcggcgaactggtgctggtctggttaacggtagtggccgatcgcaatgtgccggatgcgctggtggtggacctgctcccggccgggctggagctggaaaaccagaatctggctgacagcagcgccagcctgccggagagcggtagcgaagtgcaaaatctgcttaatcagatgcagcaggcggatattcagtatatggaattccgcgacgatcggtttgtggctgccgtcgtcgtcaatgagggccagcccgtgacgctggtctacctggcgcgcgcggtaacgacggggacgtaccagcttgcgcaaccgcaggtggaatcgatgtacgtgcctcagtggcgggcaaccggcgcgagcgaggggctgctgattgtgacgccttaa

SEQ ID NO: 373736 - DNA, 408 bp, Salmonella enterica
atggggcggggtgtcgctgccgactgtccgcaggcgcgtgcgcatacgtttatcgtctggccgcggccgctggagccgtggctgccgcctgcggaaagacgtagcgcccgcttgccctcggcgtccgaccactgtccgccgctacagggcagtgatgccgcgccgttaatgctgtcaggagtgagggatggcgcggtgatcaggcaattgccaggccaggaaaacgttacgctgcccgtctcgactaccggcggtaaagggcgtcgctggtggtttttaaatggcgaacctgttaatggcgcaaacaatcgtctttctttattactcaatatcgctggacgttatcaacttgtcgtaatggatgagtccggtcaggttgctgcggttaattttgaattaatacgttaa

SEQ ID NO: 373737 - DNA, 2379 bp, Salmonella enterica
atgaaaaatataaaaagccagggaaatggcgaacagcctgctatttctcgccgccactttatccaggccagctccgcgcttattgcgttaccgtttgtctcctcgccagctaccgctcaggcgcgcgctgtgacggccactgaaaacaggcctgcggaaaaagtcgttcagacatgcagcacttttgactgcgggggcaaatgcgatattcgggcgcatgttagtgacggtatcgtgacgcgaatttcaacgcgaccggataatgcgctggatgcgcaaatgccggtgatgcgtgcctgtgttcgtggacgcgcataccgtaaatttgtttatcatcctgacagacttaaatatcccatgaagcgcgtaggaaaacgcggtgaaggaaaattcgagcgaatttcctgggatgaagcgacaaccttaatcgccgataatttaaaatcgattactgaaaaatatggcccggcttcgcgctatgttcatgttggtaccgccgtttccggcggcaccttttccggcgataaaatggcgcgtcgcctgttgaatctgaccggcggctatctcgaaagctaccattctgtgagtatgggcaacacggcggccgcgacgccttatacttacggcattgccgccagcggcagttcgctggatacgcttttggagaccaaactggtgattctgtggggccataacccgacggagaccatttttggtcataccaactatttcttgcagaagatgaagcagaacggtacgcggtttatcgtggtcgatccgcgctattccaacaccgtttcgtcgctggcggatcagtggatcccgctgctgcccaccaccgacaatgcgctgatggacgcgatgatgtacgtcatcatcagcgagaatctgcacgatcgcgcatttattgcgcgctacgctatcggttttgacgaagactcaatgccggaaggcgtaccggctaacgaatcgctggtggcgtatctgaccggcgccaaagacggtgtcgttaagtcccccgagtgggcggaaaagatcacccatgtgccggcgcaaaccatacgccagttagcgcgtgattacgcgaataccaaacccgccgcgttgattcaggggtggggaccacagcgccacaactgcggcgagcgcaccgcgcgcggctcgactctactggcgaccattaccggtaatgtcggcatcaaaggcggttgggctgcgggttacggcggctgcgctaaccgtaaatttgccgcgggtccggagatgccggataacccggtaaaagccaaaatttcggtgatgaactgggtgcaggccgcagacgacgccagcaaagtgacgccggatatggggctgaaagatgccgataagctggacagtaacatccgtattctgttctctctggccgggaactatctggcgaatcagaaccccgatctgcaccaggcggtacgcgtactggaggatgaatcaaagatccagtttattgtcgccagcgatctgtttgtgacgccgagcgcgaaatacgctgatctactgctgccggaagccagctttatggaacgctggaacatcggtgaaacctggggcacggcaagctacctgatactctctgaaaaactgatcgagcctgaatttgagcggcgctccgactacgactggctacgtgaggtggcggcgaaattaggcattgagaatgaatttagccaggggcgcgatgagaaagcgtggattgaacacatctgggaacagacgcgcctggcgatgccggacgaaaatctgccggattttgccacgctgcaaaagacccgtcagcatctgttcaaaagcgcgccatttatcgcctttgaagacaatattcgcgatccggacaatcatccgttcccgacgccgtcagggaaaatagagatcttctcgaagcgcctgtacgacatgcagcatccggaaatcccggcgttgtcgcactacgttcccgcgcatgaaggcccggaggatacgctggcgaaagattttccgctccagttaattacgtggaaaggaaaaaaccgcgccaactcaacgcaatacgctaacccgtggctgattgaagtgcagcagcagacattgtggatcaacccgcaggatgcgcaaacgcgcggcattacgcatggcgacatggtacgcattcataactcacgcgggatttgcgaaatcccggcggaagtaacgccgcgcattattcccggcgttgtcgcgatgcaggccggcgcctggtggcagccggatgaaaacggcgttgataaaggcggctgtgcgaacgtcctcagctcggcccgtattaccgcgctggcgaagggaaattcacatcaaaccatgctggtggaggtggctaaagcatga

SEQ ID NO: 373738 - DNA, 864 bp, Salmonella enterica
atggttaacctgacgatcgatccggcggtagacgtgacgcaggcctgcgtccgtcgtcgctttcgtttttcttcctgccgcgcttgcgccgatgtttgtccggcgcaggcgttttcgctggcgcaggggcaggtcagcatagatacgacgcgctgcatagcctgtggcgactgtctgtttgtctgtcctgttgacgccattatcggtatcaaaccggttaaacgctttgtgcagggggatacgttggtggggccgttttcgctacaggcgccaacggtcgatgaactgcttctctggcacagccagtacggtattcgctttattgatattgcggtggagcgatcggcgcagtggctgatggcgctggcgaggctaaatttagcgctgcgccgctacggcgagccgggctggtctttcaaacacgttgtcggcgcggagattaacgcctcgcggcgcactctgtttcatgttccgcgcgacgccattaccccgtgtgccgtcgagccggggaaacggcgtctcagacaggcgttttccgcgttcagcgaatgcgtacccgaaatcagtccgcaagagtgcaggatgtgcggtgcctgctggcgaagctgcccggaaaacgttatccagtttgacgacgacacgctgacgatagcggcggcgcgttgtacgggatgcggcggctgtgcggcggtatgcccgcatcaggcgctgcggctgcgttttgacgtggaacccgcctcaacgcggcatagtgcggtgcatacgctcacctgcgaaagctgcaaacgtactttccatgctctcacgcctgaacacacgcactgcgtgctgtatcagtcccctgagtttgctgtgcgcctttaa

SEQ ID NO: 373739 - DNA, 807 bp, Salmonella enterica
atgcaaatcagtcacaatactgcatcccctctgatttgtgtgcagaacatttataaaagttattccggcgtcgaagtactaaagggaattgactttactctgcatgcgggagaggtgcacgcattgcttggcggcaatggtgcgggtaaatcaacattaatgaagattattgccggtatagtcccgccagatggagggactatcgatattgctggtgtgcgttgcagtcatttaacgcctctgaaggcgcaccagtatggcatttacctggttccccaggagcctctgttatttccgagtttatctgtgcgggaaaatatcttgtttggcttgcagggacgtcaggcctccacggaaaaaatgcagcagctattaaaggcgatgggatgccaactcgatccggcgagcgctgcgggtacgcttgatgttgcagaccgccagatcgttgaaattatgcgcggcttgatgcgcgactcgcgaatcttaattcttgatgagcccacggcgtcgttaacgccagccgaaactgaccggttatttacgcgtctgcaagagttgctgaaaaagggtgtcggaattgtatttatttctcataagctgccagaaattagacagttagctcactgcgttagcgtgatgcgtgacggtaaaatcgcattattcggaaaaacgcatgaccttctaccgacgagattattcaagctatcaccccggcaacgcagggcgtcagtctttccgcgagtcaaaagttgtggctggaattgcctggcagccgcccgcagaacgaacgcggcgcgacggtattag

SEQ ID NO: 373740 - DNA, 876 bp, Salmonella enterica
atggctgatttagatgatattaaagatggcaaagattttcacaccgataaaccacaaactaacactttgttcgcattaaaaggctgtggcgcgctggattggggaatgcagtccagactggcgaggatttttaaccccaaaaccagaaaaacggtcatgctggcctttgaccatggatatttccaggggccgacaaccggacttgagcgtattgatatcaatattgcgccgctctttgaatatgctgatgtcttaatgtgtactcgcggcatattacgcagtgtggtacctccggcaatcaataaaccagtcgttttacgcgcatccggggcgaattctattctcactgaattaagcaatgaggcggttgcggtggcgatggatgacgctgtgcggttgaatagctgtgctgctgccgcacaggtttatattggtagtgagcatgaacatcagtcgattaaaaatattattcaactgattgatgccgggttacgcgtcgggatgccaataatggcagtgaccggggtgggtaaagatatggctcgcgaccagcgttatttttcactggcaacgcgtatcgctgcggaaatgggggcgcaaattatcaaaacgtattatgtcgataaaggttttgagcgtattgcggcaggttgtccggtgccgattgtcatcgccggcggtaaaaaactgcctgaacgtgaagcattggaaatgtgctatcaggcgattgaccagggggcttctggcgtagatatggggcgtaatatattccagtcagaagatccggtagccatgattaaagcggtacatgctgtcgttcatcataacgaaacagcagagcgtgcttatgagctgtttttgagtgagaaaagttaa

SEQ ID NO: 373741 - DNA, 2199 bp, Salmonella enterica
atgtccgtcgcgcacgttgccttgcccgttccgcttccccgaacctttgattacctgctgccggaaggcggggtcgccaaagccgggtgccgcgtgcgcgtgccattcggcaagcagcaagagcgcgtgggcattgtcgtctcggttagcgaccacagcgaattgccgctcgatgaattaaaatcggtcattgaaatcctggataacgagccaatcgtttctccctccatctggcgcttactcctctgggcggcggattactaccaccatcccctcggcgacgttctgtttcacgctctgccggttttattgcgtcagggaaaaccagccagcaacgcgcccctatggtattggttcgccaccgaagaggggcaagccgtcgatatcaacagcctgaaacgctccgccaaacaacaacaggcgctggcggcgctacggcaaggaaagatctggcgctatcaggtagccgagcttgattttactgacgccacgctgcaaacgctgcggcgtaagggactttgtgagcttgccagtgaaacgcccgcgtttaccgactggcgggagcgttatgccgtcgcaggagagcgcctgcggctgaataccgaacaggcgacagcagtcggcgcgattcacagcgcgtcggacggtttctccgcctggttgctggcaggcgtaaccggttccggcaagaccgaagtgtatctgagcgtgctggaaaacgtcctcgcccagggcaaacaggcgctggtgatggtgccggaaatcggcctgacgccgcaaacgatcgcccgttttcgcgaacgttttaacgcgccggtggaagtgctgcattccgggctaaacgacagcgagcgtctttcggcatggctgaaagcgaaaaacggcgaagcggcgattgtcatcggcacgcgctcctcgctgtttacgccgtttaaaaatcttggcgtgattgtcatcgacgaagagcacgacagctcttataaacagcaggaagggtggcgctaccacgcccgcgatttggcagtgtatcgcgcccatagcgagcagatcccgattattctcggctccgccaccccagccctggaaacgctatgtaacgtgcggcagaaaaaataccggatgctgcgtctgacgcggcgcgcaggcaacgcccgcccagctctgcagcatgcgctggatttaaaaggccagcgtcttcaggcgggactggcgcccgcccttatcgcccgtatgcgccaacatctccaggccgacaatcaggtaattttatttcttaaccgccggggattcgcgcccgcgctgctttgccacgactgcggctggattgcagagtgcccgcgttgcgatcactactacacgctgcaccaggcgcagcatcatttacgctgtcatcactgcgacagccagcgtccggtaccgcgtcagtgcccctcctgcggctccacacatatgttaccggttgggttagggacggaacagctggagcaggtgctggcgcccttcttccccggcgtgccgatctcacgaatcgaccgtgataccaccagtcgtaaaggcgcgctggagcagcatctggcggaagttcaccgcggcggagcacgcatcctgataggcacacaaatgctggcgaaaggccatcactttccggatgtcacgctggtggcgttgctggatgtcgatggcgcgcttttttccgcagattttcgttcggcggaacgcttcgcccagctctacactcaggtttccggccgcgccgggcgcgcgggcaaacagggcgaagtggtgctccaaacgcaccatcctgagcatcccctgctgcaaacgttactgtataaaggctatgatgcgtttgcggagcaggcgctggcggaacggcaaacgctccagcttccgccgtggaccagccacgtcattattcgcgcagaggatcataacaatcagcaggcgcccgtctttctccagcagttgcgtaatctgattcaggccagcccgctatcagacgataagctgtggatcttaggtccggttccggccctcgcgccaaaacgcggcggccgctatcgctggcaaattttacttcagcatccttcacggattcgcctgcaacacatcatcagcggcacgctggcgttgatcaatacgctcccggaagcgcggaaagttaaatgggttctggacgtcgatccgattgaaggatag

SEQ ID NO: 373742 - DNA, 1128 bp, Salmonella enterica
atgaaaaaaacagtcattgccagcatgattggactggagctttgtgcgacaagtacgttatctgtcgtgcacgcggctgccgaaaaacgcccgaacttagtttttattgtggcagatgatcttggctatggtgatttggcgacttacggtcaccagatagtgaaaaccccgaatattgaccgcctggcgaaagaaggggtcaaattcactgaatactatgcgccggctcctttgtgttctccttcccgcgccgggatgttaacaggccgtatgcccttccgcaccggtgtacgctcctggatccctgaaggtactaatgtttctattggacgtaacgaattgaccatagccaatctgctgaaacagcagggttacgataccgcgatgatgggtaaactgcatctcaacgccgggggcgatcgtaccgatcagccgcagccgaaagagttaggttttgattactctctggtgaacccggctggctttgtgaccgatgctacgctggataatgccaaagagcgcccgcgttacggcgtcgtccacccaaccggctggatgcgtaacggcaaacatattgatcgtgccgatagcatcagcggcgaatttgtcagttctgaagtggtgaactggctagataacaagaaagacgacaaaccgttcttcttatacgttgcctttacggaagttcacagcccgctggcctcgccgaaaaaatacctcgatatgtattcacaatacatgagcgaataccagaagcagcatcccgatctgttctacggcgactgggcggataaaccgtggcgcggtaccggtgaatattacgccaatatcagctatatggatgcgcaagtcggcaaagtactggataaaattaaagcgatgggggaagaagataataccattgtcatcttcaccagtgataacggcccggtgacgcgtgaagcgcgtaaagtctacgagctgaacctcgcaggcgagactgacggtctgcgcggacgtaaagataacctgtgggaaggcggtattcgcgttccggcaattatcaaatacggtaaacacattccacagggcgtcgttaccgatacgccggtgtatggtctggactggatgccgacgctggcaacatga

SEQ ID NO: 373743 - DNA, 2997 bp, Salmonella enterica
atgaccatttccattcacgccagcgcatttgacgtcaacagctggtatcaaaaaatcaccttaactttcatcaatgagagcggtaatgcggtcgatatgaaccatgccgcaatatcattcacggcttccgggcacatcgatccatggggaaatagcggcggtacgctcaaagggaacctgccgcttacgctgaatgagagttcgtatggcacgctggaaactaacaacatcatcattaataacagcgatgcattacttcttcagccgggcgaacgcgggacgctctctttcagcctcgcggcgacgcaggtgccggtaaaaatgtccgccatcaccttgacgctggcgtcatcgtcatccgaagacgcagagtctgaaaccccatccgatcaggagacgccagcgatacccgccgcagacgaacaacccgccgaacccgatgtgccggaaaaggacaatgaccttcaggaacacggccttacgcttaacgttagcgagttgaataccgcaagttggtatcaacgcgtcacctttacgctgaccaacctctacgcccaggcggtagatctcaatcagcttcaactgaattttacggccagcgcgcaccccgatccctacagtccgtttcagggaacaatgttggggaatcaggccgtgacgctggccagcgatgggggatggcccatcgagaagaataccatcaccattaatcatgacggcgcgctgatgctggcggcgggggataccgccgaattacagtgctatctggccgccacgcagatgccagttgccatcagcgatttgaacgcgacgttggcccatgatcctgcccgtcagggaaaagtttgcgttcattttcctgccatgacgcagaccgtggcgctcaaaccggtgattgagctgctgtttcctgccggcgaaacccggcgctttgtcggtgagtggggcgaggttctgacaataggcgatcttagcgcaggaacgtatcggcttaccgtaccggtactggtgaatgatgagatgcaaatcgcgccagtcgagtcctcttttaccgttacgctgcaatccggcgatgccgccgcgcaggtccaggtatcctgtctgccgattgtccgttatgccagcgcgcgtctgatgattgacgcccctgcgcttggtaatgcgaaattgaccgttgagatcgccgatgctacgcaagcggatgagcgtaccgtcacgctgatcgccaaccaaccgcagttaatcacccggctactggcggggcatcattatacggtcaatctacagcctgcgatgattaataaccgctttatagcggcacccatacagcttacgggttttatccctgctgcggcgcaggttgccgaggttgctgtcgcttaccaacagtcagcgctcgacacggcgagtttcgtgacggtggatgccactatactgggtctgcccgatggcgtcgcgccgcagcgttatctgttcagcagcggtaaatatcaatactcattaatgctggagagcggcagcgagcggcagacgttggcattacgctttgcgcccgggctgtatgatgttcagacggacgatattttcatcgacagcgtgccgtggcgttgtgaacaggccgggccgctacggttgttgcaaaaggtcaaccatgtggcgctggagtttctgcccggcgtgacgctacaggtaaaaggttggcctgattaccttgctcatggcggcgtgacggttaacgcgccagagacggtttctctttatcgcgatataccgtttagcgcgttgtttaaatacgatggttttgacggcggcggcgatccggttccggccgcggaggttgacgtgaacggggatggttttctggattacgcgacgttaccgatccataaaaccgttgcgctggtgcgccagatagaaaaagaagccgggcgtagcgtcatgccggtaatggtcatttataccgcgaatgccagcggcggtagcgcgctggcggatttacaggatgcgcaaaagctacgtaaccattttggtaactttattacccagtgtctggcggcgcagtcatacaaagatgagacgcatcctgtcccggccacctttgtgcttaacccggattttctcggggcgctacagcaaggaccgtatggctataccgtagtacggcaaaaaaacagtgtgccggtgaatgcccaactggcggcggcgatacaagcattaccggcgatggctggctttatcgtgccttcgttgccgacgtttagcgacgatctctacggctatattcaggcggtgaactatcttgttcgtcagtttgccccggatgtggcttttggctggcagacgaatgtctgggcgacaggaacggcggactgggtgctgcgcgataccgctgatccggtagctgaagggcaggcgatcgccgaatttattcatgaactgggcgtttatagcggagaatatgcgccggactttattgcgtttgataaatttgagcgtgactgtttcagtcctgatgcgcttgcccactatggctggaatgcgacatgctggcttaattacctggcgatggtcaaacaggtgacgaaagcgctgctgacgcccgccatgctgtggcaaatccctggcggccatatgcctacagtagaagagggcgtcagtaaaatcagcgctgcgcactttgcatccggcggaaccttttttatgggtgacgcccgcattggcagcgatcctgacacgctctctttgcagctactcaatacggccttaaatagcgcgacttacggcgtcccgaccgtcggcgactttttacgtaaagataaagggtatgactggggccaaatgcaggcgctgaacctaccggactttaacgtcttttcgatcttatggggcggtggttctactatcagtattacgacaatccattctaacggtgaagacggcggctggctggcggataaaatggtagagtattatgctgcccctcgctatttcagataa

SEQ ID NO: 373744 - DNA, 402 bp, Salmonella enterica
atggctacaagcaaactgattcaaggcgatacaattactgaaactactcatgcagcgaatggttttgaccctgcaacaagcgatgataaaataagctatacttccgctcgtgttgcgaaaccggtatacaataaatataaaaattccacgactaaaccgaaggtattcggttattacaccgactggtcacagtatgacagccgtctgcaaggcaatatgtcccaaccgggccgtggttatgatttaaccaaagtttcaccgacggcttatgacaaactgatttttggctttgttggcatcaccggtttcagaaaaattgatacagaagaccgcgatgtcgtagcagaagcggcagcgctgtgcggcaaagtgaaatatgagccgaccttcctcgacccatga

SEQ ID NO: 373745 - DNA, 948 bp, Salmonella enterica
atgggatcgaaaggtgccaacaagagctttgattataatttaatcaaaattcttgacgctgttattttgtcaggaaatgcggctatggcggcaaaaaagttaggcattacaccggctgccgtttctctggcgttaaagcgcctgcagagttattacccggaagaactgtttagcagagggaaaggcgggctcatccccacagctaaggctgtcgacattcaccaaaatttcagtcaggtgatgaaactggtggatgacacatttctctgtaatagcaaaaaagatgaagcgttccagataacgttattaggcagtgatattgttgaaagctattatctttctcagctctataacagcgatatatttgaccgtattttgataaatcatttcactgtcagaaatatgagtcgggagcatatcagcgaacttctgtttactgcgcaaggcgatctgttgattagtgccgaacctttgctggagtccggcatagagaatcaaatcattgatagttttaaatcatttgtttgtatctgcagcagtaaacacatgctgagtatcctctcacaactgtcgctacatcatttttattcttcgcgtcatgcgttatatcagccggggatgggggcttcagtgatatatcatgatagtgaattatttaaggatgagctttactatactggcaggcgtattgtcggctatcgcagtgattcgcttaacggtttgatgagcatgatcgaacgaacctcattgattgcattgatgcctttgaaattagcgcttttttataaaaatcatcgtaaatatgacattaaatttattcagcctccgcccgaactggctttgaagtcagttcaggtttatgcatcctggaataaaaatagtagaaatatatcgacgattaatgagatggtaagtatgttacaaacactttcctccttccgtcgctaa

SEQ ID NO: 373746 - DNA, 849 bp, Salmonella enterica
atgaaactcttcgctcagggcgccacgctcgatctcactcatccgcatgttatggggatcctgaacgtaacgccggattctttctccgacggcggcgcgcataacacgctgattgaggcagtgaaacatgcgaatttaatggtgaatgccggggcgacaattattgatgtggggggggaatcaacgcgaccaggcgcggcggaagtgagcgtggaagaagagctggatcgcgttattccggtactggaagcaatcgcgcaacgttttgaagtgtggatttctgtggatacctctaaacccgaggtgatccgtgaagcggcaagggcgggcgcgcatattatcaatgatgtccgttcgctctccgagcccggcgcgttggaagcggcagcggaaaccggcttgccggtcagtcttatgcacatgcagggcaaccccaaaaccatgcaggaggcgccgaaatatgacgatgtctttgccgaggtgaatcgctactttattgagcaaatagcacgttgtgagaaggccggcatcgcaaaagagaaattgttgctcgaccccggattcggtttcggtaaaaatctctctcacaattataccttactggcgcgactgggtgagtttcatcattttaacctgccgctgctggtgggcatgtcacgtaaaacgatggttggtcagttacttaacgtgggaccatcagaccgtctgaacggcagccttgcgtgcgcggtaattgccgcgatgcagggcgcgcagatcattcgcgtccatgacgtcaaagaaaccgtagaggcgatgcgggtggtagaagccactctgtctgcaaagggaaacaaacgctatgagtaa

SEQ ID NO: 373747 - DNA, 1389 bp, Salmonella enterica
atgtctggaggattagttacagctgcatacattgttgccgcgatcctgtttattttcagtcttgccgggctttcaaagcatgaaacgtcccgccaggggaataacttcggtattgccgggatggcgatcgcgttgctggcgaccattttcgggccggataccggcaacgtggcatggattctggtcgccatgattattggcggcgcgattggcatccgcatggcgaaaaaagttgagatgaccgagatgccggagctggtcgcgattctgcacagtttcgtgggcctggcggcggtactggttggctttaacagctatctgtaccatgacgccagtctggtgccggtgctggtgaatattcatctgaccgaagtcttcctcggtatctttattggcgcagtcactttcactggatcgatcgtagcgtttggtaaactgcgcggcaaaatctcttctaagccgttgatgttgcctaaccgtcacaaaatgaacctggcggcgctggttgtttctttcctgttgctgctggtttttgtccgcaccgaaagcgtgggtctacaggttctggcgctgctgctgatgaccattatcgcgctggcgtttggttggcatctggtcgcctctatcggcggggcggacatgccggtggttgtttcaatgctgaactcctattccggttgggctgccgcggcggctggcttcatgttgagcaacgatttgctgattgtgaccggcgcgctggtcggttcgtcaggcgcgatcctgtcttacattatgtgtaaagcgatgaaccgctctttcatcagcgttattgctggtgggttcggtactgacggctcctcaacgggcgacgatcaggaagctggcgaacatcgcgaaatcacggcggaagagaccgctgagatgctgaaaaactcccactccgtcattattacgccggggtacgggatggcggtggcgcaggcgcagtatccggttgcggaaatcaccgaaaaactgcgtgcgcgcggtatcaacgtgcgtttcggcattcatccggtggcgggtcgcctgccggggcatatgaacgtgctgttggcagaggcgaaagtgccttatgacatcgtgctggaaatggacgaaatcaatgatgatttcgccgataccgataccgtgctggtgattggcgcgaacgatacggtgaacccggcggcgcaagacgatccccgcagcccgatcgccggtatgccggttctcgaagtgtggaaagcacagaatgtcgtggtctttaagcgttcaatgaatactggttatgctggtgtgcagaacccgctgttctttaaagagaatacgcaaatgctgtttggcgatgccaaagccagcgtggatgcaattctgaaagcgctttaa

SEQ ID NO: 373748 - DNA, 468 bp, Salmonella enterica
atggcaaaaccgatcatcacgctcaatggtctaaaaatcgtcattatgctgggaatgctggtagttattctgagcggtatccgcttcgccgcagatatcattgttccctttattttggcgttatttattgcagtcgttctcaatcccgttgtgcaacggatgacccgatgccgaattccgcgcgttatcgcagtatcattgctcattgtgattattgttatgttaatggtactgctactggcctatttgggaacatcattaaatgaactggctcgtaccctaccgcagtatcgctcctcattggtgataccgttgcaacgtattgaaccgtggttacagcgagcaggcattggcgtgtcggttgatgagctggcgaaatatatcgatccaaacgccgccatgactctggtaacaacctgctcacccaactgtccaatgccatgtcgtccatctttttattgttattga

SEQ ID NO: 373749 - DNA, 1254 bp, Salmonella enterica
gtgagtcgtacaactattctcgatgacgccacggcgagcgatatcgatgaacaatgccattctcagccggttcaatttattaaacgcggtacagcgcctttcatgcgcgtcacgctggcccttttttccgcgggcctggcgactttcgcgctcctttattgcgttcagcctatactaccggtactttcccaggagtttggcgtctcccccgccagcagcagcgtttcactttctatttctaccgccatgctggctatcggcttactttttaccggcccgctttctgatgcgataggccgtaaaccggtgatggtcaccgccttgttattagcctcctgctgcacattgttatcaaccatgatgaccagctggcatggtattctgattatgcgtgcgctgatcggtctgtcgttaagcggcgtcgccgcggtgggaatgacctacctgagtgaagaaatccatcccagctttgtcgctttctccatggggctctatattagcggtaattccatcggcgggatgagcgggcgtttattaagcggcgtcatgaccgacttttttaactggcgcatcgcgctggcggccatcggatgctttgcgctggcgtccgcgctgatgttctggaagattttacccgcctcgcaacattttcgtcccacgtcactacggcctaaaacgctatttattaatttccgtctccactggcgcgatcgggggttgcctctgctgtttgcggaaggttttttactgatgggcgcgttcgtcaccctatttaactacattggctatcgcctgatgctctccccctgggaattaagccaggccgtggtcggactgttatccgtagcctatctcaccggcacatggagttcgccgaaagctggcgcaatgacctcacgctatggccgggggccagtgatgctgttctctaccgcagtaatgctgggtgggcttttactgacgctttttacctcgctttggctgatttttgccgggatgctgcttttttccgccggctttttcgccgcgcactccgtggccagtagttggattggcccgcgtgcgcgccgggcgaagggacaggcctcgtcactttatcttttcagctattatctggggtccagtatcgccgggacgctaggcggcgtattctggcatagttacggctggaacggcgtaggtggttttatcgcgctaatgctggtgctggccatcctggtcgggacgcggttacatcatcgtcttcacgcctga

SEQ ID NO: 373750 - DNA, 774 bp, Salmonella enterica
atgtttcgtcgcctgctgatcgctacgctcatcggtattctcgcggcgctggctgtcgccgccttccgtcatgcgatgcaattgctggagtggattttcctgagtaatgacaccggcagtctggtgaatgcggctgaggggctttcgccctggcgacggctgattacgccagcgcttggcggcctggccgctggtctgttactatgggggtggcaaaaaatgaaccaacagcgcccccatgcgcccactgactatatggaagcattgcaaaccgacgggcaatttgacgttggcgccagtctggtgaaatcgctggcctcgctgctggtcgtggtcagcggcagcgcaattggtcgcgaaggcgcaatgatcctcctcgccgcgctggcggcatccagctttgcccgacgcttcacgccgcgtgaggaatggaaattatggatcgccagcggcgccgctgcgggcatggcgggcgcttaccatgcgccgctggcgggcagcctgtttatcgcggaaatcctgttcggtaccttaatgctggcttccctcggcccggttgtcgtttccgccgtcgtcgccctgctaaccacccatgtattaaacggtagcgattcactactctataccgtgcatctgaccgttgatctccacgcgcgggagtacgtcatgatagtcagtaccggcctggtcgccggtctgtgcggcccattgctgatgtggctgatgacggccagccataatagtttcttacgtttaaaactgtccccgccctag

SEQ ID NO: 373751 - DNA, 903 bp, Salmonella enterica
atgagattcaaaaaacacctgttgggatggcttgccgcaacgctgttgttcagtagccagacgcaggccgcgccgctggttctcgccaccaaaagctttaccgagcagcatattctttccgctatgaccgttcagtatttgcagaagaaaggctttcaggttcagccgcaaaccaatatcgccgcggtgatttcacgtaatgcgatggtgaataaacaaattgatattacctgggaatacaccggtacatcgctgattattttcaaccgtatcgataagcgcatgagtccacaggaaacctacgacacggtaaaacgcctggatgcgaagctgggcctggtatggctcaaaccggctgacatgaacaatacttacgcgttcgcgatgcagcgcaaacgcgccgagtcggaaaatatcaccaccatctcgcaaatggtggcaaaaatcgaacaggtccggcagaacgatcctgaccacaactggatgctcggtctcgatctggaatttgccgggcgcagcgatgggatgaagccccttcagcaagcctaccaaatgcagcttgatcgcccgcaaatacgacagatggacccagggctggtctataacgccgttcgggatggactggttgacgccgggctggtctataccaccgacggacgggtgaaagggtttgatctgaaagtgctggaagatgataaaggcttctttccaagttacgctgtcacgcccgtggtgcgtaaagaggtgctggaggccaatcctggccttgatgacgccttaaacaccctttccggcctgctcaataacgatgtgatatcgaccctaaacgcccaggtcgatatcgagcatcgcacgccgcaacaggtagcccatcaatttttgcaggacaaaggtctgctgtaa

SEQ ID NO: 373752 - DNA, 711 bp, Salmonella enterica
atgcacaccctcaccctaaaacgtgtacttgggttcactatcgtcattttgctgttactggcgctgtttatctggggaatcggtctggagacgctgaaagcgcgtcaggtcgatctgctgtatctcgggcaacggcatttgatgctggtctttacgtccatgttttttgctttactggtcggtatcccgagcgggattttactcagccgacctgcggcaaaaggatttgctgaatatgtcatgcaaatctttaatgttggtaataccttgccgccgctggccgttctggccttagcgatggtgattatcgggatcggcgatacgcccgccattgtcgcgctatttctggcttctcttctgcctatcgtccgcaatacctatgcgggcctctgttccgttcccgcctcactgattgaagcggcgaacgggattgggatgacaaaatggcagcggcttcgccaggtagagctacctaatgcgtggccagtgatgctgtccggtattcgcatcgcgaccgccatcaatgtcggcaccgcgccgctggcctttctgattggcgccagcagctacggcgagctgattttcccgggaatttatctcaacgattttccgacgttgatcctcggcgcaacggccacggcgttattcgcgctgattcttgacactctgcttgcctggtttgggcgacgccttagccctcataccgtctga

SEQ ID NO: 373753 - DNA, 984 bp, Salmonella enterica
atgttattgaaaaatattgtcataggtgcattaatggctattcctgcgctggcgtcagctaatagcctcacggaaacacgggaaagaatggccattgagcaacaagctatcgcctatactgtcagccaaaagtgggacaagctggacgctatgtttcaggaatacaataccggattcccgacaaccagcggcggaactcataaactggttatcgcatggggagggatctataatcttttttcagtagatgtttccgacaatggtatttctggcgtggcaaaagagtggcttaaagcaaaccccaaatccacgggtgcaaggctgctgcaagcaatggtttttgatgctaaagccgtgaatttacgcggtgaaggtgcggccagcacggtggactctgatatatggccgaaatataagaagctgatgattcaggaaaaagagtatctgttaaagaacaaagatattgccgacaaagatgtgacctggtatcaggaaatggaaatggtcgcacgcaatcttgaggataaagagctgctctatagcactttggaagaagccagcaaaaaatatcccgcctatcaaaatatttatatcgaggccatggtcgctcgtttgcctaaatggggtggttctccggaagaagtcgaaaaaatcgccagagtggccgcagaaaaaaacaaagatcaatcgggactttcttactacgcttatatctggagtaatgcaatccattaccaacctgaattaatggctttactgaataaacgtcagattgtctcctgggacgatatgctgcaaggttggagagatcgctacaaacagttcccatcaacccgcacgcttaataatattctgataacttcctgcattgcccgcgataaagactcctttgtgaaagcagataaaatgattcaaggggaaacggagcgggatacctggccacaagggttaaattatcgggagtgccagcagtccttccaataa

SEQ ID NO: 373754 - DNA, 510 bp, Salmonella enterica
atgtttttacctctttccagaggtgaaagtgaaagggaagatagacgaacgcagggaataagtggactgtcctttccatattatataattgtttgtatcgccatatatttttttgagtctatgttattgtctggttgtgtttctcttcatgcttattgcttattgcttattgcttattgcttattgcttattgcttattgcttattgcttattgcttattgcttattgcttattgcttttgtttttaataggcatgtgaggtgtgatctggcaagagtggttggcgcaaatatttggctgactctgcgttatattaagcgccagggggaacaggaggcgaaagtgcaaaaggttaggttgcaatgcaaaaaatatcgagtttgtactgttcatcaatcgctgattattattcttgtaaagggtaaggaagtgattaacaacggtaccgtttatctcgttcatggtccagaggttgaaggacattttccattaaaccacctctgcatataa

SEQ ID NO: 373755 - DNA, 201 bp, Salmonella enterica
atgctgaaactcaacgcgaccacaaccgccctggtggttattgatttacaggaaggaattcttccgtttgccggcggcccgtatacggcaaatgaggtggtcgcccgcgccgcgcggctggcggaaaagtgtcgtgccaacggctcgcccgtggttatatggtacgcgttggatggtctgatgattatgccgaagcgttaa

SEQ ID NO: 373756 - DNA, 852 bp, Salmonella enterica
atgaaaaaacgttgccgtcaacctgaaaccctgcgtgaacgctgccgtcatatttttggcgatgagccgccggttcttaacgtatgggaagcggagtttgactatgccgatgctgagttgcaggcgctggcggcgacggactggcggcagattaccgattggcatctgagcgtttattatgtgctgaatctggtttaccacgagccgatgcagccggaattgtttcgttatctgtttccgctgtgccttgcctgttggcgcgaaacgctgttaacccatggctatggcgatcacttcgaggagtctttcctgcgcgcgttacggcggccttatctctggcgggaaatgatggatgccgctcagcgccagcaggtacggcattttttgctggagaccatgctggcgcgaatcaatcacgagcgcggtttcaattctccgctgacctggctggacaccttcaatgttctcggtggcattgcgccgtttatccgttcgctctggaatcagtggtggttactggatacgccgggtaaagcggtatgcgcgttgcagtacgccgcgcatttaatttatccggtagaggttaacccgctttggccagaaggctcgtggcagtggcaaccgccattaggtgcgacggaagaaccgtggttggaaaataatctggcgtttttaacccggcagttaacgccggagatgatcctcgacggggtgcagaaggcggcggcaatgctgcgggacgagccggagagtgcgatggcaacgcgtatctcgcgcgatgccctggcagcccaggacgttatcgctatccagattgaggatcttctgtcggctctgtcgcgcggtgaatag

SEQ ID NO: 373757 - DNA, 546 bp, Salmonella enterica
atgctctctaccgtactgatgatgcctctggtgaaactgattggcggcgagaataaggcgctgggcttccaggggggtatcgcggcgctctcggtggtggcgttcctgatgctggcgttctgtttctttaccaccaaagagcgcgttgaagcgcctgccacccatacctccatgcgtgaagacctgcgtgatatctggcacaacgaccagtggcgcatagtcggcctgctcaccatcctgaatattctggcggtatgcgtgcgcggcggggcgatgatgtattacgtcacctggatattgggcaaaccgggcgtgtttgtcgccttcctcaccacctattgcgtcggcaacctgattggctcggcgctggcaaaaccgttgaccgactggaaatgcaaactggtggaccaacgctttactcgcagtaatcagtgtggcgatgttcttcgtaccgatgcacgccacgatcgctatgttcgtctttatcttcgtgattggcgtattgcaccagttagtcacgcctatccagtgggtgatgatgtctga

SEQ ID NO: 373758 - DNA, 195 bp, Salmonella enterica
gtgaacgcatctgaattggggctgaatgcgcaggacgtcgaagcgcagttgcgcggcggcgagatagcgatttacgcccgcaaatatcagcttcatcagggggtttttagcctcgatccacgcacggtagctgaaggggaaatggcattgattgtggcgcgactcagggagattgcagaacatgcagcagattaa

SEQ ID NO: 373759 - DNA, 780 bp, Salmonella enterica
atggatattaatgagtttccaccgggagtaattgaacaccttggctggtatgtgtatcgattaattgatccaagggacggaagtaccttctacgtggggaagggaaaaggcaatcgtgtatttgctcatatgcgcggtgaggtcgcagcagtggatgatgatgagttacttagtaacaagctcaagcaacttcgagagataagattagctggtcttgaggtcattcatgttattcaccgacacggtatagctgatgaaaagaccgcttacgaggttgaagccgcccttatagacgcctaccccggtttaactaatatcatgaacggtgctggcagtaatgaatatggtgctgcacacatcaaagagttaatcgccacataccaacctgaaacaattgtattccaacataaagccctgatgatctctgttaacagaagttcaaaagatgtggacctttatgatgccgtacgttttagctggcgggtcagcgttgagcgtgcccgtaaggctgaagttatattggctacagtgaagggaatcgtaaggggtgtatatgtcgctgatgagtggctcaaatctacccgtgagaatttcccagagatatcctcatgggatgaagacgaggagtttgaagctactcaaaattcccgctttggatttcgaggaaaagtagcgccacctgcgatagcacagctttatctcggtaaaaagattccagaggatcttagaaagaaaggtgcgatgtctcctgtgagatattctcctggtttcgatttctaa

SEQ ID NO: 373760 - DNA, 324 bp, Salmonella enterica
gtgcaattcccgtcaaacggcgcaggaagttgtagaggcttcctgcacccattatcgtatgaatcgtctccacccggaaaacaatcccgtctgagactgttattaaatttgtttaattacccgttgttgaagtgctcatttcaacaacgggacaggcaaattatagatgaaaagaaactcaaagctcttgcggcggaactgactaaagggatgaccccgcgcgaaattgtcgctacgttcgaaaaaatggagtatgccgatccaaaactggcggtgagtcgttttattctcaagttaggtgaccacctgagcgatcacctttaa

SEQ ID NO: 373761 - DNA, 939 bp, Salmonella enterica
atgcctgattaccacgcagcgcttgtcattgacattggcacaactaactgcaaagtcagctgttattcctgtcatgacgtgtcagttctggaagtccgcaagtttccgacgccaacaatatcgtcggacaaaggcgaggtagatttcgatatcgaagcgctgtggcaggcactgcgactggtaatggctgaactggtggcttcagtaccgtttccggtaaaaaatatcagtattgcgagtttcggtgagtctggcgtctttgtggataaggagggcgtcattcttaccccgatgctggcctggtatgatcgacgtggtgaatcttatctctcgtcattaagcaaggcagaggctgaagaactgtattctataacgggattgccacctcacagtaattactcagcatttaaaatgagatggttgcttgataactactccttgcatgaaagaaaagatatctgctggttacatgcaccagaagtgttgttgtggcgaatgacaggtgcgaaaaagacggaaatatccctggccagtagaacgttgtgtctggacattgctcgccgtacctggtctcgtaatgctgctgggattctcggcataccgttcggtgtactggctccgttgataaagccaggtgaagtggccggatgggtgacggcaacactcaggcaggagttgggattaccacatgaggtaaaagtcaccctggccggacacgatcatatggtcggtgcccgcgcattacagatgcaaccgggcgatgtgctgaattctaccggcacgacagagggtattttactgctgaatacacagccaacgcttgatgtgcaggctcgcaggaataagctggcaaatggttgttactccgatggtgaatttttcacgcttttcgcttctctgcctgtctgcctgtcggcggttatgcgcttgaatgggtga

SEQ ID NO: 373762 - DNA, 1359 bp, Salmonella enterica
atgaatgatatagcacatactctctataccgttgtgcaatatgtcctggggtttggcccaacggttttattgccgctggtcctttttttcctggcattgttcttcaaagtaaaacccgctaaagcacttcgctcatcgttaattgtcggaatagggtttgtcggaatttatgccatctttgacatacttaccagcaacgtaggcccggctgcacaggcaatggttgagcgaactggtattagccttcctgttgtcgatttaggctggccaccattggccgcaattacctggggctcaccaatcgcaccctttgtcattccgctgacgatgctgattaatgtcgccatgctggccctgaataagacacgtactgttgatgtcgacatgtggaactactggcactttgccctggctggaacgctggtttactacagcacagggagttttgttttgggtctgtccgcagccgctattgccgcgatcgtggttctcaaactggcggactggtcagcgccattagtggcaaagtacttcggtctggaaggtatttcacttccgaccctgtcatctgtcgtcttctttccaattggattgctgttcgacaaaattatcgacaagatcccgggtgttaaccgtattcatattgatccggaaaacgttcagaaaaaaatgggaatcttcggcgagcctatgatggtgggtactattctgggggtcttgttgggcatcatttccgggtatgactttaaatatatcctgttgctggggatcagcattggcggtgtcatgttcattcttccgcgtatggtacgaattttgatggaaggtttattacctctgtctgaagccattaagaaatatttgaatgccaaatatcctggccgtgatgatctctttatcggactggatatcgcggtagcagtaggtaacccagccattatatctacagcactgattctgacacccatctctgtctttattgcattccttcttcctggcaataaagtcctgccactcggagaccttgcgaacctggcagtcatggcttccatgattgtactggcatgtcgtggcaatattttccgggctgtgataaccgcaattcctgttattgtcgccgacttgtggattgcgaccaaaattgcgccatttattaccggtatggctaaggatgtcaatttcaaaatggctgaggggtcaagtggtcaggtatcaagcttccttgatggcggtaaccccttccgtttctggctgcttgaaatattcaacggaaatattattgctatcgggctgattcctgtgcttgcgctggttatttatggtgtttttcgcctgacaaaaggaacggtttatgcctga

SEQ ID NO: 373763 - DNA, 744 bp, Salmonella enterica
atgaaaacattgagtaaaagttcacacatcccactgtatcaacagattgtggagtggataagggaaagtatttatagcggagaattggttgaggatgaccggataccttcagagtttcaaatcatggatatgctggaggtgagtcgcggtaccgttaaaaaagcggttgaccaacttgtccgggaaggtgttcttgtgcaagtgcagggtaaaggaactttcgtaaagaaggaaaatgttgcttacccactgggtgaaggtttgctctcctttgctgaagccttagccagccagaagataaacttcacaaccagtgttataacctcccgactggagcccgctaaccgctttgtagcagagaaactgagtatcaaaccgggacaagatgttttatttcttaaacgccttcgttgtattggcgatgaaaaagtcatgttgattgaaaatcgtatcaacattgatctctgccccggtattattgatgtagattttaccagggagaatttattttcagcaatagaaagattatctgataagaaaataagtttttctgaaagccgttacgcagctaaattaattggtaatgagcgaggccattatcttgatattggtgaagacgcacctgttttgcatttggaacagttggtatttttctctagaggattggccattgattttggtaacgtctggttaaaaggtaataaatattatcttggcactattttacagcgcctggatgcctaa

SEQ ID NO: 373764 - DNA, 975 bp, Salmonella enterica
atggattatcgcaagatcatcaaagagatcgggcgaggtaaaaatcacgcccgcgatctggatctggataccgcgcacggtttgtatacccgaatgctgaatggcgaggtccccgacctggaaatgggcagtatattgatggcgctgcgtattaaaggcgaaggcgaagccgaaatgctgggcttttatgaggccatgcagaatcataccatcaaactgacaccgcccgcagataggccgttgccggtcgttattcccagctataacggcgcgcgtaaacaggcgaatttaacgccgctgctggctatcctgctgcataaattgggcttcccagtcgtagtacacggcgtcagtgaagatccgacccgcgtactgacggaaactatatttgagctgatggggattatccccaccctacacggtggacaagcgcaggccaaactggacgggcgccagccggtgtttatcccggtgagcgcgctctgcccgccgctggaaaaacagctggcgatgcgctggcggatgggcgtgcgtaacagcgcgcattcactggccaagctggcgacgccatttgctgaggatgccgcgctgcgtttatcaagcgtttctcatcctgaatatgttccgcgtgtggcgaccttttttagccgcattggcgggcgggctttgctgatgcatggtaccgaaggcgaagtctatgccaacccgcaacgctgtccgcaaatcagcctgattgatagccgtggcgtgcaggtactgcatgagcgtcagagcgacacgcacgacgagccgctttcactgcctgcgactaaagatcctgaaatcaccgcgcgctggattgagcgctgccttgccggccacgagccggtgccgcaatcattaaaaacgcaaatggcctgttgtctggttgcgacgggagaggcggcgacgttagaagacgggcttgcgcgcgtcgaacaggcttttagcgaataa

SEQ ID NO: 373765 - DNA, 1488 bp, Salmonella enterica
gtggtggcgaatcacgcgctggtaatggcggcgatggaaagtgaagccgtactgccggaaccaaagcatctgctgttggtactggatgaaggtcatcatctgcccgatgtcgctcgcgatgcgctggagatgagcgcggaaattaccgcctcctggtatcgcttgcaactggatctgttcagcaaactggtggcgaccagcatggagcaatttcgccctaagaccacgccgccgttagcgaatcctgagcgacttaacgcccattgcgaggaggtatacgaactgatcgcctcgctcaatgccattcttaatctgtatatgcccgcagcgcaggaggcggagcaccgttttgcaatgggtgagttgcctgatgaggtcatggaaatctgccagcgactggcgaagctgaccgagacgctgcgtgggctggcggaatcctttctcaacgatctcagcgaaaaaaccgggtcgcacgatattgtgcgtttgcatcgggtgattttacagatgaactgggcgctgggaatgttcgaggcgcaaagtaaattatggcggctggcttcgatggcgcagtcttcaggcgcgccggtgtccaaatgggcgacgcgtgaaatacgcgaagggcaactccacgtctggttccattgtgtcggtatccgcgtcagcgatcagctggaaagattgttatggcgcagcgtaccgcacattattgtcacctcggcgacactgcgctcgctcaatagcttttcgcgcctgcaggaaatgagcggcttaaaagaaaaagccggcgaccgctttgtggcgctggattcgccgtttaatcatgtggaacaggggaaactggtgattcctcaaatgcgctacgaacccaccattgataacgaagagcagcatattgccgaaatggcagcctattttcgtgagcaactggagagcaaaaaacatcatggtatgctggtactgttcgccagcgggcgggcgatgcagcgttttctggagcatgtcgctgatgtgcgcttactcctcctggtccagggcgaccagccgcgttaccggctggtagagctgcaccgtaaacgggtggagagcggcgaacgcagcgtgctggttgggcttcagtcttttgccgaagggctggatcttaaaggcgagctgctgacgcaggtccatatccataaaattgccttcccgccgatcgacagcccggtcgtgatcaccgaaggcgaatggctaaaaagtctgaatcgttatccgtttgaggtacaaagtttaccaagcgcgtcttttaatttaattcagcaggtagggcgattgatccgtagccacgcctgtcggggagaagtggtcatttatgataagcgtttgttgaccaaaaactacggacagcgtttactgaatgccttacctgtttttccgatagagcagcctgccgtgccagacgttatagtaaaaccaaaagcaaaacctgcacgccgccgacggcgttaa

SEQ ID NO: 373766 - DNA, 498 bp, Salmonella enterica
atggcggtagcaggttgtcacgtaatggccaaacccggcggcgcgatctgcaatattgattgcacatattgcttctatcttgaaaaagaggcgctgtacccggaacgcaataaaaactggcgaatgtcggacgagacgctggaacagtttatacgccagcatattgccgcgcagagtggcgaccgcattgactttgcctggcagggcggcgaaccgaccatgatggggctaccgtttttccgccgggttgtcgcattatgtgaaaagtacggcgatgggcgaaaaatcactcatgcgttgcagacgaacggcatcctggtgaatgacgagtggcgcgctttttcgctgaacagcattttctcatcggtctctctatcgacggcccggcgtcgttacacaaccactatcggcttaatcgcgctggaaaaggaactcatgaacaggtcgtcgcagcaatggcgcggcttaaagcgcaccatgtcgactttaataccttaa

SEQ ID NO: 373767 - DNA, 522 bp, Salmonella enterica
atgactaaaaaaattgttgctgtgacggcctgtccgacgggcgtcgcccatacctttatggcggcagaagcgttggaaattgaagcccgcaagcgtggtgactggatcaaggttgaaacccgcggttccgtcggggcgaagaacacgctgaccgcggaagagatagcgcaggcggatgtggtgattatcgcggcggatattgagctggatctgtcaggctttgttggcaaaagactctatcgcaccagtaccggcgcggcgctaaaaaagagtgcgcaggaaatggataatgctttcaatagcgccgaggtctatcaggggagtgccgggcgctcttcttcagctggtaaaacagagctacccggcgtttataagcatttaatgaccggcgtatcccatatgcttcctttggtggtggcgggaggattgtgtatcgcgccttcggtatccaggccttcaacgagccgggcacgctggcggctgcgctatttcaaattggtggtaaggcggcctttgtgctga

SEQ ID NO: 373768 - DNA, 294 bp, Salmonella enterica
ttgacgactccgctcacgatcgtctcattttatctgacgcatcaggtttatcgcggtttaaaacgcggccatatcctgatggcgctcagcgatcagatggcctggcagggagaattagcgataacgcagtcgattaaggtcttacaggggcaaccggtgcctgaaaatatcagcccgccggtgcttattttgacgcataacaacgccgacagcgcgcgcgttcgtcgttcgctatcgcctccgggatttcggcccgtctatttgtatcaatacacctccgaggctaaaaagtag

SEQ ID NO: 373769 - DNA, 798 bp, Salmonella enterica; identical to SEQ ID NO: 368571

SEQ ID NO: 373770 - DNA, 1245 bp, Salmonella enterica
atggcgtcgcctttatcattgttaattggcttgcgtttcagccgtggacggcggcgcggcggtatggtttcgctcatttccgtcatttctaccatcggtatcgcgctgggcgtggcggtattgattgtcggtttaagcgcgatgaacggtttcgaacgcgagttaaataaccgtattctggcggtggttccgcacggggagattgaagcggtcaatcagccgtggaccaactggcgtgaagcgctggcaaaagtgcagaaggtgccgggcattgccgccgccgcgccgtatatcaattttaccggcctggtagagagcggagcgaatttgcgcgccattcaggttaaaggcgtcgaccctaagcaagagcagcagcttagcgcgttaccgtcatttgtgcaaaatcacgcctgggatcatttcaaagcgggcgagcagcagatcattatcggtaaaggcgtcgccgatgcgctgaacgtgaaacagggcgactgggtgtccatcatgatccccaatgcgaatgccgaccataagctgctccagcccaaacgcgtgcgtttgcatgtcatcgggattctgcaactgagcggccagctcgatcacagcttcgccatgatcccgcttgaggatgcgcagcagtatctggatatggggtccagcgtttccggtatcgcgcttaaagtccacgacgtgtttaatgcgaacaaactggtgcgtgacgcgggtgaggtgactaacagctatgtctacattaagagctggatcggcacctacggctatatgtatcgcgatatccagatgattcgcgccattatgtatctggcgatgattctggtgatcggcgtggcctgttttaatatcgtttccaccttagtgatggcggtaaaagacaaaagcggcgacattgcggtattaagaacgctgggggcgaaagatggtttgattcgtgccattttcgtctggtacgggctactggcgggtttgctgggcagcttgattggtgtggcgatcggcgttgtcgtttcacttcagcttaccgccattattaatgggattgaaaaggcgatcgggcatcagtttttgtccggcgatatctattttatcgacttcctgccatccgaattacattggctggacgttgtttacgtactggtcacggcgttgttgttaagcttactggcgagctggtatccggcgcggcgggcgagcaacattgaccctgcgcgagtattgagcggccagtaa

SEQ ID NO: 373771 - DNA, 171 bp, Salmonella enterica
atgccgcatatgaccggatcggatgagaatagtcatttaaatggcctttttttccccgctcgtctggcaatttgttgtaaaattcgcggcttcaagcggcagcttgcttcttcctggctgctgataaccgcgagacgttttggagagagtttggagaagagaaaaaattga

SEQ ID NO: 373772 - DNA, 654 bp, Salmonella enterica
atgttttgtaatgagcatgtcaatactaccctattgtttgccgccatgaaagacactcattattgcgctataatgcggcaattaataagttctgaaaacaccatgcaaaaaacttcttttagaaatcactacgttaagcgattcagctcacgacaagcatctaaatcacggaaagaaaaccagccaaaacgcgtggttttgttcaataaaccttacgatgtgttgccgcagttcacggatgaagcaggtcgccgcacgttaaaagattttattcctgtgcaaggcgtttatgccgcaggccgcctggactgcgacagcgaagggcttttggtgctgactaatgacggcgtgctgcaggcgcttcgtactggcgtcacgctcaacgatggccctaccctgcccgccggtattgagattgtcgcggagcctgactggctgtggccgcgcaccccgccgattcgcgaacggaagaatattcccaccagttggctaaaagtcaccttatatgaaggccgcaaccgccaggtaagacgcatgacagcgcatgtcggtcatcccactctacgattaattcgttacagcatgggcgactacacgctcaacggcctcgataatggacagtggcgcgagatcgcacaggagaaagacagatga

SEQ ID NO: 373773 - DNA, 1128 bp, Salmonella enterica
atggctgccagaccacgtaaaaacaatgtcaaggtgccaaacctttacccattatacagtcgcaaagttaataaaatttactggcgatacaaacatcccgttactgggaaatttcatagcctcggaacaaatgaggaagaggctattgcaatagcaagtgaggcaaatgcccgtctggctgaacagcgtacgcgccagatattagcaatcagtgacaggatcgccagcagtaaaggaaaggctattaccacatcaacgtggcttgatcgatactggaaaatccaaggcgaaagactggaaagcggagatataaaaccaaatacctataaacaaaaagccaagcccgttaccctacttcgggaaagggttggtatgaagattatttcgtcagtagatgttcgtgatattgctgagattcttgaggagtatatttcagatggacagccgcgaatggcgcaagtgattcgttctgtattgatcgacgtttttaaagaggcacagcatttcggggaggttccaccgggctataaccctgccctggcaacaaaacagccacggcgccgtatcacgcgccagcgtctaaatctggaggagtggcagcgaattttcaatatcgccgacgcaaaccaccagtacatggggaatgctatgctgctcgcgctcgtcaccggccagcgtctgggggacatttcgaagatgaagttcagtgatatatgggatgatcaactgcatattgttcaggaaaaaactggaagcaagatagccattccactttcacttcgcttgaatgccattaactggagtctgcgggatgttgtgacacgttgccgtgattatgctgtaagtccatatcttgttcacttcttccggactacgtcgcaagcagagcgtggggcgcaagtaaagtcccacaccattaccatgaatttcagcaaagctcgggataaagcagatattgactggggatccggcactccagctaccttccatgaacagcgctcacttgctgagcgactttacgaggctcaggggattaatactcaaaagctgctcggacataaatcgccaaatcagacagcccgttatcatgacgatcggggtaaaggatggactattattgcggtctga

SEQ ID NO: 373774 - DNA, 246 bp, Salmonella enterica
atgcttcagatgatgacgttagaagaatgggccgcagagaaataccggagtaatccaccgagcattaatacattacgacggtatgccaaacaaagcatgttcactcccccagcccagaaagaaggaaaattctggcgtgtgcgagaagatgcggaaataaccggaaatataactcaaccagtgattaaaaaatcagatccgccactgcttcagaggatattatccgatggctgccagaccacgtaa

SEQ ID NO: 373775 - DNA, 828 bp, Salmonella enterica
atgtctcagttagacagcggcacttttcagcaggtaaaagacctggttctttctggctatcacctgaacgatattcaggggctggcttgcccgacagcattattgcctgccgggacaggtgttgaaagcctcgaacgctttgctctggagcgtttccgcttccgcggcgccatgactaccaccagcattgaagactttgtccgttattcaaagggctatgccagtgcaaccgaaaaagcacgctgctttattgatgctgaccatatgacagctcgctcagttttcaatattggtacgcttgataaccccggtcatgcagacaacgttgcttctatcacgctgaaacagactgcaccattccgcgccctgctccagatcaacggggaacgcctgaaacaaaaacagatcgccgaatggcttgaagactggagcgattatctcctggcgttcgattctgacggtaacacaatgcagatttcacaggctgcccaggctgttcgccgcattacgatccaacaggcaacccagcaggatcatgaagatggcgatttcagcggtaagaaatcccttatgcaaagcattgaggccagcagcaaagacgttatgccggtggcttttgagttcaaatgtgttccgtatgagggtctcggtgaacgtgcgttcagcctccgcaacagcctgctgaccggtgatgaacctcgctttgttctgcgtatcgtacaactggaagcgcaggaagaagcgatcgccagtgaattccgcgacctgcttatcagcaaattcgacggtgaatcagtagaaacgttcatcggtaactttaaagcgtaa

SEQ ID NO: 373776 - DNA, 357 bp, Salmonella enterica
atgaccgtagtgcccgactttctgggcgaactggatgccggcgtgttcatgaacaaaatcgcggcagcgctgaatactgtcggattaggcgttctgaataacggcaataaaggcaaggtagtgctcacctttgattttgagcgcatgggaaattcagtcgaagagaagcgcgtcaaaattaaacacaagctgcagtacagcactccgacgccacgcggtaaagcgtcagaagaggacacaacagaaaccccaatgtgggttaacaagggcggaaagctcaccatactgcaggaagatcagggtcaactgttcagtattaaaggcactactgacggaaagcttaaagcggctcagtga

SEQ ID NO: 373777 - DNA, 198 bp, Salmonella enterica
atgcttgatgaacatcttattactgtgggtgagttgcttgaccgtctaaagcactacccgcgcgacactaaaatttcattcagtgggttagatttctatcgccttaaacaacgaggggaaaatctaatccaggtagaattcaaccagcttgtttatcgcaactccgaaggtcacgtggtggttgaaaaccttgaataa

SEQ ID NO: 373778 - DNA, 309 bp, Salmonella enterica
atgactggtaaacgtaatgcgccaactataacgcacgatgaaatggccgctaaatggatggaagacccagcgttcaaagctgaatatgacgccattgctgatgagttcgcgttgcttgacgaaatgctggccgcacgtaaagaagcaggtctcacccaggctgaagttgctgaacggatgggaacaaaagccactgctataaccagaatggaaagcaaccttgctgctggcgtcagcggaccatcttttactacgctgaaaaagttcgcacaggcaaccgggaaaaaactccagatccgcttcgtgtaa

SEQ ID NO: 373779 - DNA, 753 bp, Salmonella enterica
gtgacgcttgatgaagtagtcggcaacagccagggaggaagtaacggcttggccgttaataattctaatttcaggttgagcgagggttgtgacagtagccatagtggcagcctctatgttgaattcaatgaactcaccaccaaggctttccacgaccttataggtggtgagacgtacaggggtggaaataccggtcaacatagaacccggcccagccgaaactggccctgcacgccccaccataatttgggcgtagcaatgctcatgacaagaaaaaaccgcatgagcgcggttgtgctctatattgaattccgggtttccacgcccggcacccgctttataaggtgcctgaatagtgtaacgtcccggaattgcagaatcaatacattgtacaaacataacaattttgttatgtttacatctatgaactacactattgagtactacaacgaggaagtccggattgaggtggatcagcttccattgagtatgcgagccagatatcagcaccttgttgaacgaatgaaggtgtatggcagcaatctcggagaacctcacaccagcgcctttggtgatgggctttttgagcttcggattaaaggtagcgatggcatcgctcgcgttttttactgcaccctggcagggaagcgcatcgtcatgctgcacagctttataaagaagacgcagaaaacccctgtagctgaacgcaaaaaggcagaaaccagaatgaaggaggttaagcatgactggtaa

SEQ ID NO: 373780 - DNA, 819 bp, Salmonella enterica
atgagcatggaactgatggttaaggcgatgaaaattcgagtgggtaatccattacgaaaactggttctgattaagctggctgataatgccagtgatcatggcgagtgctggcccagctaccagcatatcgctgatcagtgcgagattagcaaacgctctgtgatgaatcatatttcggcactttgtgagtgcggtctggtaaaaaaagtcacccggaaaggtgaaaaaggtaactcaagtaatatttacctccttcgtcttgatggtgcaggagattcactaggggggagtgcaaataattcattacctggtgcagcaaattcactaggtagtgcaggagttgcaccagggggtagtgaaggagattcacccagaaccagtcactcttttgaaccagtcaaagaaccagtcaatgaatcaaaaaccattggcgcatctgcttacgcgtctgcgtcagtctgttctgcccggcaggaatattcaccagagttcgagcaggcctggttggcatatccaaaacgtgcaggtggaaattcaaaatcagcagcctacaaagcctggaaagcccgtctgaaagagggggtaaatgctgaaaccatgctggaaggcgtaacgcgttatgcgggatgggtatctgcaacggggaacagcggcacgcaattcgtgaaacaggccaccacgttttttggtcccgatcgtcattttggggagttatgggctgttcctgctgcacctagtcctggacgtgaagatccgatgttcaaatccagctacgggaatgtggattacagccagatcccgacagggttcagggggtga

SEQ ID NO: 373781 - DNA, 483 bp, Salmonella enterica
atgagtcttatgggagacgttcagaaattcattgaatcccatccgggatgtacttccagcgatatagcgaatgcttttgcagatttcccgcgtaaaagcgtcctgcagtcggcaagtaagttacgccagtgcgggcgtgttgctcatcgctttgaaggtaaaactcgcaggcattttgctcttgagacagacatacagccggatcaggagccagatatcgggactaaacctgtgcggagcttttatgtcggaaccaacgacccgcaggtgattatgcatctgatacgtcaggcagaaacactggagtcgggagggttgttccgtcgtgcagctacggtatggatggaggcattccgggagagtcatatcccgtcggaacgtagcgcctttctggcgcgccgtgaacggtgtttgcggaagagcagaaagcatgttgcatcaggtagtgagtggtatctgtcagggaattatgtggggtcttaa

SEQ ID NO: 373782 - DNA, 654 bp, Salmonella enterica
atgagcaataaatattgccaggcgctggcagaactgcgcaacaaatcagcgcacgaactgaaagaagtcggcgatcagtggcgcacgccggacaacatttactggggcataaatgccatgtttggtccgtttgttctcgatcttttctcggacgatgaaaacgccaaatgtgaggactattacacagcggaagataacgcgctggcgcatgactgggcggatcgtctggctgaactcaacggggccgcttttggtaatcctccttacagtcgcgccagccagcatgaagggcaatacatcacaggtatgcgatacatcatgaggcataccagcgctatgcgggataagggcgggcgctatgttttcctgatcaaagctgccatcagcgaagtatggtggccggaagatgcagaccatatcgcgtttattcgtggccgaattggtttcgaactgccggcatggtttatcccgaaagatgaaaaacaggtgcctaccggcgctttctttgcgggggcgatcgctgtattcgataaaacctggaaagggccagcgatcagctatatcgggcgtgatgagcttgaagctggtggcgaagcgtttctggcgcagatccaccgcgaagcgaaacgcctggtcgggaaggtggcggtatga

SEQ ID NO: 373783 - DNA, 390 bp, Salmonella enterica
atgaagctgaccctgccatttccaccgagcgtaaacacttactggcgtcatcccaacaaagggccgtttgccggaaagagcctgataagtgtggcgggacgcaaatttcggagcgcaacgtgtgccgccatcattgagcaacttcgccgactaccgaaaccgacatcaacccatgcagcggtagaaatcatcctgtatccgccagataagcggatcagggatttggacaattataacaaagcgctgttcgacgcactgactcacgcaggagtctgggaggacgacagccaggtaaagagaatgctggtggagtggggaccagttttcccgaaggggaaggtagaaatcacgatcacgaaatttgaaacaagggcgggtgcagccgcctga

SEQ ID NO: 373784 - DNA, 990 bp, Salmonella enterica
gtgagagcgttactgacccctgaaattgctcctcgtatgggcgttgtattgttcaggccgggatcggaactgatgcccctgtttatgcaggggcgtgttctgcttgaaccagagccggagcaattttcatctttcgccagcggcgcggtcccggcggtatcacagccgctggcggatgatcctgctgttcgtgatgtgttccgtaatgagtcggttatttatcgtgctggtggtctggatagtctggaaagctggctactccgggggaatggctgtcagtggccgcattcagactggcacagcgaacagatgacaaccatgcgccacgccccgggggcaatccgactgtgctggcactgcgataacctgctgcgcgaacagtttacggaacggctggaatcaatagctgtggagaacacgacaaaatgggttttatcggttgtttgtcgtgatctgggttttgacgatatgcacgcagtcacgctcccggaactgtgctggtggatggtacgcaatgacctggcagaagtcttacccgagagcgcagcgagaaaagcattaaggatgccgaaggcaattgtccagtcagctacccgtgaaagtgaaattgttccctcggtgcctgccaccagcattgtacaggataaggcgaaaaaggtactggtgctcagggttgatccggaatcgccggaaagcttcatgttacgtccgaaacgccgtcgatgggtcaatgagagatatacccgctgggttaaatcccagccgtgcgcgtgctgcgggaagcaggcggatgatccgcatcacctgataggccacggtcagggagggatgggaacaaaggcgcatgacctctttgtgctgccgttgtgcagaacgcatcacaatgagttacatgcggataccgtggcattcgaagagaaatacggctctcaactggagttgatatttcgttttatcgatcgcgcgctggcaattggcgtgctggcgtaa

SEQ ID NO: 373785 - DNA, 579 bp, Salmonella enterica
atgattaatccttctgaagttggtaagtctggtgaaatggttcgcctccggactcttgaaagtatctggatacaaggcaagcttcgaatgtgggggcgctggtcatatattggtggtggtagtggtgggaatatgtttaaccagcttctgtcatccgggaagataactaaaaccgctattaacgacgctcttcgtcggataaaaaaatctggtatcactaagccagagctggaggcctttcttcgtgaaatactcgacagcaaaaataagtcaggattagcattttgttctgacgaggagggattgaaaatagacggtgttattggcaccactctggttagagaaggtcattcagggctttacagcatcatagtgaatcgatatcgcctgcgtaagagcaaacgccttatggctgaagaactacaggtaaaacacccggaatggtgttatatgacttgccgccgacgtattgactcctggctaagtcttgccgaatccatgctatacgcgccaatgtgtgacaaatttggcacaaatagcgacagattttacttgaaaagtgagccagtaaatgattga

SEQ ID NO: 373786 - DNA, 438 bp, Salmonella enterica
atgttttgggatatcagtatgatgaaaaaaatactaatcacagcgatcggttttagtatagttggttgcgcagggatgaaattacccgactatacacaagtaaaatcaagcccgtattatgctgagtgtcgtgagtttgcaatgggtgtttataaaaacgatggctatagtaagttgggcaatacggttattctgagcatggatgatgctaaggcaagatatatcgtgacgggatgtgtagtagctatggggaaaaataacatagaggaagttaaatcagatctctcaagcaagggcgtgtcttttggaatggtgagtggtgcttgctataatgcagcgtgtaaagttgataccgaacaacaaatgaaagcctacacacttggaagctattacgctgcaactaagaaattccccggtcagatgaaagcagaattttaa

SEQ ID NO: 373787 - DNA, 615 bp, Salmonella enterica
atgaatcaacaacaatttcagcaggcggctggtattagcgccgggctttctgcgcgctggtatccgcatattacggcggcaatgagcgaattcggtattaccgcgccactggatcaggccatgtttattgcacaaacgggacatgaatcagcaggatttactgttctgaaggaaagcttcaattattcggtggaggcgctgaagaagatgtttggtaaacgcctgacgccgtatcagtgcgaaatgctggggcgtattgatgatcgccaggttgcccaccagccacaaatagccaatctggtttacggtggccgcatgggtaacaaagacgccggagatggctggaagtatcgcgggcgtgggcttatccagattaccgggctggagaattacaccagatgtggcgttgccctgaaactggatctggtggcgaatccgggacagcttgagctggaacgtcatgccgcccgatccgcagcgtggttttttgtggctaaagggtgtctgaaatactccggcgacatggtacgcgttacgcagataatcaacggaggacagaacagtattggtgatcggagggagcgctttgagaaagcaaaatcggtgctcgtatga

SEQ ID NO: 373788 - DNA, 543 bp, Salmonella enterica
atgatagtactgctgaaattgcttaaaaaattctggaagccattagcagaaatactgctggtggcttttttgttatgtgctggtgcgtactggtgttattcacgaggttatcagaaggcagattcatcctggaaattccaatgggcgcaacgagatcttaccgatgcgaccgccgcattgcagcaagaagtaaccgaaagagcgaaagagaagcgtcgccagcacgccgcagatgaagaacggaaaagagccgatgaagaactggcaaaaatacaggccgatgctgatgctgctgagcgtgctcgcggtgggctgcaacagcagctcgcagcagtacaacggcagctcgcaggaagtgaaaccggcaggctttccgctcttgccgcagcaagccaggcaaaagccgagaccggaatactgctcgcccagttgcttggcgaagctgatgatctggcgggaaagttcgcaaaagaggctgatgagcgttatgtcgccggaagcacatgcgaacgtacctgggacaaagtgaccgggcagaactga

SEQ ID NO: 373789 - DNA, 552 bp, Salmonella enterica
atgtgtgtccctcgccggttgtacaacgctttattatcggtaatgactatgcgccgtatattagccaccgctgccgcaatttgtcttggcggctgcattactgtgtatggtccggttaaaacaggagggcagcaacagcaggacagccaggccgggcagcagccagggatgagcgaacagatatcaacctcattcatcggtaaccgtaaaccggatgagttgctgaatgccgtggcgctgtatttcagggagaaggccatcacagccagtgttaacgaccagaccacaggtattatcgccgttacaggggatgacccggaactgagttcgttgtatctggactgttcactgttaccgcagacacaaaatatccaggagcattaccgtatcgtcgcgcaggtctggagtgccggtgaaggcagtaatgtttcggtaatggtgacaggcactgccggactggatactgccgacggtaacgataaggtgaagccggttgagtgtaaaagtaccgggatatttgagaaagatttgctggaacggttacgtaagtaa

SEQ ID NO: 373790 - DNA, 546 bp, Salmonella enterica
atgaacgtgaacaaaaaaaaactggctgaaatttttggttgtgacgtcagaactgtcacagcctggcaaagccaggggctgccacttgtttccggaggaggaaaaggtaacgaagcagtgttcgacaccgcggcagcgatttcatggtacgcggagcgtgatgcgtctattgaaaatgaaaagctgcgtaaagaggttgatgatttacgtgccgctgcggaatcagagcttaatcccggcaccatcgactatgagcgctaccgcctgacaaaagcccaggcggatgcgcaggaacttaaaaatgctgagcgcgaagggctggttcttgagaccgaactgttcacctacatcctgcaacgggtggctcaggaaatagcagggatactgtcaaggataccgctggtattacagcgcaaatatcctgatctgtgccagtcgcacatcgatgtggtcagaacggaaatcgccagggcgtcaggcagggccgccacgatagcggatgtggagaagtggaccgatgatttccggagagcgcagggcgaataa

SEQ ID NO: 373791 - DNA, 1932 bp, Salmonella enterica
atgatttccggagagcgcagggcgaataatgccaacagagccataactaacgggctgatagcgcttcatattccagtaccgcttaccaccgtgcagtgggctgatgagtattactatctgccaaaagagtcctcctacacccccggcaaatgggaaacgctgccgtttcaggtagcgataatgaacgcgatggggtatgaactgatccgtgttgtaaacctcattaagtctgcccgcgtgggctataccaaaatgttgctgggggtagaaggctatttcatagagcacaagtcgcgcaacagcctgttgttccagccgaccgactcatccgctgaggattttatgaaatcccacgtggagccgactatcagggatgttcctgtattgctggagctggccccctggttcgggcgtaaacatcgtgataatacgctcaccctgaaacgcttttcttccggtgtagggttctggtgcctcggtggtgcagcagccaaaaactaccgtgaaaaatcggtggatgtggtctgctatgacgaattgtcatcttttgagccggatgtcgagaaagaaggttcgccgacgctgctgggggataaacgtattgaaggttctgtctggcctaaatccattcggggctccacaccaaaagtcaaagggtcatgccagattgaaaaggcggcaaatgaatcggcgcattttatgcgttttcatgtaccgtgtccgcactgtggcgaagaacagtaccttaaattcggtgatggcagtacgccgttcggtctgaaatgggaggaaagcaagccggagacggtgtattacctttgtgaacataatggatgcgtgatccgtcaatcggaacttgatcagaaagcaggccgctggatttgcgataacacaggcatgtggacacgcgatggactggcttatttcagcgcgtccggtgaggaggttcctccgccacgatccattacctttcatatctggacggcttacagtccctttaccacctggatacagattatttatgactggctggatgcgctgaaagatccaaatggtgtgaaaacctttataaacaccactttgggcgagccttatgaagaggcggtggccgaaaaactcagccatgagcttttgctggaaaaagtgattcattatgcggcgccggttccggagcgggtggtgtatctgacctctggtatcgactcccagcgtaaccgttatgaaatgtatgtctggggctgggcgccgggcgaagaggctttccttattgataagcaaattatcatgggacggcatgatgatgaagataccctgcaacgtgtggatgccgtcattaataaaaaatatcgtcatgctgacgggacggatatttccatttcccgtatctgctgggatatcggcggtatcgatgcagaaatcgtctataaacgctcaaaaaaacacggcattttccgcgtgctgcctgtcaaaggggcctccgtttacggaaaacccgttattaccatgcctaaaaaacgcaaccagagcggggtattcctgtgcgaaatcggtactgatactgccaaagaaatgctttacgccagaatgggggcggttactgcgcctgccgacgaagccacgccttatgcgatccgctttccggataatccggatgtttttacggaggtggaagcgaagcaactggtagccgaagagctggtggagaaactggttaacggaaaattccggctgttatgggatgccaaaggacgtcgtaacgaagcgctggattgtcttgtctatgccagtgcagcgttacgggtgtctgtgcagcgctggcaactggatctggaggcgctggcgacatcaaggaaaagcgaagagcaggataccccgacacttgaacaactggccgcaatgctggcaggaggagttaatggcaacaatcactga

SEQ ID NO: 373792 - DNA, 204 bp, Salmonella enterica
atggcaacaatcactgagctacaggaagcccgcgtcgcgctgcatgacctgatgacgggaaaacgggtggcgacggttcagaaagacgggcgacgggttgaatttaccgcgacatcggtgggggatctgaaaaaatatgtcgcggaacttgaggcgtcactgtgcaatggtcgccgccgggcacctgtgggggtgagactgtga

SEQ ID NO: 373793 - DNA, 1620 bp, Salmonella enterica
gtgcaatggtcgccgccgggcacctgtgggggtgagactgtgaagcgcaccccggttctggtggatgttcacggcacgccgctgcgggaaagtctgggatacaccggcggggggatcggtttcggcggacagatggctgactggatgcccccggcggaaagcgtggatgccgcgctgctgccttcgttgcgcctcggcaatgcgcgggctgatgatctggtccgtaataatggtattgcagcaaatgcggtggcgctgcacaaggatcatattgtcggacacctgtttcttatcagctatcgtccaaactggcgctatcttggtatgcgtgagagcgcagcgaagagttttgtggatgaggttgaagctgcatggacagagtattgcgatggtatttttggcgaaatggatgccgaggggaagcggacttttacagagttcatccgtgaaggcgtgggcgttcacgcctttaatggtgaaatttttctccagcctgtctgggacgctgaaaccacgcaggttttccgtacccggttcaaggctgtcagtccgaaacgggttgacacaccggggtatgcccgcggaaaccgccagcttcgcgcaggggtggaaacggaccggaatggaaaagccctcgcctatcatgtctgtgatgacgactggccggtggctggtggggagcgctggacccgtattcctcgttttctgccgtccggacgacccgcgatgttacatattttcgagccggttgaggacggacagacgcgcggtgccaatcagttttacagtgtgatggagcggctgaagatgcttgataccctgcaggcaacgcagcttcagtccgcgattgtcaaagccatgtacgccgccacgatagaaagcgaactcgattccgagaaagcctttgaatacatcacggcggcagataacaaagatacgccccttgttaacatgctcgcaaattatgcccgctattacagtaccaacagtatcaaactgggcggtgtaaaaattccccacctgtacccgggtgatgagctgaatctgcagactgcgcaggattccgataatggcttttcagcgctggagcaggcgctgctacggtatattgccgccgggctgggggtctcttatgagcagctttcgcgtgattattctcaggtcagctattccagcgcccgcgcatctgccaatgagtcctggcgctatttcctggggcggcgccggttcattgccggacggctggcgacacaaatgttttcctgctggctggaggaggcgctgatacggggagttatccgggcaccccgggccaggttttccttctgggaggcccgatccagctggagccgatcggagtggattggtgccggacgtatggcgattgacggactcaaggaggttcaggaagccgtgatgcgtattgaggccgggctgagtacctatgaaaaagagctcgccattatgggcgaggattaccaggagatattccgccagcaggtcagggaatccgaagaacggcggacagccggactttcgcgtccggtatggatcaccgatacctatcaacaacagatcgcggcgagccgtcagacggaggaggaaaagcgtgcaacgtaa

SEQ ID NO: 373794 - DNA, 1497 bp, Salmonella enterica
gtgcaacgtaatctcccgcacatcatcagccaggcaaccagtgctccgttgctgcttgaacccgcctatgcgcgggttttcttttgcgcgttgggcagggagtcaggcattaacagcctgcacattcccggtaataacgaaagtctggatcagtcggatatggcactggtcacaggcgattttatggcgaccggaaagccgcaggcacgtttttatcaggtagtgaacggtattgcggtattacccgtgaccggaacactggttcataaactcggcggaatgcgtcccttttcagggatgaccggctatgacggtgtcactgcccggctacaacaggcggtttcagatccggaggtaaaaggcattctgctggatattgacagtcccggcggtcaggctgccggggcgtttgactgtgctgacatgatttaccggatgcgcgaacagaaacctgtctgggcactggcaaatgaaacagcctgttcggcggccatgttgctggcggcagcctgttcgcaccgccttgtgacccagacgtccagaatgggatcaattggtgtggtgatggcgcataccagctacgccgaaaaactgaaacaggaagggatcgatatcacccttatctattctggcgcacacaaggctgatctgacgcccagccagaaattaccggaaagcgtctatgccgactaccagcagcgaatggacgaggccagaaagatgtttgcagaaaaagtggcccggtacacggggttgtctgtcgatgcggtaatggcgacggaggcggcagtgtatgacgggcaggccattatcactaccggactggcagatggaatggtgaatgctgctgacgccatcggcgtgatggcagaagctatcaacagtaacaagacaggaggcactatgcctgaattaagtgcagctgacgctgtcacgcaggaaaaccagcgcgtaatgggaattctgggttgcccggaggccagggggcatgaggcactggcacagatgctggccgggcagccgggaatgagcgttgctcaggcgaagtctattctggctgccgccgcgccggcggatacgaccagcaccgctgaccgtatccttgccctggaagaagctggtggtcgggaaacactcgcacagacactggcggccatgccggagatgacggtggaacaggccagaaccattctggcagcatcgccgatcgctgcggcaacgtcacttcatgatgccgtgatggcgcttgatgaggcgaaaggccgtgaagagttggcggaaaaactggctgtcatgcctggtatgaccacagatcaggcccgtgacctgctggctgccgctccggacaaatccggtaatgcggggctgagcatgaacaacgcatttgatgctttcatgcagtctcattccccgggccccatatccggcggcaaaggccacagtaatgataccgaaacgacgttgttgatgagtattcccggtacttcagccacctga

SEQ ID NO: 373795 - DNA, 348 bp, Salmonella enterica
atgtcatttaccaccactattgagaaacgtgcggataaccgcattttcgccggtaacgatccggcacataccgcaacgggagtcagcgggataacggcggccacaccgatgctgacgcccctgatgctggatgataccaccgggaaactggtggcctgggacgggcagaaggccggaacggcggtcggggttctggctcttgcgctggacgggtcggaaaacctgctgacgtactggaagagcggcacctttgccacagaatcactggtatggccgaagagtgtggatgccattaagcaggcaaatgcattcgccggaagcgccgtcagtcacgccgctttaccgtaa

SEQ ID NO: 373796 - DNA, 1029 bp, Salmonella enterica
atgggattgtttaccacccgccagttgctgggttataccgagcagaaagttaaatttaacccactcttcctgagcctgttttttcgccgtactgtgacatttcctacccaggaagtcatgctggacaaaattaccggaaaaacgccgattgccgcttatgtatctccggtggttggagggaaggttctgcgtaaccgcggtggggaaacgcgcgtactgcgtccggggtatgtcaaaccgaagcatgaagttaactatgcgcaggttgttgagcgtctgccgggtgaagacccggccaggcttaacgatccggcctaccgtcgtctgcgcattctgaccgataacctgaagcaggaagagaaggccatcgtccaggtggaggagatgcaggccgtcagtgcggtgctgaacgggaaatacaccatgcagggcgagcagtttgacaccgtggaggtggattttggtcgctccgccgggaataacattattcaggccacaggtaaaaaatggtcagagcaggacagggaaacctttgacccgacttatgatctggatatgtactgcgaccaggcatccggtctgatcaatattgccgtgatggacgggaaagtctggcgtctgctgaacggctttaagctgttccgtgaaaaactggatacacgccgcggttcaaattctcagctggaaacggcggttaaggaccttggggctgtggtgtcgttcaaggggtattacggagatttggccattgtggtggctaaaacatcctatgttgctgataacgggaccgaaaagcgttacctgcctgaagggactctggttctgggaaatacggcggcagaaggtatccgctgctatggtgccattcaggattcacaggcgctcgcggagggtatcgttgccgccacccgttatcccaaacactggctgacggtgggggacccggcgaatgaatataccatgacgcagtctgcgccgctgatggtcctgccggacccggatgagtttgtcattgtcaccgtcggttaa

SEQ ID NO: 373797 - DNA, 360 bp, Salmonella enterica
atggcaacaaaagaagagaatatacagcgtctgcgggagcttgcgacgcggcttgggcgtgatccggatgtgtccgggagcgccgctgaactcagccagcgtgtcatggaatgggaagaggaagcggaggcggagcgtttgtctgttgtggaaaatgacagtgatgaacccatagtgccgcccgggatcgggcaaagatccgaacgggtacttatcagggcgcttcgtacactacacatctgcgctatcgatccggacagtaaccgggaactggatatggttatggcgggaaacccggcgcgtatttcgcaacacgatgtggacgagctgattgctgcaggacttattattgaactgtaa

SEQ ID NO: 373798 - DNA, 384 bp, Salmonella enterica
atgtcgcagtccgaaaacctgtttgataccgcgatttctcaggctgatgatgccatcctccgggtgatgggaacggtagcaacaataacctccggcgttctggcaggggccacgcttacgggcgtatttgacgatcctgaaagtgtgtcgtatgccgccggaggtgtccggattgaggtggacaagcctacattttttgtcaaaacatccctgacagtccatctgaagcgcccggacacactaaccattctcggtgacaccttctgggtggatcgcatcactccggctggtggagacagcagtattattctgctgggcaggggggagccgccgacggataaccggcgcaggacgggaggaatgtttgactgctccccgccctga

SEQ ID NO: 373799 - DNA, 1131 bp, Salmonella enterica
atgaaacgcgcatataaataccggttttaccccacgactgagcaggctgagcttttagctcagacgttcggttgtgtgcgtttcgtctacaactccatcctccgctggcgtaccgatgcgtactacgagcgaaaggaaaagatcggttacctacaggccaacgctcgccttacggcgctgaaaaaggagccggaatttgcctggcttaacgacgtttcctgcgttcccctccagcagtctttgcgccaccaacaaaccgcctttgctaacttcttcgccggacgggctgcatatccggctttcaaaagcaaacggcacaagcaggcggctgagttcactgcgagcgcgtttaaataccgcgacggcaagctgtacatggcaaagaacaaaatccccttagacgtgcgctggagtcgtccgctgccgtccgtgccgtctaccgtcaccatttccaaagatgccgcagggcggtactttgtttcgtgcctttgcgaatttgaatccgcatcactgccgatcacctcttcaatggtcggcattgatgttggtttaaaagatttgttcgtcaccgataccggattcaggtccggcaatccccgccataccgctaaatacgcggctcgcctggcactactccagcgccggttaagcaaaaaggccaaaggctcaaagaaccgcgccaaagcccgcttaaaggtggcccaactccacgcgaaaattgctgattgccgactggatgccctgcacaaggcatcccgcaaactgattaacgataaccaagttgtttgcgtcgaatccctgaaagtgaagaacatgctccgcaacccgtcgctatccaaagcgatagcagacgcgagctggggcgaacttgtgcgccagctccagtacaaaggcgaatgggccgggcggtcagtagtcgccattgaccagtttttcccgtcctcaaaacgctgtagctgttgcggtttcaccatgaaaaaaatgcctcttgatgttcgtaaatggcagtgccctgagtgcggaactgaccacgacagggacgttaacgcggcacgtaatatcaaagctgccgggctggcagtgttagcccacggagagcctgtaaatcctgaatcactcaaagcggcttag

SEQ ID NO: 373800 - DNA, 579 bp, Salmonella enterica
atgaaagggcttgaaaatgcgatccggaatctgaacagccttgaccgacagatggttccccgggccagtatctgggctgtgaatcgcgtggcgcagaaagctgtttcagtggcaacccgtaaggtggcgcgggagactgtcgccggagataaccaggtaagaggacttccgctgaagctggttcgccagagggtgaggttatttaaagccggtacagacggtaaacgctctgcccggatacggattaaccggggaaaccttcccgccataaagttgggcgctgcacaggtcaggatgagcaaacggaggggcaaactgctgtatcgtggaagtgtgctgaaaatcgggccatatctgttccgggatgcctttattcagcaactggctaacggacgctggcatgttatgcgacgcgttaacgggaaaaaccgttatccaattgatgtagtgaaaattcctctttccggaccattgactcaggcattcgaaagcgccacacaaagcttgattgacgaggaaataccgaagcaattggggtatgccctgaaacaacaactgaggctttatctttcacgatga

SEQ ID NO: 373801 - DNA, 402 bp, Salmonella enterica
atgagcaaacacacattaatccgccgggccgttctggaaaagctggaatccgtgactggcgcacctgtcactctttttgatggacttcctgctttcgtagaacaggaagatttacccgcaatagctgtctggctgacagacgcacagtatacaggccttatgaccgatgaggatgactggcaggctactctccatacggcagtttttctgagggctcaggctcctgatacagagcttgatatctggatggaagaaaaaatctttcctgcgctggaagaggttagtggtctggagcgccttatcgataccatgaccccgctgggttatgactaccagcgtgacagcgaaatggcaacgtgggggatggcagaaattacttaccggatcacctataccaactga

SEQ ID NO: 373802 - DNA, 744 bp, Salmonella enterica
atgggaacaccaaacccactggtaaaaacgaaaggcgccggaaccacattctggctgtataccggcagcggcgatgcgtttaaaaatccactggctgatgatgactggctgcgactggcaggtattaaggatctgcagcccggagaaatgagtgcagatgcggaagacgatgactatcttgatgatgaaaatgccgactggaaaagcactacgcaggggcagaaaagcgtcggtgacaccacggccacgctggcctggaaacccggtgagaccggacagaaaaaactggttgagctgtttgacaccggcgaagttcgcgccttccgtatcaggtatcctaacgggacggttgatgtgttccgcggctggctgagttcactgggtaaaaccgtgacgtccaaagaggtgatgacacgcagcgtaaaaatcaccggcgtcgggcgtccttctcttgcggaggaggatacacctgacgtagtcagcgtatccggagtgactgttgcgccggccagtgccacggtggctgccggagccaccaccacgctgacatttacggtaaaacctgataacgcgtcagataaaacgctgcaggttgcgaccgccgatccgctgatcgccaccgtcacgctgaaggataatgtggccacggttaaaggcgtgaaggcgggcagcgtgaatattgttggcatcagcagtgacggcagtcttgtcgcggtggcagcagtgacagtgacggcgtcataa

SEQ ID NO: 373803 - DNA, 396 bp, Salmonella enterica
atgtttctcaatacagacacctttaactacggtgggcattccatcgtgctcagtgagctttctgccctgcaacgtgtggattatctgaagtttattcagcagcggacggcagactatgacgcacagcctgaaaccctgacggaagcagagcgtcagacagaatttatgcagatgggggtggatattaatgcatggctggtatcccgctccctgtgtgagagcaaaaaagaggaggaggcccgcgctctgtatgagtccgtcagactggaatggtcttatgaggcgctgggacgtggcgctgatatggttctttccctgagtggtatgcgtcttccggcatcgcaggaagacgacagcgggagtgaaaaggacacgaccacgccggaaaagtcctga

SEQ ID NO: 373804 - DNA, 315 bp, Salmonella enterica
atgcggctcgcgcgtgagttccggcgaccagactggcggcagatgctggcggaaatgagtgcgacagagctgggtgagtgggcggagcatttcgtgaagaacagcttcagtgacatgttgctggatgcggagtttgcaacgctgaaatcgctgatttccggactggttacaggcacgcatcacgatgcagaaatgttcagcctgatcactgatcctgagtcgttgcacgaaaaaacggatgatgaactgatgatcctgggcgaaggtattaccggaggtgtccgctatggaccagatagcgaacctggtcattga

SEQ ID NO: 373805 - DNA, 1227 bp, Salmonella enterica
atgggaattaacgaaatcatcatgtacatcatgatgttctttatgctgattgccgccgtggacaggatcctgtcgcagttcggcgggtcggcgcgcttcctcggtaaatttggcaagagtatcgagggggctggcggccagtttgaagagggctttatggcgatgggcgcgctgggactggcgatggtcggtatgaccgcgctggcgccggtgctggcgcatgtactggggccggttattatcccggtatacgaaatgctgggcgcgaacccatccatgttcgcgggtacgctgctggcctgtgatatgggcggattcttcctcgccaaagagctggccggcggtgatgtcgcggcgtggctatactcagggttaatacttgggtcgatgatggggccgaccattgtgttctccattccggtggcgctcggcattatcgaaccgtctgaccgccgctacctggcgcttggcgtactggcgggtatcgtcaccattcccattggctgcattgcggggggattgatcgccatgtactcaggcgtgcagatcaatggtcagccagtggagtttaccttcgcgctgatcctgatgaacatgatcccggtattgattgtcgcggtgctggtagcgctggggctgaagttcatcccggaaaaaatgatcaacggtttccagattttcgccaaatttctggtggcgctgatcaccatcggtctggcggctgcggtgattaaattcctgttgggctgggagttgattccgggactcgacccgatctttatggcgccaggcgacaaacccggcgaagtgatgcgcgccattgaagtgatcggctctatctcctgcgtgctgcttggcgcgtatccgatggtgctgttactgacccgctggtttgaaaaaccgttgatgaatgtcggtaaactgctgaacgtaaataatattgcggcggcaggcatggtagcgaccctggcgaacaatatccccatgttcggcatgatgaagcagatggatacccgcggcaaagtgattaactgcgcatttgccgtctctgcggcgttcgcgctgggcgaccatttaggcttcgccgctgccaacatgaacgccatgatcttcccgatgattgtcggcaagctgatcggcggcgtgacggcgattggcgtggcgatgatgctggtgccgaaagatgacgccgcccaggtgaaaaccgaagcggaggcgcaatcgtga

SEQ ID NO: 373806 - DNA, 1653 bp, Salmonella enterica
atgcaaaacccctataccgtggccgactatttgctggacagactggcaggatgcggcattggccatctttttggcgtaccgggcgattataacttgcagtttcttgaccatgtgattgaccacccgaccctgcgttgggtgggatgcgccaatgagctgaacgccgcttatgccgcggacggctatgcgcgtatgtcgggcgctggagcgctactcactacctttggcgtgggagaacttagcgctattaacggtatcgcgggcagttacgcggaatatgtcccggtcttgcatatcgtcggcgcgccctgtagcgctgcgcagcagcgaggcgaattgatgcaccacaccctcggtgacggcgattttcgtcatttttatcgcatgagccaggcgatatccgctgccagcgcaatattagatgaacagaacgcctgtttcgagattgaccgcgtgttgggtgaaatgcttgccgcacgcaggccaggatacatcatgttgcccgccgatgtggcgaaaaaaacggccatcccgcctacgcaggcgctggcgttgcccgtgcatgaagcgcaaagcggcgtggagacggcttttcgttaccacgcccgtcagtgcctgatgaacagtcggcgcattgcgctattggccgactttcttgccgggcgttttggtttacgaccactgttgcaacgctggatggcggaaacgcccatcgctcatgcgacactactgatggggaaggggctttttgatgaacagcacccgaacttcgttggcacctatagcgctggcgccagcagcaaagaagtgcgtcaggccatagaggacgccgatagggttatctgcgtcggcacccgttttgtcgatacccttacggccggattcacccaacaattaccgacggaacgcacgctggagattcagccttacgcgtcgcgcatcggcgaaacctggttcaacctcccgatggcgcaggcggtgtctacgctgcgcgaactgtgcctggaatgcgcttttgcgccgccgccgacgcgttccgccggacagccagtgcggattgataagggagaactgacccaggaaagcttctggcaaaccttacagcagtatctcaaacccggcgatattatccttgtcgaccaggggaccgccgcctttggcgctgccgcgctgtcgcttcctgacggcgcggaagttgtggtacagccgctgtgggggtctatcggctattccttgcccgccgcgtttggcgcgcaaaccgcctgtcccgatcggcgggtgattctgattatcggcgatggcgcggcgcagctcacgattcaggagatgggctcgatgttacgcgacgggcaggcgccggtcatcctgctgctcaacaatgacggctataccgtagagcgcgccactcacggcgcggcccagcggtataacgacatcgcgagctggaactggacgcagataccaccggcgctaaacgcggcgcaacaggcggagtgctggcgggtgacgcaggctatccaactggcagaggtcctcgaacgtctggcgcgcccacaacgtctgtcatttattgaagtgatgttgccaaaagccgagctgccggaattactgcgtaccgtgacccgggcgctggaagcccgcaacgggggataa

SEQ ID NO: 373807 - DNA, 249 bp, Salmonella enterica
atgaacgtactggaagtcgatctgcataaactgacggtcagcgatccgttcctcggacagtatcaacaactggttcgcgatgtggttattccttaccagtgggatgcgttaaacgatcgtattccagaggctgaacccagccatgccattgaaaatttccgcattgccgcaggccagcagacgggcgacttttacggcatggtctttcaggacagcgacgtggcgaaatggctggaagcggttgcctag

SEQ ID NO: 373808 - DNA, 687 bp, Salmonella enterica
gtggaggagaccggctgcttcggcgcggcgctggctgcccgcgtcggcaccggcgtatatcgcgatttccgcgaggcccaacgcgatgtcgccctgctacaggatcatgtcgatatcgttgaggccggaaccatcctttgtttaaccgaaggccttagcgcggtgaaagccctgcgagcgcagtgcccggaaaaaatcatcgtcgccgactggaaagtggccgatgccggagaaaccctggcgcagcaggcgtttggcgctggcgctaactggatgactatcatctgcgctgcgccgctcgccacggtcgagaaaggccatgccgtcgcgccatcctgcggcggtgaaattcaaatggaactgttcggcaactggacgctggacgacgcccgagactggtatcgcgtcggggttcgccaggcgatttaccaccgcggacgcgatgctcaggccagcgggcagcagtggggagaagcggacctggcgcgtatgaaggcgttgtccgacatcggccttgaactgtcaattaccggcggcattaccccagcggatctgccgctgttccgcaacattaacgttaaggcatttatcgccggacgcgcgctggcaggtgccgcccatccggcgcaggtcgcagccgaattccacgcccaaattgacgccatttggggagaaaagcatgcgtaa

SEQ ID NO: 373809 - DNA, 246 bp, Salmonella enterica
atggcgccggagggctgccagcactgctggtcaatatggagcattaacgcgcgtgtaccttttgttaatgcagcatggctggtaaagcgcccggtttcctgcgtcgagaacgtcggaaaaccgggtgaggtccatgatgaggcgatcgcgataccgggtatcagcgtcagagcgaaggcggcaagtttcatcacgctatcctttgtgggcaatattcatcagcttgcctggtttttaggcgaatga

SEQ ID NO: 373810 - DNA, 1179 bp, Salmonella enterica
atgtttgataaacgtcaccgtatcactctgttatttaacgcgaataaagcctatgaccgtcaggtagtggagggggtgggtgaatatttacaagcctcgcaatccgaatgggatatatttattgaggaagatttccgtgcccgtatcgataacattaaagagtggttaggcgacggcgttattgccgattacgatgatgacgatatcgcgcaattattggccgatgtcgacgtacccattgtcggggtcggcggttcttaccatcttgctgaaaattatcccgccgttcattacatcgccaccgataatcatgcgctcgttgaaagcgctttcctgcatttaaaagaaaaaggcgttaaccgcttcgcgttttacggtttgcccgactccagccgcaaacattgggcggcggaacgggaatacgcctttcgccagctggtcgccgaggaaaaataccgcggcgtagtctatcagggactggaaaccgcgccggaaaactggcagcacgcgcaaaatcgcctcgccgactggcttcagacgctgccgccgcaaaccggcatcattgccgtaacggatgcccgcgcccgtcacgtattgcaggcctgtgaacacctgcatattccggtgccggaaaaactttgcgttatcggtattgataacgaagagttaacccgttacctgtcgcgcgtcgcgctttcctccgtcgcgcagggggcgcggcaaatgggttatcaggcggcgaaactgctgcaccgtttgctggcgcgcgaagagatgccgttacagcgcattctggtgcctccggtgcgcgtcattgcgcgccgctcgacagactatcgctccctgaccgatccggcggttatccaggcgatgcactttattcgtaaccatgcctgtaagggcattaaagtcgagcaagtgctggacgcggttgggatttcacgttcaaacctggaaaaacgttttaaggaagaagttggcgagacgatacatgcgctgatccacgccgaaaagctggacaaagcgcgtagtttgttgatttccaccacgttggcgataaacgaaatttcgcaaatgtgcggctacccgtcactgcaatatttctattcggtgtttaaaaaggagtacgtcgctacgcctaaggagtatcgcgaccagcatagtgaagcgttgttgtag

SEQ ID NO: 373811 - DNA, 846 bp, Salmonella enterica
atgaaaataatacggactttatttttgctgctgattgccgtttatggtggttcggtatcggccagacccatgctgaaagcgacgtttgggagcaccacgctatattatggtattggccctagttatgcggatagagcggttatactgaactctacagtaaccacgcctgatggcgtgtactatggttcctggaaattctcaggaatggcaagaaaaggagctactgcgaccttactctcctggaccgggcctgaccccgcaccgactattgttctgcgggattttgataacagcatttcgaaatccaactgtaaaaacctcccctcaagttggaatggctgcggttattataccgttgatattaccgtacaaagcgacaattatggttgcccgtggctggccgccactcatagcaccgctgaggatctggtttctggggaaacctatagcgcgccggatacgcgcagctcagtttgcccgaaaattcccgttgatacttttgatatctcctgggatgcgaacgtttcgaaacagaaaacaaccctcatgcttgatgccaccggtggcacggtgaatcgcacgttacatacctatttgatggagggggggaaactgtgcgatggcagcaaatttgacaaccgtggcgcttattgccgttttgtctcatcgggtattacgctcaatgtgctgggctgcgaccagtcgagcgtcacgaccagcgccgttgatcatccgataaccgatgttgagcttcatgacattaatgtagcggtgaacacccgcaacattggctccgggcagttcacgtcgacctgtagcttccagtatattattgatgagctttag

SEQ ID NO: 373812 - DNA, 2658 bp, Salmonella enterica
atggctcactataaaaaatttcgtctgagcacgcttgcggccgtggtgggtattgttctggctgtcggtccggaaaatagctacgcggaagcgcccattcaatttaatacccgatttcttgatgttaaagatgatgccagcctggatctctcccgtttttcccgtaaaggctacattatgccggggagctatcatctccaggtgctggtcaatcagagtcaaattgcccaggacaatattattacgtattccgttgataataacgatcctgataacacctatccctgtttatcgcctgagctggtatcgctgctggggttaaaacctgaaatagcagataaaatgatctggataaatgccggtcagtgtctgcaaccagatcaactggaagggatggaaacccaaacagatttaagccagtcaacgctgacggtgattattccgcaggcgtatctggaatacagcgatgaagagtgggatccaccttcccgctgggatgaagggattcccggcgtgttatttgactacaacgttaacagccagtggcgacatgctgaacatgatgacggcgatgaatatgacatcagcggcaacggcacggtgggtgccaacctcggcgcgtggcgtttgcgcgcggactggcaggctaactatcgtcacgaaaatgacagcgaagataaagacaactttggctccagttccgaacagaactgggactggaaccgctattacgcctggcgggcgatcccgcagctccgggcgcagctaacgctgggcgaaggatcgctggaatccgatattttcgacggctttaactatgttggcggcagccttatcaccgacgatcagatgttaccgcctaatctgcgcggctacgccccggatatatcaggcgtggcgcgcaccaacgccaaagtcaccgtgacccagcgcgggcgggtgatttatgagtcgcaggtcccggcagggccgtttcgcattcaggatattaatgaaacggtatccggcgatctacacgtcaaaattgaagaacaaagcggtcaggtgcaggaatatgacgtcagcaccgcctccattccgtttctgacccgtcccggccaggtgcgctacaagttggccgccgggcgaccgcaggactgggatcacaatatggaaggcggctttttcacctcagccgaagcctcctgggggatcgctaacggctggtcgctgtacggcggtgccatcggtgagcaggattatcaggcgctggcgttaggactggggcgcgatctggcgctgctgggcgcgttttccgtcgatgtcacccattcccgtgcgacgttgccagagggtagcgcctacggcgacggcaccattcagggtaactcgttccgtgccagctacgctaaagattttgatgatatagacagccgtctgacgtttgctggttatcgcttttccgaagaaaactacatgacgatggacgagtttatcgatacgcataatgacgataacgatcgtcagcgcaccggccacgataaagagatgtataccctgacgtacagccagaacttttcggcaataaacgtcaacgcctatatcaactacacccatcgcacctactggaatcaacctaaccaggacagctataacctgacgctgtcgcactatttcgatgtcggtgaggtgcgcgggatcagtctgtcggtgaacggttttcgcaacgaatatgacaatgagcgtgatgacggcgtgtacgtctcgctcagtattccgtggggcaacaaccgcacgctgagctacaacggctcctttagcgatgacaacaacagcaatcaggtcggctattacgagcgcattgacgatcgcaataactaccagatcaacgctggtcgcgcggataacggtgcgactctcgacggctactaccgtcatcaagcgagctatgccgacattgacgtcagtgcgaactatcaggaaggcgactatacctccggcgggctgaacatccaggggggcgcgacgctgactgctaaaggcggggcgctgcaccgcaccagcgtcaacggcggctcgcggctgatggtggatgtcggcgatgaagcgaacgtacccatctccggctacagcacgccggtatataccaacgcgtttggtaaagccgtcattgtcgacgtcaacgactactaccgcaacctggtgaaaatcgacattacccagttgccggaagacgcggaagcaactctctccatcgctcaggcgaccctgacggaaggggcgatcggttatcgccgcatggaggtgctcagcggtaaaaaagccatggccagtatccgcctgcgcgatggcggcacgccgcccttcggcgcagaggtttacaacagtcgccagcaacagttagggatcgtaggtgaagacggcagcgtttatctgatcggcattaaccccggcgagcggttgcaggtgacatgggaaggtaaaacgcagtgtgaagcggcgttgcccgatccgctgccgggcgatctgtttagcggcctgttgctgccgtgcatcggcgacgcttcatcacctgaggcaacgcagcccgaagagaaaccattactccagcttcatacgcagcggcggacgtcttcgacgcaacccgaagcgctctcttctcgttatccaacacattga

SEQ ID NO: 373813 - DNA, 195 bp, Salmonella enterica
atgggacaactgctcgatggcgtctggcacgacacctggtatgacaccaaatcttccggggggaaatttcagcgttcagcgtcggctttccgcaactggcttaccgctgacggcacgcccggaccttccggcgaaggcggattcgccgcagaaaaagatcgttaccatctgtacgtttcccttgcctgcccctga

SEQ ID NO: 373814 - DNA, 588 bp, Salmonella enterica
atgaagtcatctcatttttgtaaactggcagtaactgcatctttagttatgggaattgtctccggcgctcaagccgcgggtagcaacacagcgaaggtcactttccttggtaatattgttgactccccctgctccgtcacattggatacggaagatcaaacagtcaatatgggttcaagtatcggtaatggcacgctgagtaatggtaaaacgaccatcaacaatgcccgtacctttcatatcgatcttgagggttgtacctgggctaccgagaaaaatatgaatgtggtattcactacaggtagtggaaccacagcggctacaggcgccacggataatctcgcgctgatgaagactgacggcaccggcgctattagcaatgtaagcctggcaatcggcgatgctggcaaaaacaatatcaaactgggcgatacctatacacaggccattgcggacctggacggagataccattcttgatgagaagcaaagcctgaatttcaccgcctggctggttggcgcagcaaccggcaccgtaggcacaggtgaattcagcagcgccgccaacgtcactatctcttacctgtaa

SEQ ID NO: 373815 - DNA, 2544 bp, Salmonella enterica
atgaataaaacaactgagtatattgacgcactgctgctttctgaacgtgagaaagcggcattgccgaaaactgacatccgcgccgtgcatcaggcgctggatgccgagcatcggacttactcgcgagaagacgattcaccgcagggttccgtaaaagcccgccttgaacacgcctggccggattcattggcgaaggggcagttaattaaagatgatgaagggcgcgatcagttgcaggctatgccaaaagcgacgcgctcttcgatgtttcccgatccctggcgaaccaacccggttggccgtttctgggatcgtctgcgtgggcgggatgtaacgccgcgctatgtttctcgtctgacaaaagaagagcaggcgagcgagcaaaaatggcgtaccgtcggcactatacgccgctatattttgttaattttgactctggcgcaaaccgtcgtcgcgacctggtatatgaagaccattctgccttatcagggatgggcgctcatcaatcctatggatatggtggggcaggatatttgggtctcttttatgcagctcctgccctacatgctgcaaaccggtatcctgattttgtttgccgtgctgttctgctgggtgtcagccggattctggacggcgctgatgggcttcctgcaactgcttatcgggcgcgataagtacagcatctccgcgtctacggttggcgatgagcccctcaatccggaacaccggacggcgctgatcatgcctatctgtaatgaagacgttagccgcgttttcgccggtctgcgcgcgacctgggagtccgttaaagccacaggcaacgccgcgcattttgacgtctatatccttagcgacagttataacccggatatctgcgtggcggagcaaaaggcgtggatggagcttatcgcggaagtgcagggcgaaggccaaattttttaccgtcgccgccgccgccgtatgaaacgcaaaagcggcaatattgacgatttttgccgccgctggggcaatcagtacagctatatggtggtgctggacgcggactcagtgatgagcggcgagtgtctgagcggcttggtgcgcctgatggaagcgaatccaaacgccgggattatccagtcttcgccgaaagcgtcggggatggatactctgtatgcccgctgccaacagttcgcgacccgcgtctatgggccgctgtttaccgccgggctgcacttctggcagttgggggagtcgcactactgggggcacaatgccattatccgcgtgaagccgtttatcgagcactgcgctcttgcgccgctgccgggagaaggttcgttcgccggatcgattctttcccacgactttgtggaggcggcgctaatgcgtcgggcaggatggggcgtctggattgcctacgatctccccggctcctatgaagagctgccgccaaacctgctggatgagcttaaacgcgaccgccgctggtgtcacggcaacctgatgaactttcgtctgttcctggtgaaaggaatgcacccggtgcatcgcgccgtgttcctgacgggggtaatgtcatacctgtccgcgccgttatggtttatgttcctcgcgctttctaccgcgctgcaggtcgttcatgcgttaacagagccgcaatatttccttcagccgcgccagctttttccggtctggccgcagtggcgtccggaactggcaatcgcgctgtttgcgtcaacgatggtgctgctgttcctgccgaagctgctcagtattatgctgatctggtgtaaaggcaccaaagagtatggtggtttctggcgcgttacgctgtcgctgttgctggaagtgctgttctccgtgttgctggcgccggtgcgtatgctgtttcataccgtgtttgtggtcagcgcgttcctcggctgggaagtggtctggaactcaccgcaacgcgacgatgattctacgccgtggggagaagcctttatgcatcacggctctcaactgctgctggggctggtctgggcggtgggtatggcgtggctggatttacgctttctgttctggctggcgccgattgtcttttcgctgattctgtcgccatttgtttcggtgatctccagtcgttcaacggtaggattacgcaccaaacgctggaagctgttcctgatcccggaagagtattcgccgcctcaggtgttggtcgataccgataaatatctggagatgaatcgccgccgtattctggacgatggctttatgcatgcggtatttaacccgtcgcttaatgcgctggcgaccgcgatggccactgcgcgtcaccgcgccagtaaggtgctggaaatagcccgcgatcgtcatgtggagcaggcgctaaacgaaacgccggagaaactgaaccgcgatcggcgtctggttttgctcagcgatccggtgacgatggcgcgtttacactatcgggtctggaatgcgccagagagatactcttcctgggtaaaccattatcagtctctcgtcctgaatccgcaggcgttgcagggacgaacatcgtcagcgggataa

SEQ ID NO: 373816 - DNA, 1209 bp, Salmonella enterica
atgtcgcgcgtctcgcaggcgaggaacctgggtaaatattttcttctcatcgataacatgttagtggtgctggtttttttcgtcgtcttcccgctcatctctattcgttttgtcgatcaaatggggtgggctgccgtaatggtagggatcgcgctcggcctgcgtcagtttattcaacaaggtctgggcatttttggcggcgccatcgccgatcgctttggcgcgaaaccgatgattgtcaccggtatgctgatgcgcgccgcaggctttgccaccatgggtatcgcgcatgagccctggctcttgtggttttcctgctttctttccggtctcggcggtacgcttttcgacccgccgcgttcagcgctggtggtcaaattaattcgtccggagcaacggggccgcttcttctctctgttgatgatgcaggacagcgcgggcgcggtgattggcgcgctgctgggaggctggttgctacaatacgattttcgcctggtctgcgcgacgggcgctattttgttcatattatgcgcccttttcaatgcatggctgcttccggcctggaagctatcaacggtcagaacgccggtgcgtgaaggaatgcgccgcgtcatgagcgataaaaggtttgtcacctacgtgctgacgctggcgggctactatatgctggcggtacaggtcatgttaatgctgccgattatggtaaacgatatcgccggttcgcctgctgccgtgaaatggatgtacgctattgaggcgtgtctctcgctgacgttgctctacccgattgcccgctggagcgaaaagcgttttcggctggagcatcggctgatggccggtttgctcgtcatgtcgctgagcatgatccccatcgggatggtgggcaatttacagcagctttttacgcttatttgcgctttctacatcggctcggttatcgccgaaccggcgcgcgaaacgctcagcgcgtcgctcgcggacgcgagggcgcggggaagctatatgggctttagccgtctgggattagccattggcggcgcgattggttatatcggcggcggctggttgtttgatatgggtaaagcgcttacgcagcctgaactaccgtggatgatgctcggtattatcggtttcatcacctttttggctttaggctggcaatttagtcataaacgcacgccgcgccggatgctggaacccggcgcctga

SEQ ID NO: 373817 - DNA, 798 bp, Salmonella enterica
atggccggttttgagtcggcgtatgtggcgctgtcgcgtatgaagcagcatgtgcaggtgtacaccgacgaccgtcagggctgggttaaggccatcaacagtgcggagcaaaagggcacggcccatgacgtgctggagcctaaatcagagcgtgagatgatgaacgcagagcgcctgttcagcaccgcccgggaactgcgggacgtggctgccggccgtgccgtgctgcgcaacgccggactggcgcagggagacagccgggcgcgttttattgcaccggggcgcaagtatccgcagccatatgtggcgctgccggcgtttgaccgtaacggtaaatccgccggtatctggctgaacccgctgacaacggatgacggtgccgggctgcggggattcaccggggaaggtcgggtgaaaggcagtgaagaggcgcagtttgtggccctgcagggcagtcgtaacggcgaaagcctgctggctggtagcatgcaggatggcgtccggattgcccgggagaaccccgacagcggcgtgctggtgctggtcatctgttaccggctgtaccggatcacagatactgaagaacatctggcgcttgcggcctgcctggtggtggccgtccccgcgctgaatctggtcaccagtgatgccgcggcggtggcaggacttctggtgaccgggctgacggtatggcttgtttcgctgacaggcaaatcacggccccggttctggccggctgattttttcccggtattctacacctgccatctggctgccctgggcgttctggcgatgtga

SEQ ID NO: 373818 - DNA, 177 bp, Salmonella enterica
atgaaacagaaagaataccggaccgtgtggataacgcgacacatgcgtgcgggcatgctggccgccgggctgctgcttcccctggtggccggggcggcggcgcttttcagtggtgggaatgggctggatatcaggtttttgcttcggtttcgttggtcaggattttggatgttgtaa

SEQ ID NO: 373819 - DNA, 519 bp, Salmonella enterica
atgaaaaagagcattattgcttccattattgcactgggtgttctgggcgggactgcacacgctgccaatgaagtgactttcctggggtcagtgagcgccacgacctgtgacctgaccacttctgtcaacggcgcagctcagccgaaccaggttgttcagctgggtaccgttcaggctaaccagacgggtaatgctgttgagttcgccatgaagccggctgacccgaccgcacaggcttgtggaaacctggctcagaaaacggccactatcacctgggcttctgctgccctggatggtaaaggcttcggggcaaccagcggtacagctgctgatgccaaggtactggttgacagcgtgaactccaaagcaccgggtgctgtaaatgctaacgccagttcagttgacttcgacggcgctaacctgaccaccgacggcctaaagttcactgcaaaactgaagggtggccagactgaaggtgacttcaaatctgtggcatctttcgcggtgacttacaagtaa

SEQ ID NO: 373820 - DNA, 231 bp, Salmonella enterica
atgaatatgacaaacatgccagctgaaccacttattttccagtcgggtacgcaaagcgcagggttagaactggttaatatttatttctggattttcaggcaatttatggaagagaaggaattaaccaagcctcttgcgcgccttgtttataccaatcttaagactgccagaacagacagcgtttccctgcagtcagttggaaaacgttttgaggcatcttttgaaaattaa

SEQ ID NO: 373821 - DNA, 480 bp, Salmonella enterica
atgcatttaatcccctgcgcctttctgtctgttctgatttttctggtagtcctgcttcactctcccgatattcttcagaactgtctgccagtggtcctctgcctgctgccggtagcgttcggcaacggcagcaataatgtcaggatcactgtcatggctgcggtgcatgcgtcccttctggccaaagatatcaacaataatattctggctgccctgcctgtcgaaaagatgagcgcacaggcgctttacaaccagcggagtatagtccagcccggcctcatcagcgatctggaagaagaagtacagcatctcatacgttttgtagcgcttgacggccgcactgagtctggctgcccgttgtggtgcttcccaggtgtcatccctttagttacacagttctgcctggtagtcggattccaggtcttcctctgtataccggtggtggcggaaaaagtattccctggcccgtttgacgactga

SEQ ID NO: 373822 - DNA, 141 bp, Salmonella enterica
atgtcctggcagaaactggtactgctgaactataccctaatgtgcctggctgacgcgccccttgggcttgtccaacccttcgcctgctcagatgcaagctctgaacagactcacggtttgcgctgtgggttaacaaaatga

SEQ ID NO: 373823 - DNA, 702 bp, Salmonella enterica
gtggatcagctttcagcatcacttaataatgctaagcagagttatgatcagtatacgacaaacctcacccgcagccatgaatatgctgaaatggcgtcccggactgaaagcatgagtggacagatgagtgaagatttgtcacagcagtttgtgaattatgtacagaaacatgcgcctaatgacgcagaatccatactgacgaacacaaattcccctgacgtggcggaaagacatcgggcaatggcctgggcattcgttcaggaacaagttcaacctggagtagatagtgcgtatagtggcgctaatgagaatattggtatgggaatgcctacaaactcgaatggtggtacccgtagcgatgtcgtgaacgattatactaccaattcaggtgtgatagatcaccatactcggacatcaggtataaggagtgatatcagtggtgaggtagataatatgatcgaccaaaaccaacagcgccatgatgctgataaaactcagatcaccaatcagtcaaatgacatcaaaaaccagaactctgagctggaaaaacagtataatttagaaaaaaataaacatgaaaaaatgtataatgagaaaatggagagtcaaggacatataccaggaggttattctaaagaggaattaaccaagatggcagaggatatgcagaaaaaacacaggggtggtaagggggattcatga

SEQ ID NO: 373824 - DNA, 243 bp, Salmonella enterica
atgataacaaatgaagtcataaaaaaagaaattgaagatttaagaaaaaatttgatattaaatgaattggaaataccatctttttttagttgtatatggcctgctatattttttgctctaattttcactggtgttcctttttttctgttttctaatgatatttatacggatgacattgacttaattgcagtaactgtttttggttgtttttttgagtgttgttttttttgcatcaatcggtaa

SEQ ID NO: 373825 - DNA, 210 bp, Salmonella enterica
gtgtggatatatctgattagttatgctgcgttatatgccatgctggccgtatatattagctctatttacttttcggttatatggtttatagccctctcaatgattcttatggtggtaatggccattataatgaatgttgactttggtcgatatcaattgtcagccctgacttcattaattgagtcatttaaaaataagaaaggtaactga

SEQ ID NO: 373826 - DNA, 732 bp, Salmonella enterica
atgaaaatgaaaaaaataatgatggttgcactggtcagttccactctggccctgtcagggtgtggtgcgatgagcacagcaatcaaaaagcgtaatcttgaagtgaaaacccagatgagccagaccatctggcttgacccgtccagtgaacggacggtgtatctgcaggtgaaaaacacctccgataaggatatgagtgacctgcagagcctgattgcaaaagatattcaggcaaaagggtatactgtggttacctcaccagacaaagcatactactggattcaggccaacgtgctgaaggccgacaagatggatttgcgtgagtcccagggatggctgaaccgtggttatgaaggtgcgctctccggggcagcgctcggggccggtatcacagcgtataactctaactcagcaggtgccacgctgggggtagggcttgctgccggactggcgggtatggctgccgatgcactggttgaggatgtcaactacaccatgattacggatgtgcagattgccgaacggacaaaagcgacggtcacaaccgataacgtggccgcacttcgccaaggaacctcgggtgctaaaatccagaccagcactgaaaccggtaatcagcataaataccagacccgtgtggtatcgaatgccaacaaggttaacctgaagtttgaagaggcgaagcctgttctggaagaacaactggccaaatcaattgcaaatattctttaa

SEQ ID NO: 373827 - DNA, 2190 bp, Salmonella enterica
atgagctttaatgcgaaggatatgacccagggcggtcagattgcgtccatgcgtattcgcatgttcagccagatcgccaacattatattttactgcctgtttattttcttctggatactcgtcggcctggtgttatgggtgaaactcagctggcagacgtttgtgaatgggtgtatctactggtggtgtaccacgcttgaaggaatgcgggatttaattaaatcccagcctatctatgagatccggtattacggccagacgttccggatgaacgccgcccaggttctgcaggacaaatacacggtctggtgtggggaacaactgtggtcggcctttgttctggccgcctgtgtggcgctggttatctgcctgattacattttttatggccacatggattctgggccgtcagggaaaacagcagagtgaggatgatgttaccggaggacgccagcttaccgacaatccgaaagacgttgccaggatgctgaaaaaagacggaaaagcgtccgatatcctgattggcgatttgccaatcattaaggattcagagattcagaactttttgctccacgggacagtcagtaccggtaagtctgaaatcatacgccggctggctaactatgcccgtcagcgcggcgacatggtggtgatgtacgatcgttcctatgagtttgtcaaaagctactacgacccgtccatcgataaaattctcaacccttgtgacgcgcggtgtgccgcatgggatttatggcgggaatgcctcaccctgccggattttgataatgcggcgaataccctgatcccgatgggcacgaaggaagatccgttctggcagggttccggacgaaccatttttgctgaagcggcatacctgatgcgtaatgacagctatcgcagctacagcaagctggttgacactctgctctcaatcaggattgaaaaactgcgaacctacctgcgtgattccccggcggccaacctggtggaagaaaaaatcgagaagacggccatttccatccgggctgtgctgaccaactacgtaaaagccgtccgctatcttcaggggatcgagcgtaacggtgaaccgttcaccatccgtgactggatgcgcggcgtccgggaggatcaaaaaaacggctggctgtttatttcttcaaacgctgacacacattcttccctgaagccggtgatttccatgtggctgtccattgccatccggggcctgctggcgatgggagagaaccgtaaccgtcgggtgtggttcttctgtgatgagttgcccacgctgcacaagctgcccgacctcgtggaaattgtcccggaagcccgtaaattcgggggctgctatgtctttggtattcagtccagtacacagatggaggatatctatggtgagaaagcggcggcaaccctgctggatgtgatgaacacaagggccttcttccgctcacccagttataaaattgccgactatgtcgcacatgagattggtgaaaaagagatcctgaaagccagtgagcagtattcctatggtgccgatcccgttcgtgacggggtgtcgaccggtaaagagatggagcgtgtcacactggtcagctactccgatattcagtcactgcccgacctgacctgttatgtcacgctgcccggaccctatccggcagtgaagctggccctgaaataccaggaacgtcccaaagtggcgccggagtttattccccgggaaatgaatccggaggcggaagcccgtctgagcgccgttctggctgcaagggaagccgagggacgtcagatgtccagcctgtttgaaccggatacagaagcggttgcgccgacagcagcagaagcgcaggctgaacagccgcaacagccgcaacagccgcaacagccgcaacagccacagcccacggttgtcagcgataaaaaatcagcagcggcgggtaccgccgtgaatacgcctgcaggcggtgtcggacaggaactgaaaatgaagccggaagacgaagagcagccactgccccccgggattaatgcgtccggtgaggtggtggacatggcggcgtatgagcgctggcagcaggagcaggaggtgaatactcagcagcagatgcaacggcgggaggaggtgaatatcaacgttcaccgtgggcacggaaaggatgaaccggagccgggagatgatttctga

SEQ ID NO: 373828 - DNA, 411 bp, Salmonella enterica
atgctgtttggatttacgcgtatccagcgccgccacatcccgggatttcagcgacgcgtcatcacctactgcttcccgtatagtctgcgaacgactggaaaaggcctccaccgggacaccgggcatctcccacataccgtgcttaccgaccacttccgtttcatagcccagcgcttcaaccttctctttcagcaccgcgcggtaaatcttcccgaaggctatctggttagcatagacattctcgataaatcccgtttttcccaccttatcgctgctcagggtcttccattccccgtcatgctgcgtgacgttggccaccacggcatgggtatgcagctgcggctcctggtcacgactggtgtcatggttgaacagcgccatcaccagattaccggtgagcaccgtttctga

SEQ ID NO: 373829 - DNA, 246 bp, Salmonella enterica
atgattctcccaggtggacagacggcgcagctccccgtcacggatattcgcggtggtaagtacagggacagtgacctgctgctcactcggtttagccagtgcatcctgaatcatactgttcagcacccgacgatcctcattcagatgcgtgacaatcagcgtctgctcccgggccatcatcgtaagttctgccacccgctcccgctgaccggcagcaccgccctgaccactgataatggccagtga

SEQ ID NO: 373830 - DNA, 1608 bp, Salmonella enterica
ttgaataatttaacgttgtcttcgttttcaaaagttggtgtgtcgaatgatgcccgactttatattgctaaggaaaatactgacaaggcatatgttgcgcctgaaaaactttcgtcaaaagtattaacctggcttggaaaaatgccgttatttaaaaacactgaagtggtgcaaaaacatacggaaaatatcagagtacaggaccaaaagattttacagacatttctccaggcactaacggaaaaatatggggaaacagcggttaatgacgcactgttaatgtcccgtataaatatgaacaaaccccttacccaacgtttagcagtgcagatcacggagtgtgtaaaagctgctgacgaagggtttataaaccttattaagagcaaggataatgttggtgtcaggaatgccgctttagtcataaaaggcggcgatacaaaagtggcagaaaaaaataacgatgttggagcagaaagtaagcaacctttactcgatatcgcgctaaagggacttaaaagaacattaccgcaactggaacaaatggatggaaatagcttgcgagaaaacttccaggagatggcttcaggtaacggcccgctgcgttcattaatgacgaatttacagaatttaaataaaattccagaggctaaacaacttaatgattatgttacaacgttaacaaatattcaggtcggtgtagcccggttctcacaatggggaacctgtggaggagaggttgagaggtgggttgataaagcctctactcatgaattaacccaggctgtaaaaaaaattcacgttattgctaaagaactgaaaaatgttacagctgaacttgagaaaatagaagccggcgcgccaatgccacagacgatgagcggaccgacactgggcctggcacggtttgcggtcagcagcattccaattaatcagcaaacccaggtgaaactgagcgatggaatgcctgtgccagtgaatacgttaacttttgacggtaagcctgtggcattagccggttcgtacccaaaaaatacgccggacgcgctggaagcgcatatgaaaatgcttcttgaaaaagaatgctcgtgcctggtggtgttaacgtcggaagatcagatgcaggcaaaacaattaccaccctatttcagagggagctacacctttggcgaggtgcataccaacagccaaaaagtgagctcagccagtcagggagaagcgatagaccaatacaatatgcaactgtcctgcggggaaaagcggtatacaatcccggtattgcatgtgaaaaattggccagatcaccagccgttaccgtctacggatcagttagaatacctggcggatagggtgaaaaatagtaaccaaaatggtgcgccggggcgtagttcatcagataagcatttaccgatgattcattgtttgggcggagtggggagaaccggaacgatggcggcggcccttgtacttaaggataatcctcatagtaatctggagcaggtacgtgcagatttccgggattcacggaacaatagaatgctggaagacgcctcacagtttgtacaactaaaagcaatgcaagcccagttgcttatgacgacggcacgctga

SEQ ID NO: 373831 - DNA, 477 bp, Salmonella enterica
atgacgtatcgcagtaaagtggcagtggtttacctgctcggcttctttcttgatctgattaatctgtttattgccagcgtggcttttcctgcgatgtccgtggatctgcatacgtccatatcggcgctggcatgggtgagtaatggttatatcgcaggattaacgctgatcgttccgtttagcgcgtttctttcacgttatctcggcgcacgacggctgatcatattttcgctcattctgtttagcgttgccgccgctgccgcaggttttgccgattccttacacagccttgttttctggcgtattgtgcagggggcgggcggtggcttattgatcccggttggtcaggcgttaacctggcaacagtttgaaccgcatgaacgcgctggcgtgtcatcggttgtcatgatggtggcgctactggcgccggcatgttcgcctgcgattggcgggctgctggtggaaacgtgcggctag

SEQ ID NO: 373832 - DNA, 765 bp, Salmonella enterica
gtggtgccgatcgtgctgatcttcctgaaggctatctgttccaccctcgccactgtagaaggatggtccggcctggcgacgcatccggtggtacaggcaatcaactttgtgggaagtccggtgatcgcgttggccatcagcgttctgctggcggtgtatacgctggtgccgcgcatggataaacataccaccgcagagcgtctggaagagggcttgcaaagcgccgggattatcttactggtcacgggcgctggcggcgcgttgggcgcgatcctgcgcgacagcggcgcgggacaacagctggcggagcaggttgccaacctgccgatctcgccgatcctgatcccgtttatcgtggcgacgctggtacgcctgattcagggatcggggacggtggcgatgatcactgccgcctcgatttccgcgccgatcctggcgcagatccccggcatcaatatgttgcttgccgctcaggccgcaacgatggggtcgctgttcttcggctacttcaacgatagcctgttctgggtggttaaccgcatgatgggcgtctctgatgtcaaacagcagatggtggtttggtctgtaccgacgaccattgcctgggcgattggcggcaccggcgtggcgctgattaacctgctgttcggttccggcggcagttggctcgatccgttactgccgatcgtcgttctggcggcaattatgctgtgggtgcgttggcaggcgcaggggatcaaagacaagctggtagttaaggattaa

SEQ ID NO: 373833 - DNA, 369 bp, Salmonella enterica
gtggcgaaagcgctggcgaaaagcggtaaacgttcgctactgacgctgggcgtcgcgctggcgggcgggctggtggtcactcaccatacggtacctccgacgcccggtccgctgggggtagccgggatttttaacgtcgacatcggcgcaatgttattgaccgggatagcgctggcggtgccctgtgtgatcggcattgtgttctatgcgcagtggctggataaacgctaccctgatttcgtgccgcgcacgctgaacgccgatgaagtcaatgccacgctggagcagtacaacaaagagaaagagcaaaaggatctgccgagcctgacgctctctctctgctgcctattgtggtgccgatcgtgctga

SEQ ID NO: 373834 - DNA, 1791 bp, Salmonella enterica
atgttatttacaaggaaagtcttacctgtattatgctgcctgtgtttgagcggcagcgttttggcctcaggcgttttagacccaaacaggccaatggtcgcatcagcagatgtcattccagtccatgaagggccattaggtatggtcgatgtcgccccctacggcggcgttttcccattaacagcaatcattaataaagccaatcataatgtacagaacgtgaaggttaccgttttagggaaaggggaaaaaggtatcccgatcagttatgatgtcggcccgcaggctataaatacccatgacggcatacctgtatttggcttgtatccagattatgtcaataaagttaaagttgactggactgaagaaggtaaaaaacaaacttatacgtggtccatttacgccgcaccggtatcattaccctctactaccgggcaaactgccgttcttcctacggtagaaccggttaaagtcgatagctcgcttaaaaatcgcttatatctttttaaccatataacggggatgccaagagccggccacattatgcatgtcgcaggcggcgcgacgaactgggattataccggtatcaactggattagcgatacgaatggcgatgttcgcggctatatgaatattgataaattccgtaaccaggatgatataacgcgctttggttccatgatgagcttccatcaggttaacgatggcaatcttatttttggccagggtcaacgttactttaaatatgatttcttaggccgcgttatttccgataaacgactgccaaaaggatttattgatttttcgcacgccattaccgaaacgccgaaaggcacctacctgctgcgtgtcgcaaaagaaaattatccattaaatggtaaatacaccatcaatactgtgcgtgatcatattcttgaagttgaccagaacggcgataccgtcgattactgggatctgccaaaaatcctcgccccctatcgtgacgacgttattctggcgatggatcagggagcggtatgtttgagcgtcgatgccgaacattccggtcaggtcatgaccaaagagcagcttgcaaaacaacccttcggcgatatcgcgggctccggcccgggccgcaactgggcgcatgttaactccgtcagctacgatcctcgcgacgacagcattatcattagctcgcgccaccagtctgccatcatcaaaattggccgcgataaaaaagtgaaatggatactttccgatccatccggctggaaaggcgaactggcgaaaaaagtgctgaaacccgtagacagcaacggtaaaccgctaacctgcgaagcgcaccactgcgacagtggatttgactggacatggacacaacataccggttggttagtgccatccaaaagcaccggaggtaaaaccgtcgtgaccgcctttgataacggcgatgcgcgcggcatggaacaaccggccatgccgtcaatgaaatattcccgcggcgtggaatatcagattgacgaaaaaaatatgacggtttcccaaatgtgggaatatggtaaagagcgcggttttgactggtacagcgccattacttccgtcacggaatatcgcccggaaaccaaaacgatgttcatgtactcggccacagcgggaatgagcggtacaaatccaatcgtttccgttctggatgaagtcaaagacggtactcaggatgtgatgctggagctaaaagtacacagtaaccgtgccggtatgctgggttatcgggcgctgattatcgatccagagcagatgtttaaaaaataa

SEQ ID NO: 373835 - DNA, 291 bp, Salmonella enterica
atggaaattactttaccgtcaatgtcagataaaaaatggacctgcgccgatctcctgagtagctatcgattctgggggatcacttttttctttttggtgctctcttttatcagttcgctgggatcgtcgtatggtgtttatttttggagtaaatcactgtctattccagccgatcgtattggtgttattctcgtttgcggccaactgggatacctcctgggtatggttgccagctggtttgtctgccgtataaaaaatgttaccccttctactttgttgcgctcctgttaa

SEQ ID NO: 373836 - DNA, 1557 bp, Salmonella enterica
atgaaagtaaaactgcttgctgccggtattttgttcacgctgccgttctgggcctgcgccaaagatgtcaccattatttacaccaacgatctacacgcccatgtggagccttataaagtgccgtggattgctgacggtaaacgcgatattggcggttgggccaatatcaccacgctggtgaagcaggaaaaagccaaaaataaggcgacgtggttttttgatgccggagattactttaccggaccgtatatcagcagcctgacgaagggtaaagcgattatcgatattttgaataccatgcagtatgacgctgccactatcggtaatcatgagttcgatcatggctgggacaatacattgttgcaactgagccgggcaaaattccctatcgtgcagggcaatattttttatgaggacagcagtaaatccttctgggataagccgtacaccattgttgaaaaagatggcgtcaagattggcgtaatcggcttacacggtgtctttgcttttaatgatacggtttctgccgcgacgcgcgtgggcattgaggcacgcgatgaaattaagtggctgcaacgttacattgatgaacttaaaggtaaagtcgatctgaccgtcgcgctgattcacgaaggcaccccggcccgccagtccagcatgggaaataccgatgtgcgacgcgcgctggataaagatattcagaccgcaagtcaggtaaaagggctggatattttgattaccggccacgcgcatgtcggtacgccggaaccgattaaagtcggtaatacgctgatcctctcaacggacagcggcggtattgatgtgggtaaactggtgctggattacaaagagaaaccacaccactttacggtgaagaacttcgagctgaagaccatttttgctgatgagtggaagcccgatccgcaaacgaaacaggtgatcgacggctggaacaaaaagctcgataaagtcgtgcagcaaacggtggcccagtcgccggtcgagttaacgcgcgcgtatggcgaatcgtcgtcgctggggaatctggcggcggatgcgctgctttttacggcggggaaagacacccagttagcgcttactaactctggcggtatccgcaacgaaatcccggctggcgcggtgacgatgggggcggtaatcagtaccttcccgttccctaatgaactggtcacgatggatttaaccggtaaacaattgcgcagcctgatggagcatggcgctggattaagcaacggcgtattgcaggtgtctaaagggctggagatgaagtatgacagcagcaaacctgtcggccagcgggttaccgtgctgacgctcaatggcaagccgattgacgatgctacggtttatcacatcgctaccaacagcttccttgccgacggcggtgatggttttgcggcattcacggaaggccaggcgcggaatacctccggcggctactatgtgtcgaatgcgatagttgattactttaaggcgggcaacaccatcacggatgagcagctcaaaggaatgcgcgttgcggatgtgaagaagtaa

SEQ ID NO: 373837 - DNA, 3114 bp, Salmonella enterica
atggcaaacttttttattagacgtcctattttcgcctgggttctggccattatcctgatgatggctggcgcactggcaataatgcagcttcccgttgcgcagtatccaaccattgcgccgccagcggtttctatttctgcaacctatcctggcgcggatgcgcagacggtacaggatacggttactcaggttatcgaacaaaatatgaacggtatcgataacctgatgtatatgtcctctaccagcgactctgctggtagcgtgaccatcaccctgaccttccagtccggaaccgatccggatatcgcgcaggttcaggtgcaaaataaattgcagctcgccacgcctttactgccgcaagaagtccagcagcaggggattagcgttgaaaagtccagcagcagctttttgatggtcgccgggttcgtctcggataatccgaacactacccaggacgacatctctgactatgtcgcctctaacattaaggattctatcagccgtctgaatggtgtgggcgacgttcagctatttggcgcacagtacgccatgcgtatctggctggatgcgaatctgctaaataaataccagctcacgccagttgacgtcatcaaccagttaaaagtacagaacgaccagattgcggcaggccaactgggcggcacgccagcattaccgggccagcagcttaacgcctcaatcatcgcccaaacgcgtctgaaagatccggaagagttcggcaaagttacgttgcgcgtcaataccgacggctctgtcgttcatctcaaagatgtcgcgcgtattgagcttggcggtgaaaactataacgttgtagcgcgcattaacggtaaaccggcctccggtctcggtattaaactggcgaccggcgctaacgcgctggataccgcaaccgcaatcaaagcgaaactggcggaactgcagcctttcttcccccagggaatgaaggtggtttatccttatgacacaacgcccttcgtaaaaatatctatccacgaagtggtaaaaacgctgtttgaagcgattattctggtgttcctggtaatgtatctgttcttacagaatatccgggcaaccctgattcctaccatcgctgttcctgtcgtgttgctaggcacttttgcggtactcgccgcctttggctactctatcaataccctgacgatgttcggcatggtactggcgatagggctgttggttgacgatgcgatagtggtcgtagaaaacgttgaacgtgtaatgatggaggataacctttctccccgagaggcgacggaaaaatccatgtcgcagattcagggagcgctggttggtatcgcgatggtactgtctgcggtatttatcccgatggccttttttggcggctcgaccagggcaatttatcgccagttctctattactattgtttcagcaatggcgctatccgttctggttgcgttgattctgacgccagcgctatgcgctacactgcttaaacccgtatctgctgaacatcacgagaaaaaaagcggcttctttggctggttcaataccaggtttgaccacagcgttaaccactatactaacagcgtaagcggcatcgtgcgtaatacgggtcgctatctcattatctatctacttattgtagtcggaatggcggttctgtttttacgcctcccgacctccttcctgccggaagaagatcagggggtattcctgaccatgattcagctcccctctggcgctacgcaagaacgtacgcagaaagtgctggatcaagtcactcattactacctgaataatgaaaaagcgaacgtcgaaagcgtgtttaccgtaaacggctttagctttagcggtcagggacaaaactcagggatggcatttgttagccttaaaccctgggaagagcgtaacggtgaagaaaatagcgtcgaagccgttatcgccagagcgacacgcgcctttagccagattcgcgacgggttggtgttccccttcaacatgccggcaattgtcgagttaggtaccgcgacaggtttcgactttgaactgattgatcagggaggactcggtcacgatgcgttaacaaaagcgcgtaatcaactcctgggtatggtcgcgaagcatcctgatctattagtgcgcgtacgcccgaacgggctggaagacacgccacagttcaagctggatgtcgatcaagaaaaagcgcaggcgctcggtatttcgctgtctgatatcaacgaaaccatctccgcggcgttgggcggctattacgttaacgactttatcgatcgcggacgagtgaaaaaagtatacgttcaggctgacgctcagttccgtatgctgccgggagatatcaacaatctttatgtacgcagcgccaatggcgagatggtgcccttctctacctttagctcagcacggtggatttatggttcgccacgcctggaacgctataacgggatgccgtcaatggaactgctcggcgaagcagcacccggacgaagcaccggtgaagccatgtcgttaatggaaaacctggcttcacagctaccaaacggtattggctatgactggacaggtatgtcgtatcaggaacggttgtcaggtaaccaggagccggcgctgtacgcaatctcactcattgtcgttttcctctgccttgccgctctgtatgaaagctggtcaattccgttctcggtaatgctggtcgtaccgctcggcgtggttggcgctctgcttgcagcgtcattgcgcggcctgaataatgacgtttacttccaggttggcttgttaaccacgattggcctttctgctaaaaacgccatcctgattgttgagttcgccaaagatctcatggaaaaagaaggacgtggattgattgaagcgacgctggaagcatcccgtatgcgtttacgtcctattctaatgacctcgctggcctttattctcggggtaatgccgttagttatcagtcgtggcgcaggtagtggggcacagaacgcagtaggcacaggggttatggggggaatgttaaccgcaaccttattagctatcttcttcgtgccagtattcttcgttgttgtaaaacgccgatttaatcgccatcatgattaa

SEQ ID NO: 373838 - DNA, 1056 bp, Salmonella enterica
atgacgaaacatgccaggttttcactcctgccctcattcatcatattctctgctgcgctgctggccggttgtaatgaccagggagatacccaggctcatgccggcgagccgcaagtcaccgtccatgtggtcgaaacagcgccgctagccgtaacgaccgaacttcccggacgtacgtccgcatttcgcattgcggaggttcgcccccaggtgagcgggatcgtgcttaaaagaaacttcaccgaaggtagcgatgtagaggccgggcagtcgctctatcagatcgatcctgccacttatcaggctgattatgacagcgctaaaggcgaacttgctaaaagcgaagcggctgcggctatcgcgcacctgacggtcaaacgctatgttccactggtcggcacaaaatatatcagccaacaggaatatgatcaggcgattgccgacgcccgccaggccgatgccgccgttgtggcggcaaaagccgctgttgaaagcgcgcgtattaaccttgcgtataccaaagtcacctcacccatcagcgggcgtataggaaaatctaatgtgactgaaggcgcgctggtgactaatggtcagtcaactgaactggctaccgtgcaacaactcgacccgatttatgtcgacgtgacgcaatcaagcaacgactttatgcgactcaagcaatccgtcgaacaaggtaacctgcataaagacagcgccagtagcacggttcaactggtaatggaaaatggtcaggtctacccgattaaaggcacgctgcaattttccgacgttaccgtagatgaaagcaccggctctatcacgctcagggcggttttccctaacccgcaacatagtctgcttcccggtatgtttgttcgcgcccgcattgatgaaggcgtccagcccaatgccatccttgtcccccagcagggcgtgacccgcacgccgcgcggcgacgcaatggtgatggtggttaacgataaagccaggtcgaagcccgcaatgtcgtggcggcgcaggctattggcgataaatggctcatcagcgaagggttaa

SEQ ID NO: 373839 - DNA, 438 bp, Salmonella enterica
atgatcgtgcgcggtacgccgccggcgaccttgcgcggtgtgttgacgttatcaacctgcagcaatgtttgtctgttgaccgattaccccttttccgtgacgcccactgtgcagaatgccgattttgcccatgactatgcgcgggcgatgggtaaaattccgctccgcagtggactaacggactcgcttgacgtcggctatcgcccgggagaactggtggtcactgctacgcgagcggcgggctggtcatcgcccgggctctatcttgacaccatagatgacgtcgattttgcgaagcctcgcctgcgcgtagagggcgacaggttacaggcgacggtgccggtgacggacagttggggcgaaaaggcgcccgatttgcgcaacaaatcgctgaccctcgtgttagccgatggcgctatcgcccaggagagcacgtaa

SEQ ID NO: 373840 - DNA, 624 bp, Salmonella enterica
atgaaatacatgattgttttactgctggcgctgttttcaacgctgagcatcgcgcaagaaaccgccccttttacgccggatcaggaaaagcagattgaaaatctgatccatgcggcgttgtttaacgatcctgccagcccgcggataggcgctaaacaccctaagctgacgctggtgaactttacggattacaactgcccgtactgcaaacagctcgatccgatgctggaaaagattgtgcagaaatatcctgacgttgcggtcattattaaaccgatgccatttaaaggagagagttccatactggcggcgcgtattgcgctgaccacctggcgcgagcatccgcaacagttcctcgcgctacatgaaaaactcatgcaaaagcgcggttaccatacggatgacagtattaaacaggcccagcagaaagcaggggctacgccagtgactctggatgaaaaaagcatggaaacgatacgcactaatttgcagttggcaaggctggtcggcgtgcaaggaacgccagcgacgatcattggcgacgagctgattccgggcgcagtgccctgggatacgctggaagcggtggtgaaagaaaaactggcggctgccaatggcgggtaa

SEQ ID NO: 373841 - DNA, 1194 bp, Salmonella enterica
atgaacagaaaagttctggcactgcttgtcccggcgttattagtggcaggcgcagcaaatgcggctgaaatttataataaaaatggcaacaaactcgacctgtacggcaaagttgatggtctgcgttacttctctgacaatgcaggcgacgatggcgaccagtcctacgcccgtattggctttaaaggcgaaacgcagatcaacgatatgctgaccggctatggtcagtgggaatacaacattaaggtgaacaccaccgaaggcgaaggtgcaaactcctggactcgtctgggctttgccggtctgaaattcggcgagtacggctctttcgattatggccgtaactatggtgttatctacgacattgaagcctggaccgatgcgctgccggaattcggcggtgatacttatacccagaccgatgtctatatgctgggcagaaccaacggcgttgccacctaccgtaataccgacttcttcggtctggtggaaggcctgaacttcgcgttgcagtaccagggtaataacgaagatcctggcgcaggcgaaggaacagccaacggcagcgatgcaaatagtggttctcgcaaactggcccgtgaaaacggcgacggtttcggtatgtctgcctcctacgactttgacttcgggttaagcctgggtgcggcctactcttcctctgaccgtacggacaatcaggttgctcgtggttatggcgacggcatgaatgagcgcaacaactatgccggcggtgaaactgccgaagcctggaccgtaggtgccaaatatgacgcctacaatgtttacctggcggcgatgtacgctgaaacccgcaacatgacctattatggcggcggcaatggcgaaggtaatggcggtattgctaacaaaacccagaactttgaagtggttgcgcagtaccagttcgatttcggtctgcgtccatccatcgcctacttgcagtctaagggcaaagatttaggcggtcaggaagtccatcgtggcaactggcattacaccgacaaagatctggttaaatatgttgacgtcggtatgacttactacttcaacaaaaatatgtccacctacgttgattataaaatcaacctgctggacgaagatgatgacttctacgcaagcaacggtattgcaaccgatgatatcgtaggtgttggtctggtctaccagttctaa

SEQ ID NO: 373842 - DNA, 1269 bp, Salmonella enterica
atgttcgcgctctgcgatgttaatagcttttacgcctcctgcgaaacggtctttcgtcctgatttatgtggccgaccagtggtggtgttatcaaacaatgatggctgcgttatcgcgtgtagcgccgaggcgaaacagctcggtatcgcaccaggtgagccatacttcaaacagaaagaacgcttccggcgatccggcgttgtttgcttcagcagtaattacgagctttacgctgatatgtcgaaccgggtaatgaccacactcgaggagatggtgccgcgggtagaaatttacagcattgatgaggctttttgtgatctgacgggggtacgaaactgcctggatctgacagatttcgggcgcgagataagagcgacggtcctgaagcgcacgcacctgactgtcggtgtaggcattgcccagacgaaaacccttgccaagctggctaaccatgctgcgaaaaagtggcagcgccagaccgacggggtggttgacttgtcgaacatcgatcgccagcgtcggctgctggccctgatacccgtagaggatgtctggggtgtcggcaggcgcatcagtaagaagctaaatgccctgggcatcaagactgctctcgatctctctgaacaaagtacctggatcatcaggaaacacttcaatgtcgtgctggagcgtaccgtgagagagctttgcggagagccatgtctggagcttgaagagtttgcgccggcaaagcaggaaatcgtttgtagccgctctttcggcgagcgggtcacagactatgaggaaatgcgccaggctgtttacagctacgctgcgcgcgcggcagaaaaactccgcggcgagcaccagtactgccgtttcatctcaacattcgtcaaaacatccccctttgccctgaacgagccctactacggtaacagcgccgcagtgacgcttctcacccccacgcaggattcacgcgacattatcaatgcggctgtgaaatgcctggataaaatctggcgcgacggccatcgctaccagaaagcgggggtgatgctgggtgacttcttcagtcagggcgtagcgcaactcaaccttttcgacgataacgcgccgcgcgccggtagtgcgaagttgatggaagtactggaccatcttaacgcaaaagacgggaaggggacgctgtacttcgccgggcaggggatgtcgcaacagtgggctatgaagcgagaaatgctttcgcctcggtacaccacaagatactctgatctactgcgtgttaagtaa

SEQ ID NO: 373843 - DNA, 633 bp, Salmonella enterica
atgcattatatccagcagccccaaaccattgaggccaacagtttcaccattattagcgacattattcgcgaaacgcgtcctgattaccgtttcgccagtccgctccatgaggccattatcaagcgggttattcataccaccgccgatttcgactggctggacattttgtggttctctgccgatgcgctggaacagctttgtgatgcgttacgccatccgtgcattatttataccgataccacgatggcgctgtccggcattaataaaagattactggcgacgtttggcggcgagtgtcgctgttatatcagcgagccgcgcgtggtgcgcgccgcaaaaacgcaggggattacccgttcaatggccgccgtcgatatcgctatcgccgaggaggagaaaaacaagctctttgttttcggtaatgcgccgacggccctgttccgtttgcttgaacataacgtgacggtgagcggcgtggtgggcgtaccggtaggctttgtcggcgcggcggagtccaaagaggcactcacccatagccatttccccgcggttgccgcgttagggcgtaaaggcggcagtaacgtggctgccgctatcgtcaatgcgctgctctatcacctccgggaggcctga

SEQ ID NO: 373844 - DNA, 795 bp, Salmonella enterica
atgaatgattctctaaaggcgcaatgtggtgcggaatttttaggcaccggactctttttgttttttggtatcggttgtttgagcgcgctcaaagtcgcaggcgccagcctcggattatgggagatttgcattatttgggggcttggaatttcactggccgtttaccttactgccggaatctccggcggacatcttaaccctgcggtgacgattgcgctgtggctgtttgcctgcttccccaaacagaaagtattgccttatattattgcccagtttgccggcgcttttggcggcgctctgctggcgtatgtgctttatagtagcctttttactgaatttgagactgcgcatcatatggtgcgcggtagcgtcgaaagtttgcaattagccagcattttcagtacctatccggccgcagcgctaaatgtatggcaggctgcgttggtggaagtggtcattacgtcgattctgatgggcatgatcatggcattgacggatgatggcaatggcattcctaaagggccgcttgcgcctttgcttattgggatactggttgccgttatcggcgcgtctactggaccccttaccggttttgcaatgaacccggcgcgtgatttcggtcccaaactgttcacatggttagcggggtgggggaacatggcgatgagcggtgggcgagagatcccttattttatcgtgccgattgtcgcgcctgttatcggcgcctgtgccggagcagccatatatcgctattttattggtaagaatttaccttgtaaccgctgtgaactgtaa

SEQ ID NO: 373845 - DNA, 918 bp, Salmonella enterica
atgaaaaaatggcgcgttatgaatcgtgaagcaatttgcttacagttggcggataaaattaatcatttaaaaaataatgataaaataatcagcgagcggctggcgggcattcgtctgttgtatggtgttgaaccggggccgtgcacgccggtcatgtatcagcctggcatcatatttctcttttccggccataaaattggctatattaacaagcgcaagtttcgttatgacgctaatgaatatctcttactgaccgtgccgctcccttttgaatgcgagacctgggcgacgccggaggtaccgctggccggtattcggctcgatattgatgtgctgcaactgcaagagttgctcatggacattggcgaagatgagcgtttccagttgccgatggcggccagtgggattaactccgccacgctgtcggacgagattttatgtgcggtggaaagattgctggatgtgatggagcgcccgctggatgagcggattctgggaaaacagattattcgcgaaattctttatcatgtgctgatggggccgcgcggcggggcgctgcttgcgctggttagtcgccagacgcactttagcctgatcagtcgcgtacttaaacagatcgaaatgaaatacaccgagaacctgaatgttgagcaactggcggcagaagcgaacatgagcgtatcggcgtttcaccataattttaaggcggtcaccagcacctcgccgttgcagtatttaaaaagctaccgactgcataaagcgcggatgatgatgattcacgacggtatgaaggccagcgccgcggcgatgcgggtcggctatgagagcgcatcgcagtttagccgggagtttaaacgttattttggcgttacgccgggcgaagatgcggcaagaatgcggacaatgcaagggagctaa

SEQ ID NO: 373846 - DNA, 645 bp, Salmonella enterica
atgggcagtatgacgcgcggcgagtggctgatgctggcgaccgtcggcgtgttgctggtgctatggatttttggcagctcgctcggcgtggatgccacgacggcctcttttgtcggtctctcgattttattactgagcggcgtgctcacctgggaagatgttaaaagcgaaaaaggcgcctgggatacgttgatttggtttgccgcgctgctgatgatggctaaccagttgaagaaactaggattcaccagctggtttggcaacctgattggcgacagcatcggcagtacgatgcatggaaccagttggataatcatcctgctgctgcttaacgcagcctatttttatacccactattttttcgccagcggcaacgcgcaaatcgccgcgctgtatgcggtgtttctgggtgtcggtctgcatctgaatataccggcagcgccgatggcgcttatgctggcgtttaccagcagcctgtactgctctcttacacagtatacccacgcacgcggccccattctttttggcgccggctatgtaccgacgggcgtctggtggcgaacgggatttattatcagtctctttaatcaggcggtctttttgacagtcggcctcgcatggtggaaagtgttagggttgtattaa

SEQ ID NO: 373847 - DNA, 735 bp, Salmonella enterica
atggacagcagtaaacggcaatttctccagcagcttggcgtcctgaccgctggcgcctcgctggttccgctggctgaagcgaaatttcctttttcgccggagcggcatgaaggctctccccgacaccgttacgccatgcttattgacctgcggcgttgtatcggctgtcagtcctgtaccgtaagttgcactattgaaaaccaaacgccgcaaggcgcgtttcgtacgacggtgaaccaataccaggtccagcgtgaaggtagtcaggaagtcacgaatgtgctgttgccgcgtctgtgcaaccattgcgataaccccccctgtgtgccggtctgcccggtacaagccacctttcagcgggaagatggcattgtggtggtggataacaaacgctgcgtcggctgcgcctattgtgtacaggcgtgtccttacgacgcccgatttatcaatcatgaaacgcaaactgccgataaatgcacgttttgcgtccatcgtctggaagccgggctgttacccgcttgcgtagagtcctgcgtcggcggcgcgcgtattattggcgatatcaaagatccccatagccgcatcgccaccatgcttcatcagcatcgcgacgctatcaaggtattaaagccggaaaacggcacgtcgccccatgttttctacctgggtctggacgacgcctttgtcaccccattaatgggccgtgcgcagcccgcgctttggcaggaggtctga

SEQ ID NO: 373848 - DNA, 894 bp, Salmonella enterica
atgaatgatacttatctctatggcaaaatgttttctgaaaacatattgacaagctatcggatttatggagacagaaaatcattactcacgccgctcattatccttcatggcggcccttctggcggctttgattatttattaaattatcgccgtctggctgatgacgggcgcatggtaatattttacgatcaatatggctgcggtcgttcaacgcattttcctcatgctgacgcgtctttctggactattgcgcgttatctccgtcaattaacccaattaattcatcacctgggtattggacacgggtattcgatactgggacattcctggggcggaatgcttgccgcagagcacgcctgcttacagcctgccgggcttcgcgggacgatactggccagttcgccggccagtatcgccctgtggcaacaggaagccatacggctctttaacgctctgacgccaatgtccgatgacgatatcaaaaacgtcattatgcccgccgtcatttatcaaaacccaccggaacagctggtcgcttattatgccagacacgtttataccctcgcggaagaagccgttcatgttcagcgctctaatgcgcagttcgccgccgaccctacgggttatcacattttatggggaaccaatgaactggcggcaaatggcaaacttgccgactgggatattacgccccatttgtgccagatacgctgtcctgttctggtactacgcggcgaaaacgatcaggcaaccgagcgcgtcgtctctccgcttctctctcacatttcagactgccgcgcggtcactattcccggcagcagccataacccgcatgaagaaaatatcgcgccctgcctcgcagcggtaagcgcgtttttacgcgatctggcataa

SEQ ID NO: 373849 - DNA, 306 bp, Salmonella enterica
atggcgcacatcgtgcgccattttttttacccacataaccacacaaagtataatgttattgttatgaaccgtactaaccagctgatcttaggtgcagtagttctgggttccacgttactggcaggttgttcaagcaacgctaaaatcgatcagttgtcttccgatgtacagacgctgagcgctaaagttgagcaactgagtaatgacgtaaatgcaatgcgttccgacgttcaggctgctaaagacgacgcagctcgcgcgaaccagcgtctggacaacaaagtagtatcccacgtccgtaagtaa

SEQ ID NO: 373850 - DNA, 240 bp, Salmonella enterica
atgacccgtactaacaagctgatcttaggtgcagcagttctgggttccacgttactgacaggttgttccagcaacgctaaaatcgatcagttgtcttccgatgtacagacgctgagcgctaaagttgagcaactgagtaatgacgtaaatgcaatgcgttccgacgttcaggctgctaaagacgatgctgctcgcgcgaaccaacgtctggacaacaaagtattccgcatctgtaaataa

SEQ ID NO: 373851 - DNA, 1002 bp, Salmonella enterica
atgaaacgtgcgtctttcattacgctaactattatcggcgcgtatagcgcgttacaggcagcctgggcggttgattatccattaccgcccgaaggcagtcgtcttattggtcagaatcaaacctataccgtacaggaaggtgataaaaacctgcaggctatcgcccggcgttttgatacggcggcgatgctcattcttgaagcgaacaatacgattgcgctggtgcctaagcccggtacgctaattaccattccctcgcagatgctattgccggatgcgcccagggaaggcgttatcgtcaacctcgcggagctacggttgtattattacccgccgggagaaaaccgcgttcaggtgtatcccatcggcatcggtttgcaggggctggaaactcccgtcatggacacccggatagggcaaaagatccccaacccgacgtggacgccgacggcgggcatacgccaacgttcgcttgagcgggggatcacgctgccaccggtgatccctgccgggccaaataacccgctgggacgctatgcgctgcgtctggcgcacggtaatggggaatatctcattcatggcaccagcgcgccggatagcgtgggtctgcgcgtgagttccggttgcattcgcatgaacgcgccggacatcaaggcgttatttgcgcaggtcagaacggggacgccggtaaaagtgattaaccagccggtgaaattctctgtcgagccgaatggcattcgttatgtagaggtacacaggccgctatcgccggaagaagagcaaaacgtgcagacaatgccctatgtgttgcctgcggaatttaccgcgttcagaaacgcacaaggggtggatagtcgcctggtcgataaggcgctataccggcgagccgggtatccagtcagcgtgagcgccgggcagacgccagcggtaaatacgaccgcagtcgaatccgctcagaacggttttgtcggggaagaggggcaaacgcgcgcgacgcagtag

SEQ ID NO: 373852 - DNA, 1272 bp, Salmonella enterica
atggctggcttaccgaacagcagtaaagcgctacagcaatggcaacatctctttgaagaaaaaggaaaaagtcgaactgagcaggcaagacaacatttacaacagatgttacgtctgggattgccgacgcgtaaacatgaagactggaaatacacgccgctggagggcttaacccatagccagtttatccagcagtgtgcgactatcagcgccgcacagcgtgatgcgttggcgctgcaaatcgatgccgtgcggctggtgtttgtcgatggtcggtttatgccagagctcagtgatagcacgcaaaacagcggatttgacgttagcgtcagggatgagcgccagacgcttgccgcgccggtacatcccgaggtttttctgcatctgacggaaagcctggcgcaatgtgtcacgtatatacaggtacggcgaaatcagcgtccgaccaggccgctactgttaatgcatatcacgcagggcgtggatggcgacgagctgaacaccgcgcattatcgccaccatctggcgctggcggaaggcgcggaagcgacggttattgagcattatgtcagccttacagcggcaaaacattttaccggcgcgcgtctgacgatgaacgttgcagacaatgcgcaactgcgtcatatcaaactggcgtttgaaaatgcgtccagctatcactttgcgcataacgatcttctgctggcgacagacgcctcggcgtttagccacagttttctgctgggcgccgcagtactacgtcaccacagcagctcacaactgaatggtgaaaacgcgacgcttcgactgaatagtctggcgatgccggtgaaaaatgaagtctgcgatacgcggacatggctggaacataacaaaggctactgtaacagccgccagttgcacaagaccatcgtcagcgacaaaggacgcgcggtctttaatggcctgattaacgtggcgcaacacgccattaaaaccgacggccagatgaccaataataacctgttgttggggaaactggccgaagtcgataccaaaccgcaattagagatctatgccgatgacgtgaagtgcagccacggcgcgacgatcgggcgtattgacgatgagcagatgttttatctgcaatcacgcggcatcaggcagcaggaggcgcggcacatgattctttacgcgtttgccgcagagttaacggaagctatctatgatagcgcccttaaacagcaggtgctggcgcgaatcggccagcgactgcccggaggcctggtatga

SEQ ID NO: 373853 - DNA, 1347 bp, Salmonella enterica
atggttgttacgctcgcgtatatcgcactttttttggttttctcgtgggtcatcttgagaattaatcaaaaaagcgattccctgtcgaaaagcgtttttatcgctatctttttaggggctgttattggtttatccctgcattttatttcagcaaatcacactaaaactattatcgaatggtacagcatcgtcggcaatggttacgtccacctgctaaaactggtcgctataccgctaattattatttctattctttccgccatcaataaactggaaaatagcgccggcatcggaaaaatgtcgctgacgatcgtcggatgcatgttatgtctggtgatggttgccggttttatcggattactgaccgctcatatactggggcttgacgccagcgcttttgtgcacatgccgtcaatgttaactacagaagaagtcaataagactgccgcggtgtcgattccccagttagtgacatcgctgatcccgactaatatttttcttgatcttacaggagccagaagtgtttccgttatcggcatcgttatcttcacgctaatagcggggatcgctctgttaaaggtcaaaaaagaggcgccggaagaaggtcagaaattaagcgcaggcattaacgctattcagatctgggtcatgaagatggtacgtatcgttattgcattaacgccctatggcgtcatggcattaatgactaccgtattttcatcataccgccttgaacaattcgccagcttacttggttttatcggcgcctgttacatcgcgattttcatgatgtttatcgtgcacgccatcttgctgatcctcagcggtaataatccagcgcgttatttcagaatggtgtggcccgtcttaacctttgcgtttgtttcccgcagcagcgcagcctctattccgctggccatttccgcccaggaaaaatttggcgtacaaagcaccattgccaatatttccgcctcgtttggctccagtatggggcaaaatggctgcgccgggatttatccggctattatggtagcgatgattgcacccaccatcggcatcgatccgctctcgctgcattttctggccgcgatgttgcctgccattgcgctagggtctattggcgtagccggcgtcggcggcggtggtacgttcgcggcgctgattgtcctgtcgacgttgaattttcccgttgcgctggtcggtatttttattgccatcgaacctatcgttgatatggcccgcacggcactgaacgttaacggatcgatgatgtcaggtgtgctggctaaccgtattttgaataatcatacggctgacgacatgccggcggttattgacagaccttag

SEQ ID NO: 373854 - DNA, 198 bp, Salmonella enterica
atgaaatatatctacagtggcccggcaagcggcgtcacgctcgccgacggtcaggaagtcttactgtggcccaatagcgaaatctcgctgccggaagataacgagtgggtaatcaccatgattgcccgccgtcacctggtgccagtggttacgcaagaagtagaaactaatgaagaggaaattgtccatggcagctaa

SEQ ID NO: 373855 - DNA, 129 bp, Salmonella enterica
atggcgctgctggcgaggtggtttcgctttccgcccagtgaaattgacgcgctgtcggttgacgattttacccgctggctggacgaagccagcgcgcaaattaaacacgaatacgactcgcaggcttaa

SEQ ID NO: 373856 - DNA, 636 bp, Salmonella enterica
ttggccaacgacattattactcagcttcaggcgcgtaatgagacgttgacgcaggcaatagcccgttacggctcactcaacgccagcacgctgcacacgctcagctttgagcaaacaaaaatcacccggcttacgcaacagctcgctaactctgcccttggccgggaagagaacgataaacagcgcgtcgggttgctggaaaaaacacaaacgttcgccggacagctcggcaagctcctgaacattgagactcccgactggaagctgccttacgaatttcagggcaacatggtcgatatggcggcgaaaggcggcatggataacaccgcgcgggacgccctgagcctgaatatccgcgactggagccttgatttcaaccaggatcaaaaagatctgcaaagcgccgccgccacgatgatcgaaggcggcgtcagcgcattgcaggatcttagccgctacatgcccgatatcgccaaagccgcgaccgcctcccgcgacagcgcgcaaagctgggcgcaggcggctctggccactcgcgacaaactgaacatcgcccctgacgacttccgttttgcgcaaaatatgctgtacagcgtggcaaaaagcggcggcggctccgttgcagaacaaacctag

SEQ ID NO: 373857 - DNA, 954 bp, Salmonella enterica
atgtatgccgtattaggcgaaatagaatttgacgtcgtcgcttactgggacgaatttgaaagcacgatgggcgtggattataccagccatgcccgtattgaagggaaaccgggcgtgcaatttatcggcgataagctggacaaaatcaccctgaaattcaactttcatagtcagtattgccagccgaccaccgagctgaaccgtctgcgggaagccatgaccgcgcaccaggcgatggcgctggtgttcggcaacggcgattatcgcggctggttcgtgattaccgatctgaccgctacccaccaacacaccgatccttacggtaacgtcattgcccagggcggcactctgtcgctacaggagtacaccggcgatccgaagagcccgttgctgcctccggccatcaccacccaggaaccgaacattgacgagatgttggatgagcttcccgacgttagcgattcctggttcgatgaactgatgagcgccgttgaagagggtatgcgtgaagccaaagagatgatggatgaggtggccgacgccattgatgacatcaaaaaaacgatcgcccaggcgaaagagctggtgaaggaagccaaagcgctgaaagaaaaatgtggcgatatcgtcgattcgctgaaaaaaaccatgagttcgatagacgcgctgttccagcagccgctggatttgcaaacgctggccgggctgccgaaagcgctggcggcaaaaatgcaggaactgatcgacagcctgccggggatccgcgaatgcgcgggcgatgctggcacgcttatcgaacacgccgaatcgctgtttgacgctatcaccagcagcgtcgcggaagcgacttacgacagcgccgcgacgctggtcaatcaggcgcgcggcacgctgcaaacaagcgcccctgacgtgagccagcttgccgccgccgatattacgaggagtctgtaa

SEQ ID NO: 373858 - DNA, 351 bp, Salmonella enterica
atgattactatgctcaagatattaccgaaaacggcgatgatactactggcttttttggccatttttcttattgaatggtatacccccattcactctgatgattaccgctattaccttttaggaatttcgccggaatcacattttcatcattatatgacatggagtggcaggattatagctgattacaccagcgcactcatcctgtatacacgttctcaactcgtgtattccatcagcgctgccgtttcgacactggtattttgttatttcattgtgaagacaccctcaggtacattacgctggaataaatccgactacttattattcccactaatattcttcacttactga

SEQ ID NO: 373859 - DNA, 2379 bp, Salmonella enterica
atggtgctcgaaagatcagtagttcaaaatggggtgataagaatgaatatggaagaagatcgaaagaaggctgtagcttctttattgaaggatatggaatccattgctgaccgaatgcgtgagttgattgtcaaaatgcctccgcatgatttgctcgggtacatctacgctcagcacatgatgaaaaaaatgggaaaccaaattgggggcgaaaagcaaggccaagagggtagcccagctgacgtagttaatgaaacccagttcttactggagtatgttcacgcggttctggcatctgaggccgcacctgcggatatggaattcgacgaagcactgtgcgctgagctgtttgaacgtagccgaaaactgagagagctggccatgttctttgctatggccacctctgctgataccaaagatggcatcttcggtcctaatacggccgacattgaattccgtgcgaaatccacttgggtcatgatacgcgggaatcgttatcaagttttggagggcgagttctatcgctacgttctggcgcctcacaatgatgttttggaggaggtgtacggcattggtgccaccgatattgcggaaggctttcaagccatggccgacgctactcgttctggacaggccaacgctatcattgagatgatgaagcagtgtgaggcggtaaaagctttttctatagagcaaagtaagtctatggaagacgctatagagtcatggattgctgaaaatgaggagcagtcgaaagcggcccggggggcgatggaggatatacttcgcggcggtattgccaatgtaagtcgtcacacgaagttgccaccgacattgctagcagacttgtcataccagcgaggagaagatacagagttcttcgcagcgggcgattttaaggggacaccctttcggacactgccagcacgtaagaaacctctaattcaacttgggtcggactactacgcggtcgatccctgttttgctcgcgatgcggggtatcgtgcgctcctatttaatctccttcagcgaaagccggattacaataaggtctttaaagatcggcagaaaatgatgagcgaagcagcctttgctgacattctctatgcccagcttccgggagccacagttctccaggaggtttactacaaggatcctgacagcaagcagtggtccgaaaacgatactctcatcctggtcgatgatgtgctgttactagttgaggctaaggctggtgcagctgccaccattgcatcaccggcgcttgattttggccgccatgctcaatcagtgcaggacttagtactcaaggcatataaacaatgtgcgcgcttcttcaattatatgaattcggcggatgaagtgtccctctaccacctcgtgaatggcaaatacgaagagtgttgtcgtgtgcgtcgctctgactaccgggtgatggtgccgattgggttgacagtcgagtcgttctcgcccttttccacgtactgtaaagaattaccgcaggttgagcctttacttggaaagcatgctttcatttcactgtccatcgacgatttgtttgtgctcaagcgactcttgcccacacccggggagttcgtccattacttggaggtgcggcaagccgtggccggaatacgcggggctcatctctttgatgagttcgatcacttgggtgcttacctgtcgaagaaccgttttgatcaggatattatcgagcaattgaaggaagagaaagcgaacatggttatctgggatggcatgagtgacatcgtcgacagggccttcgaaggtgaggagtgggaaagcaaaccgttcccaagtcagaagttcccggaggaggttctgaagctgcttggagcactcgatagcacccgagctagcggctggctttcagcagagagtcatatccgtgacctaggagaggaaggccggaataatctggccaggatgctgtccgaccatcgaaaaacactgattcagcatcccgttcgttactttgttctgggcggggacggtgtactgctcttcgtttggcttcaacggcatggtcatccaattgactggaataaggtgaacaataaggctagcgcagttgcgttgagcgccaaggctactaacgtcattggcgttgtggctgaagttagtgccgatggtacttatgtccaggcgcggtctttcaaaatttatataccgacggagcaaacagcagaaaacgcacacatttatgaagacgcggcgaaaatggccaatcctgtacgtacggtcaatctcgaacgggaaaaacaagtccaccttggtcgcaagagcaaaaagattggccgtaatgtcccttgtccatgtggcagtggcatgaaatacaagagatgtcatggacggtag

SEQ ID NO: 373860 - DNA, 261 bp, Salmonella enterica
atgttgactgataccaggctgcgtcaccttaagccgaaggagaaactctataaagttaatgaccgtgatggtctgtatgttgcggtcactccggctggaacgatctcatttcgttataactattcaataaacggaagacaggagaccgttatttttggccactatggtgttggagggatcacgcttgcagaagcgcgtgaacggctcaatgaagccaaaaaaatggttgccggtggagggtcactcgaaacctcgacgtaa

SEQ ID NO: 373861 - DNA, 960 bp, Salmonella enterica
atgcaagcaacagtaaaacggcggctgacgaaggtcgctttagcattagtagttgccgggtattgcgccgcgccagcggtggcggcaaacggtaatctgaaatcggggcagtggcagattgtctctgaacagacgggcaccattcagggtacggtgccgtggattacccgtgcggcggataaaactgcggataccgacaaagatcacgtaacggtaactatcgatcgcggcgatcgtaaaattgtgaccgaaggcgataagcagttccacgttggcgataaggtcacggtgaactgggcgattggcgatacggaaggcgacctggacaccgacaacacggcaactaaagtcaccgtgaaatgggtgagctttagcgatcagaatggcagcgaccccaaagatcttggtactggtgacagttatgaaatccaggccgctgatgcggatcgttatatcggtatcaaaatcacgccaaccactaccaccggtgaccctgccgtggcaaccgaactgctgttgaaagacttgtcgaccgatgcgggcggtggttcggatgatgacgaaattccggaaggtccggtggtggatgaaaacgtccatgtggttattcatgagaaagattcgaataccaacctgttgaagaatacagggacgacactcaaaacgaataccacctatcaggtattgctgtggagcgataagaacggcaacggtacctatgatgccggtgaaaacgttaccgaccagtatgactaccgctggaaattcgtcggcaccagtaaaattgcaggtaccggtaccggcggtatcgtcaacgaaagctggaacgataaagaccttgtcatccctgtcaccaacgccgaagcgaaaacggcgttcgagggagcagacggcggcgttaccgtgggtagcgacggtgtccagggctttggtctgtccatcgactacaaacgcaaataa

SEQ ID NO: 373862 - DNA, 2193 bp, Salmonella enterica
atggtgcgaaggattcgcattctggttttgctattagtgtctggagtctcagttgcggcttctggcgcagataactctgcatctgcaaatgatgaaagccactcctccctgcctgatttagccagcgaatccgcgaaaaaagaagaacaggaaaataaaggaaagtcctttaaaaaacagggcgctgactactttattaattccgccacccagggctttgataatctcaccccggaagcgctggaatcccaggcgcgtagctatttgcaaaaccaaatcacttcctcagcacagtcatatcttgaaggtgtaatgtcaccttatggcaagatccgtaccagcctgtccgtgggcgaaggcggcgatctggacggcagttcgctggattattttattccctggtatgacaaccagagcacgcttttctttagccagatttcggctcagcgtaaggaagaccgcaccattggtaactttgggcttggcgttcgccagaacgtcggcaactggctgcttggcggcaacgcattctatgactacgattttacgcgcggtcaccgtcgattaggtctgggaaccgaagcctggacggattacctgaaattctccggcaactattaccatcctctttctgactggaaagactccgaagatttcgacttttatgaagaacgacccgcgcgcggctgggatatccgcatggaaagctggctgccgttttatccgcagcttggcgctaaattagtttacgaacagtactacggcgatgaagtagcgctgtttggcaccgatgatctgcaaaaagatcctcatgccgtcactttggggctggaatatacgccggtaccgctggtcacggttggtacggattacaaagccggtactggcgatagtaacgactttagcgttaacgcgaccgtgaactaccagataggcacgccgctggcggcgcagctcgatccggaaaacgttaaaattcagcactccttaatgggcagccgcaccgattttgtcgatcgtaacaatttcatcattctcgaatatcgcgagaaagatccgctggacgtcacgttgtggctgaaggctgacgccaccaatgaacacccggaatgcgtgattgaagatacgcctgaggccgctgttggtctggaaaagtgcaaatggactgtcaacgcgctgattaaccaccattacaaaattatttctgcctcctggcaggcgaaaaacgacgccgcccgtacgctggtgatgccggtggtaaaagctaatgcgttaaccgaaggcaacaataacagctggaatctggtgcttcctgcctgggttaatgccgataccgaagagcagcgcaccgccctgaacacctggaaagtacgcatgacgctggaagatgaaaagggcaataagcagaactccggcgtggtggaaatcaccgtccagcaggatcgcaaaattgagctgatcgtcgacaacattgccgataccgatcgcagcgatcacagccatgaagccagcgcgctggccgatggcgaagacggcgtggtgatggatctgctgatcaccgattcctttggcgactccacggatcgcaatggtaacgaactggtggacgatgccatgacgcccgtgttgtacgacagcaatgataaaaaagtcaccctggcccagacgccctgcaccacggaaaccccctgcgtgtttattgccagtcgtgacaaagaagcggggacggtgacgctttccagcaccctgccggggactttccgctggaaggcgaaagcagacgcctatggcgacagtaactacgttgatgtcacttttatcggcgacaacctgagcgcgctgaatgcggtgatttatcaggtcaaagccgccaaccctgtcaaccttatcggcaaagaagataagcaccctacggtcaataatgcttaccgtttcctgctgtggcgcgacaaaaataaagacggcgtattccagatgtccgagcagctcacggaagaagagatggcgctgtacgactaccagtgggagtttaccgggcagagtacaaacggacataccggcgcgctggccaacaccatgaatgaagatcttgtcctgccagtaaccaataaagaggcggcgcagaagtttgccgccaatgtggaagatggcgttcagggttacggcatacgcgttacgtatagtcagaaatag

SEQ ID NO: 373863 - DNA, 138 bp, Salmonella enterica
gtgactaacatcctgaagctcttcagccgtaaggccggtgaaccgctggacagtctcgcggtcaagtccgtccgccagcatctgtctggcgatacgcaatgcggcaacatgctgacctttttccagccctttttctaa

SEQ ID NO: 373864 - DNA, 885 bp, Salmonella enterica
atgtctcatctatacgaccctaccacgcagtattacaccggcgagtatcctaagcaaaaacagccggcgcccggcgtccaggcgaaaatgacgcctgttcctgactgtggtgaaaaaagttatgtcggcagtggtcgccttaaagatcgtaaggcgctggtgacagggggcgactccgggattgggcgcgctgccgctatcgcttacgcgcgtgaaggcgcagatgtcgcgatcaactacctgccagcggaagaagaggacgctcagcaggttaaagcgctgattgaggagtgcggccgtaaagcggtgttattgccaggcgatcttagcgacgaatctttcgcccgttcgctggtccataaggcgcgtgaagcgctgggcgggctggacattctggcgctggtagccggtaaacaaacggcaatcccggagataaaagatctgaccagcgagcaatttcagcaaaccttcgccgttaacgtttttgccctgttctggataacccaggaagcgattccgctgctgccaaaaggcgccagtattatcacgacgtcgtctatccaggcgtatcagcccagtccgcacctgctggattatgcggcaaccaaggcggcaatcctcaattacagccgtggcctggcgaaacaggtggcggaaaaaggaattcgtgtgaatattgtcgcgcctggccctatctggacagcgctgcaaatttccggcggtcaaacccaggataaaattccgcagtttggtcagcagacgccaatgaagcgggccggccaaccggcagagctggcgccggtgtatgtctatctggcaagccaggaatccagttacgttaccgcagaagtgcacggcgtgtgcggcggggaacatttaggctaa

SEQ ID NO: 373865 - DNA, 495 bp, Salmonella enterica
atggaacgctttcttgaaaatgtaatgtatgcgtctcgctggctgctcgcgccggtgtattttggcctctctttggcgctgatcgctttagcgctaaaatttttccaggaaattctacacgttctgccgaacgtttttgccctggcggaagccgatctgattctggtgctgttatcgctggttgatatgacgctggtcggcggattgctggtaatggtcatgttctccgggtatgagaattttgtctctcagctggatatctctgcgggcaaggagaagctgaactggctggggaaaatggatgcgacttcgctaaaaaataaggtggcggcatcgatagtcgctatctcttccattcacctgttacgcgtgtttatggatgcgaaaaacgtcccggataacaaattaatgtggtatgtcatcatccatctgacctttgtcctgtcggcgttcgtgatgggctatctggacagattgacgcggcataaccattga

SEQ ID NO: 373866 - DNA, 1644 bp, Salmonella enterica
atgcgtttgctgcaaaactttactattcgtatggtcatgctgacgatactgggacttttttgtctactctggtcgggggtggggttatacagcgtccatgctttatccgaagtttcggaaggaaatgatattgaccggcatcttgtacggcaaatgacggtgctaagccagggtaacgatcaatatttccgctttgttacccgccttagccgcgcgatggatgtaaaaatcggcggcggcacgcccgattttgcgcccgcccggcagtcgctcgagaatatgcgtcagaagctggaggagatgaaagcgctatcgccagggccgatgaaccctgatatctcaagggaggtcttgtccaactggcaggccttgctggagaaaggcgtcgttcctcaaatgcaactggcacagcaaggatcgctgaccgcctggagcgaacatgccagtacggtcacgcccgcactcagccgcgcgttcggcgccagcgcggaacggtttagtcatgaagctggcgccatgctggataacacacgtgtgatggtcgatggtaaaacctataccatccgcatcctgcttattacggcggtgattctgggcattgctatcctgatttttaccgatcgctatctggttgcaatgatggtgaaaccgctggagcgcatccgtcagcaatttcagcgcatcgcgcaaggcgatcttagccagccgattgaagcgttggggcgtaactgcgtaggccggttggtgccgctactgcgcgcgatgcaggacagtttacgcgaagccgtgagtacgatccgcgccggaagcgacaatatctggcgcggcgcgacggaaatttctaccggtaataacgatctctcttcccgaacggaagaacaggccgctgcgctggaagagacggccgccagcatggaacagcttaccgcaacggtgaaaatgaacgccgaacacgctcgccaggcgagtcagcttgcggatgccgcctcgctaacggcaggaaaaggcggtgaactggtttccaatgtggtagaaacaatgaacggtatttccgccagttcgcagcagatcgccgaaattactaccgtgattaatagtattgctttccagaccaatattctggccttgaacgcagcggtagaagcggccagagcgggcgagcagggacgcggcttcgcggtggtcgccggtgaggtacgtaacctggccagccgcagcgcgggggcggcgaaagaaattgaagccttaattggcgaatcggtacgtcgcgtagcgcagggcgcgcagttggtccaggagaccggcgcgacgatggacgccatcctgctcggcgtcacggaagtgacgacgattatgaaacagatcgcgtccgcctccgaagaacagagtaaaggtatttctcaggttggcgtggcgatcacgcaaatggatagcgttacgcaacaaaacgccgcgctggttgagcaggtttccgcggcggcggcggcgctggaacggcagacggaggatttgcaacgctccgtacagcagttccggctttccgctagtgagccgcaacaacgcgtaacggcgaaagcggcgcctggcgttcagagaatggcgtcgactcccgcacagtctactgatgaatgggttgccttctga

SEQ ID NO: 373867 - DNA, 879 bp, Salmonella enterica
atgtcacgtaattttactgtttcagcctgtcagtatattgttaccgaaataaacacttttgaagatttaataacaaaggtaaggatacttcttaataaaagtcagggtgctgatgtcgttatcttcccggagctatttaccattgagctatttacactattgaaaaaatggcaagaaagacccattccacaccttactttaattgatcagttcacggatgcctataagcagctttttcaacaggaagctaaagaaagaggacagttcattattgctggctctcatctggagcagaccggagcagatcgctatgagaatgttgcgcatatatggggacccgacggcgaacattatgctcatagtaagacgcatatcttcccggctgaacggggttggtatactcaggaaggcgataaaatggctgtttttcaactgccatttgcaaaggtgggttttaatatttgttatgaagcagaaataccggagtgtgccgcgacgctggcggaacagggtgcggagttaattttaacgccttccgctacgtttactgaacagggattttggcgagtcagacattgttgccacgcacgttgtattgaaaatcaaatttatcttgttcactgttgcctgggcggaaacctggggggactactgccaggctgctgggcccgaagttcaattttaagcccctgtgatgtcgtgtggaaaaatccacaaggtattatcgcagaggcgcacgtcaatcaagaggatttcatttcaggagaaattaacctcgatgttctatatgaaaatagacttgggggggcagcaacaacgttcaaggacagacgcagaaaagcaggcatatataatatctggccatcacacattaaataa

SEQ ID NO: 373868 - DNA, 432 bp, Salmonella enterica
gtggcggcctgcgtaggcgcgacctggattgcgggcggtgtcgcggggacaatagatctgctggccaaaagcctcaaacctggcgggatcattctcatcggtgaaccgtactggcgtcagatccccgcaacggaagagatcgcccacgcctgtggcgtctcatccgtcgccgattttcgccccttgcccgagctggtcgcctttttcgaccaactcggctatgacgtagtggaaatggtgctggcggacccgcaaggctgggacagatatgaagccgcgaagtggatgaccatgcgtcgctggctggaggaaaaccctgacgatgagtttgcgcaagaggttcgaacagaactgacggtagcccccaaacgtcacgtcacctggacgcgagaatactttggctggggcgtatttgcgttaatcgcgcgataa

SEQ ID NO: 373869 - DNA, 1023 bp, Salmonella enterica
atgaagatagataaaaataaatttaatgaaatgatgaatcctgaaggtgtagctttgactcaaaacagcatacctgattcttgtaatagtttaccgtcaggagctatttctgacccctataattttgctgcaaatgttaaagcctttcttagaaaaaggatgcggtttgttaatgacaaattaaccggcgattgtttgtttattcttatccctaacgaaataaaaagagatgtagagcatttggggaggggagttgatagatttttttcatcaatgaatatagggataaaaggcaaagtaattctttcattagatgtgcgattatctaaggttagaatattggatgtaggttgtgattccagcacagacgaaatagaaatgcataatattttttcggcagagattgaaaaaatattaagcttaagtcctgtcaatattagttattgtcaatacgctcatgattgttccatgcttagtgctttcccggacgcaaaaaacgctgatgctgatgcagatatctatgatctaaatgctaaacaaattacttacaattgtgctgagcttgaaaagcacactgacgatttttatcaaaaagaacttaaatatcccagttccactatgatgatctgggataagcaaactgaatttaaacttatagcaaaagctgagacacgtatttccgcaagattgggagatagcttgcaaaataagttaggtaaggaaaatgtagctgctgagcctaatgtgaacagtggaaggattgacatctttattcattcgaatgcgatgggtgtagatcaaggtccatgcattattgagctaaaagtattgaggcatgaaaaaagcgataactacaaccgacgctggttatataagggagtcttacaagcaagagactatgctttagatatggatgccaaatctaaatatcttttttcatttgatgggcgtgaaaagaatagtgagtttgctgttatcccattagtcgctggaaaatatgatgtgaaatacataaacatatag

SEQ ID NO: 373870 - DNA, 642 bp, Salmonella enterica
atgaataaacagactcgcttggcctcattaggatggttgacgcttttttttgaggcggctgaaagatgtgctctatatcccatttctatggagatgttgcatagattcatttatttagcaaatgtgttatccccattgtctaaggtaaaaatgcctaatgaatacacgctaaaacatcgtcgtggaccatattttccgcaagcccaatatgatattggtattctcgttgcacaaagagttattgaggctactgatatctctgtgattcaggatgaatatggattttggttaaaaggtaattatcggataacgaagtatggcttatctattacagataaaataaatgaacagtcaattttagaaaactattctttctttctgcgagagttttttggagctttatctctgcttcatcacgaagaaatattaaatataaatagctacgagatacactataaagcagtagaggatggccagggcgttgatatttcaattcctgataataattacacaagatatgctgtttcaaaattatttcctacaagtcgcttgcaaacaccaagagaaggtattcatcgctacatttcatatttaactaataccctccatgtgcaagaggagaattatcatgaagatagataa

SEQ ID NO: 373871 - DNA, 1098 bp, Salmonella enterica
atgatgaagcgcaaaatcctggcagcggtgatccctgccctgctggctgctgcaaccgcaaacgcaaacgcagcagaaatttataataaagatggtaataagctggatctgtacggtaaagccgtgggtcgtcacgtatggacaacgaccggcgatagcaaaaatgccgaccagacttatgcccagattggttttaaaggggaaacgcagattaacaccgatctgaccggtttcggtcagtgggaataccgtactaaagcagaccgcgctgaaggcgaacagcagaactcgaatctggtccgtctggccttcgcgggtttgaaatacgcggaagtgggttcaatcgattatggtcgtaactacggtatcgtttacgatgttgaatcctataccgatatggccccctacttctccggcgaaacctggggcggcgcctatactgataactacatgaccagccgtgctggcggtttgttgacctaccgtaactctgacttctttggtctggtggacggtctctctttcggtatccagtatcagggtaaaaatcaggacaaccacagcattaactctcagaatggcgatggcgtaggttacaccatggcatatgagttcgacggctttggcgtcaccgcagcgtacagcaacagcaagcgtactaacgatcagcaggatcgcgatggtaatggcgatcgcgcagaatcgtgggccgttggcgcgaaatatgatgcaaacaacgtctacctggctgccgtatatgctgaaacccgcaatatgagcattgttgaaaatacggttaccgataccgtggaaatggcaaacaaaacgcagaacctggaagtggtcgctcagtaccagtttgacttcggcctgcgtccggcaatctcgtatgtgcagagtaaaggtaagcagttgaacggcgccgacggctcggccgatctggcgaaatatattcaggcgggcgcgacttactacttcaacaaaaacatgaacgtatgggttgactaccgtttcaacctgctggacgaaaacgactacagctccagctacgttggcaccgacgatcaggcggctgtcggtattacttaccagttctga

SEQ ID NO: 373872 - DNA, 1623 bp, Salmonella enterica
atgatgacaactcctgaactgtcctgtgatgtgttaattatcggcagcggcgcggccggactctcgctggcgctgcgtctggctgaaaagcataaggttatcgtcctgagtaaagggccggtgagcgagggctccacgttttatgcgcagggcggtattgccgccgtgtttgatgaaaccgacagtattgcgtcgcatgtcgaagatacgctgattgccggcgccggaatttgcgatcgccacgcggtggagtttgtcgccagcaacgcccgtacctgcgtgcagtggcttatcgatcagggcgtcctgtttgatacgcatgtccagccaaacggcaaggagagctatcatctcacgcgtgaaggcggccatagtcatcgccgtatccttcatgccgccgacgctaccggaaaggaagtcgaaaccacgttggtcagtcgggcgcaaaatcatcctaatattcaggtgctggaacgcagcaacgccgttgatttaattatctccgataaaatgggtctgccggggcctcgccgggtcgtcggcgcctggatctggaatcgcaataaagagtgggttgaaacctgtcatgcgaagtcggtggtgctggcgaccggcggcgcctcaaaggtttatcaatataccactaacccggatatttcctccggcgacggtatcgcgatggcctggcgcgcaggctgtcgggtcgctaatctggaatttaaccagtttcatcccaccgccctttatcacccgcaggcgcgtaattttctccttaccgaagcgctgcgcggcgaaggcgcataccttaaacgtccggacggttcacggtttatgccggacgttgacgaacgcggggaactggcgccgcgcgatattgtcgcccgcgccattgaccatgagatgaaacgactcggcgcagactgtatgtttctcgatatcagccacaagcctgacgattttgtccgccagcacttcccgatgatctatgcgaaactgctcgatttggggatggatttaaccaaagaaccgattcccattgttcctgccgcgcactatacctgcggcggcgtggtcgtcgatgattatggtcgtaccgatgtagacggcttatatgccattggcgaagtcagttacaccggcctgcacggcgctaaccgtatggcgtccaactcgttgctggaatgcttagtgtacggctggtccgcagcaatggatatcgacaggcgaatgccttctgtccacagcgttgacgtccttcccgccagggatgaaagccgcgtggagaacgccgatgagcgggtggtgattcagcataactggcatgaactgcgcctgctgatgtgggactatgtgggcattgtgcgcacgacgaaacggctggagcgcgccctacggcgtattactatgttgcaacaagagattgacgagtattacgccaactttcgcgtctcgaataatttactggagctgcgcaatctggtgcaagtggccgaactgattgtgcgttgcgcgatgatgcgtaaagagagccgggggctgcactttacgctggattatccgcaacaactggctgaatcaggcccatcaatcctttcgccgttaacgccccacataaacagataa

SEQ ID NO: 373873 - DNA, 1230 bp, Salmonella enterica
atggctatttcagatagttatctaaagtcgtgcctcgggcgcgaacgcgataaagttgaggagaaggcagaccgggacggtctgtgggtgcgcatttccaaaaagggcgccgtcacttttttctaccgattccgtttcctgggtaagcaggacaagatgacgatcggcagttacccggaattcgggttgaaggccgcgcgcgaagaggtaactaagtgggccgccattcttgcccggggagaaaatccgcggatcaggcaaagcctcgataaagctaaaatcaacagccagtacacattcgaggaacttttcagagaatggcatgcgatggtatgcgttcagaaagaaacatccgatcaaatactgcgttcgtttgagctgcatgtattccctaagctgggtaagtatccggcgcatcagttgacgctgcacaactggcttacagttctggaccgactggcgcagggatacactgagatcacccggcgagtaattagtaacggtcggcagtgctactcatgggcagtgaagcgccagttgcttgaggttaacccactttctgaaatgtccggtcgtgattttggtattcagaagaaaatgggggagagaacactggatcgcaaagaaattgcgattgtctggcgagctattgaggattcccgccttattgagcgaaacaagatcctttataaattgtccctgatatgggcgtgcagggtcggtgaactccgtcaggctgaagtttcgcatttcgattttgaggagggcgtctggaccgtaccgtgggaaaatcataaaacgggacggaaaagtaagaagccgataatccgcccgatcatccctgaaatgctcccgctgatacaacgagccattgagctggcgccaggccgttttgttttctcaaaatatgcagacaagccgatgagcgaaggctttcatatgagcatcagcagcaaccttgttaagttcatgctgaaggcttataacgagcaggttccgcactttacgatccatgatctacgcagaactgcgcgaacgaatttctccgagctgactgaaccacatattgctgagatgatgctcgggcacaaactgcctggagtgtggtcggtgtacgacaaatacacctatatcgaagaaatgagagaagcttatagtaaatggtgggcccgactgatgagcatcatcgagcccgatgttctggagttcacgccacgtcagaccggatga

SEQ ID NO: 373874 - DNA, 285 bp, Salmonella enterica
atgagcaaaaaaattagagactttgaattgatgagcacccgcgaaatttgctgccagctcaggatttcttccaggacgctggagcgttaccgtaagcgaccaagcgacaacaacccattcccggggcctgactgttcatatatgggtggctccaacaaatggcttaaaaccaaagtcaatgagtggcaggtcagggaaatgtcacgaccaacacgccgtccaatgtcgcatctgaatctgccccgtgacaacaaaggtcgactcatccggtctgacgtggcgtga

SEQ ID NO: 373875 - DNA, 2664 bp, Salmonella enterica
gtgtcgatatatcactattggggaaagtctcgacgaggagaaactaacggcggtgatgattaccatttgctttgctggcattctttagatgttgcggctgtgggttactggatggtgataaataatatttattttattgaccactatctaaaaaaattaggcatccaggataaggagcaggcggcgcaattttttgcctggattttatgttggcatgatattggaaagtttgctcattccttccagcaactataccgtcatgaggctttaaatatctttaatgagcctacacggcattatgaaaaaatcgcgcataccacgctgggatacatgttgtggaactcctggctaagtgaatgccctgaattgtttcctccttctttgctttcagttcgtaaaagtaagcgcgttatggcgctttggatgccagtcactacaggtcatcatggacgccctccagaggcaatccaggagctggaccattttcgccagcaggataaagacgcggcaagagattttcttctgagaataaaagcgctctttcctttaattactttgcctgaagcctgggatgaagatgagggtatcgaccaatttcagcaactttcctggtttatttccgctgcggttgtactggctgactggactggttctgccagccgttattttccgcgtactgcggaaaaaatgcctgttgatacctactggcagcaagctctcgctaaagcacaaactgccatcacgctatttccctcagcggcgaatgtgtctgcctttacgggcatagaaacgcttttcccttttattcagcatcccacaccgttacaacaaaaggcgcttgagctggatatcaacgtggatggcgcccaactctttattcttgaagatgtcaccggggccggaaaaacagaggcggcgctcatattagctcatcgactgatggcggcaggtaaagcgcagggactctattttggactgccgacaatggcgacagccaacgcgatgtttgaacgtatggcgaacacctggctggcgctgtatcagccggactcccgtcccagcctgattctggcgcatagcgcgcgtcgcttaatggatcgtttcaatcagtcaatatggtcggtcactctttccggtacggaagaacccgatgaagcgcagcctgatagtcagggatgcgccgcctggtttgccgacagcaataaaaaagcgttgttggcggaggttggtgtaggcacgttggatcaggcgatgatggcggtaatgccatttaaacataacaacctgcggttactgggtcttagcaacaagattttactggctgatgagatccatgcctgtgatgcatggatgtcccgaatacttgaaggtttgatcgaacggcaggccagtaatggcaacgccactattctgttatctgcgacgctatcgcagcagcagcgagataagctggtggcggcattttcccgtggggtgaggcgtagtgtgcaggcgccgttgctaggccatgacgattatccctggctgactcaggtcacacaaacagagctgatttctcagcgggttgatacacgcaaagaggttgagcgtagcgtagatattggctggctacatagtgaagaggcgtgtcttgaacgtataggtgaagcagtggaaaaaggaaactgtatcgcttggatacgtcactccgttgatgatgcgattcgtatctatcgccagcttcaactgagtaaggtcgtcgccacggaaaaccttttactcttccatagtcgctttgcttttcacgatcgtcagcggattgagtcacagacgctgaatctctttggcaaacagagcggcgcacaacgtgccggtaaggtcattatcgccacgcaggtaatcgaacaaagtctggatattgactgcgatgagatgatctctgatttagcgccggtggatttattaattcagcgggccggtcgactacagcgtcatattcgcgatcgtaacggtctggtgaaaaagagtgggcaggatgagcgagagacgccagtgctgcgcattcttgctccggagtgggatgacgcgccgcgagagaactggttatccagcgccatgcgtaacagcgcctatgtctatcccgatcatgggcgcatgtggctgacacagcgcatattacgtgagcaggggacgattcggatgccgcaatctgcccgattgttgattgagtcggtctacggcgaggatgtcaacatgccggttggatttgcaaaaaccgagcaattgcagaaaggcaaattttattgcgaccgggcatttgccagacagatgctgcttaactttgcgccgggctattgtgctgaaattagcgattctctaccggagaaaatgtcaacgcggttggcggaagagtctgtcacgctgtggctggcgaaaatcgtggatggcgtcgtaaccccttataccagcggtgaacacgcttgggagatgagcgtgctgcgggtacgtcagagctggtggaataaacataaagacgagtttgaaaaattagatggcgaacccctgcgtaagtggtgtgcgcaacagcatcaggataaggattttgccacggtgattgtggtgacggattgtgccgcttgtggttattcggcgaatgagggattgattggcatgatgggggaataa

SEQ ID NO: 373876 - DNA, 531 bp, Salmonella enterica
atggacaatttttcgcttttaacaacgccctggcttcccgtccgtttcaaagacggttccacgggcaaactggctcctgtcaatctggcagatgaaaacgtggtggatatcgccgcaacgcgagcagatttgcagggagcggcctggcagtttctgttgggattgctgcaatgcagtatcgcgccgaaaagatacaaaaactgggaggatatctggtttgatggattgcatgccgatgcgctccataaggcattagcaccgttagaacacgcttttcagtttggcgcggaaacgccgtcttttatgcaggattttgaagaattacccgacaataaaataactatagcttcgctattaccggaaacaccaggtattcaaactactgagttaaatacagatcattttatcaaacgtggcgtaatggaatgtttttgcccgcattgtgccgcgttggcgttgttttcaatgcagcttaacgctccttcggcggacaaggctaccgcactgggctgcgcggcggcgggccgctga

SEQ ID NO: 373877 - DNA, 651 bp, Salmonella enterica
gtgtatctctcaagaataacgctgcacaccagcgagctttcgccggcacagctcttgcatctggtggagtgcggcgagtacgtgatgcaccagtggttatgggatctctttcccggcggcaaggaacggcagtttctttatcgccgcgaagagttacagggcgcgtttcgcttttttgttctctcacaggaacagcctgccgccagcgcgatttttgacgtgcagactcgcccatttgcgccaatgctgagcgcgggacagacgctgcggtttaacttgcgcgccaatccgacggtttgcaaaaacggcaagcgtcacgatttgctgatggaggcgaaacgccagcgtaaaacgcagggtgatagccaggatatttggtcttatcagcagcaagcggcgctgacgtggttggcgcgccagggggagcaaaatggcttcacactgcgcgaaacgagcgttgatgcttatcggcagcagcagatacgtcgagagaaatcccggcagatgattcagtttagcagcgtggactataccggcgtgctggtgcttaacgatcccgtgcttttcctgcaacgtctggcgcaggggtacggtaaaagccgggcgtttggctgcggaatgatgatgatcaaacccggagacgacgcgtga

SEQ ID NO: 373878 - DNA, 993 bp, Salmonella enterica
atgagtcagaatacgctgaaagttcatgatttaaatgaagacgcggaatttgatgagaacggagtagaggcttttgacgaaaaagccttgagtgaagaggaacccagtgataacgacctggctgaagaagagctgttatcgcaaggggccacacagcgtgtgttggacgcgactcagctttaccttggtgagattgggtattcaccactgttaacagccgaagaagaagtctattttgcgcgtcgcgcactgcgtggagatgtcgcttctcgccgtcgcatgattgagagtaacctgcgtctggtggtaaaagttgcccgccgttatggcaatcgtggactggcgttgctggacctgattgaagagggcaacctggggcttatccgtgcagtcgagaagtttgacccggaacgcgggttccgcttctcaacatacgcaacctggtggattcgccagacaatcgaacgggcgattatgaaccaaacccgtacgattcgcttgccgattcacattgttaaagagctgaacgtatacctgcgcaccgcacgtgagttgtcgcataaactggaccacgaaccgagtgcggaagaaattgcagagcaactggataaaccggttgatgacgtcagccgtatgcttcgtctcaacgagcgcattacctcggtagacaccccgctgggcggtgattccgaaaaagcgttgctggacatcctggccgatgaaaaagagaacggtccggaagacaccacgcaagatgacgatatgaaacagagcatcgtcaaatggttgttcgaactgaacgccaaacagcgtgaagtgctggcgcgccgtttcggtctgctgggatatgaagctgcgacactggaagatgtaggccgtgaaatcggtcttacgcgtgaacgtgttcgtcagattcaggttgaaggcctgcgccgtctgcgcgaaatactgcagacgcaggggctgaatatcgaagcgctgttccgcgagtaa

SEQ ID NO: 373879 - DNA, 1281 bp, Salmonella enterica
gtgatagcaaaattcttcccgtggtatagcgagataactcgtccacaaaaaaatgctttattttcagcatggctgggttacgtttttgacggcttcgactttatgctgattttctacattatgtatctgatcaaggctgacttaggattgacagatatggagggcgcattccttgccacagcggcctttattgggcgaccatttggcggggcgctatttggtctgctggcagacaaatttggccgtaagccgttgatgatgtggtcgatagttgcctattctgtaggtacagggttaagtggcctggcttccggtgtaattatgctgacgcttagtcgcttcattgtcggtatggggatggcgggggagtatgcttgcgcttctacttatgccgtggaaagttggccaaagcatttaaaatctaaagcgagcgcatttctggtttcaggtttcggtattggtaacatcatagcagcctattttatgccgtcatttgccgaagcgtatggttggcgtgctgctttttttgtcggtttgctacccgttcttttagtaatctacatccgggccagggctcctgaatctaaagagtgggaagaagctaaactcagtggtcccggaaagcattcacaaagtgcctggtcagttttctctttgtcaatgaaagggctatttaatcgagctcaatttccactgacattatgtgtatttattgttctgttctctattttcggcgcaaactggccgatctttggtctactgcctacatatttgtcgggagagggctttgatacgggtgtggtctctaatttaatgacggcggcggcattcggcactgtattgggaaatatcgtttggggtctgtgcgcagatagaattggtttgaagaaaacgttcagcattggtcttctcatgtcctttttattcattttcccgttattcagaattccgcaagataattatttactgctgggcgcatgtttattcggtttaatggcgactaacgtaggtgttggcgggttggttcccaaatttctctacgactactttcctcttgaggttcgtggtttgggtaccgggctgatttataatcttgctgcgacatcaggcacattcaattcaatggcggcgacctggcttggaataacaatggggctaggcgctgcgctaacgttcattgttgctttctggaccgcaacaattctactcattattggcctatccattccggatagactaaaagcacgtcgtgaaagttttcaatcaacaaaagaattttaa

SEQ ID NO: 373880 - DNA, 1104 bp, Salmonella enterica
atgacgaaatacggtgttgtaggtacaggttattttggcgctgaactggtgcgatttatgtctaaggttgaaggggcgaaaatcactgcgatttacgatccggtaaatgcggctccgatagcgaaagagctgaactgtgtcgccactgcaacgatggaggcgctttgtacccatcctgatgtggattgcgtaattattgcttcatcaaattacttacataaagcgccggtcattgcggcggctaaagcgggtaaacacgtgttttgtgaaaaacctatcgccttaaattaccaggattgtaaggatatggttgatgcctgcaaagaagctggtgttacctttatggcgggtcacgttatgaacttttttcacggggttcgccacgctaaagcgctcatcaaagccggtgaaatcggtgaagttacacaagttcacactaaacgtaatggttttgaagacgtgcaggatgagatctcatggaagaagattcgcgcaaagtcaggtgggcatctgtaccatcacattcacgagctagattgtacactgttcatcatggatgaaaccccatccctggtttcaatggcggcggggaatgttgcgcacaaaggtgaaaaatttggtgatgaagatgatgttgtcctgatcacccttgagtttgaaagcggtcgtttcgcgacacttcagtggggatcatcgttccattaccctgagcactatgtattaattgagggcacgacaggtgcaattctcattgatatgcaaaacacggcgggttatctaataaaagcgggcaaaaaaacacactttcttgtgcatgaaagccaggcggaggatgatgatcgtcgcaacggtaacatatccagcgagatggatggcgcaatcgcttatggtaaacccggtaaacgtacgccgatgtggctctcatcaattatgaaactggagatgcagtacttgcatgatgtgataaacggtctggagccaggcgaggagtttgctaaattgctaacgggagaagcggcgacaaatgctattgctaccgctgatgctgcgacgctttcctcaaacgaggggcgcaaagttaaactcactgaaattcttggctaa

SEQ ID NO: 373881 - DNA, 2136 bp, Salmonella enterica
atgacaacggtgacgaagggcaagaggaagagcaggaatagtttagcctctgccgttgttgccggatgtgatatctcatcgatgttcaggccgccgcgcaggatgaaaatatcggatgcggtcagaaaatatatgcgcgtaccacgcgatgcgggaaattctgtggcatgggaatccaccctgaccccctatgtggtggaagccatgaactgcctgtcatcacgcagctacgatgccgtggtatttgtcgccccggcaagaaccggtaagacgctggggctgattgacggctggatttcctacaatattgtctgcgatccgtctgacatgctggtggttcagatgactcaggacaaggcgcaggagcactcaaagcggcgtctggcaaagatgtttcgccacagtccggcgatagcaagaagactcagccctcaccgtaacgataataatgtgcatgataaaacgtttcgtgatggctcgtttctgaaaattggctggccatcaatcaatgttttttcgtcttcggattttaaatgtgtggcgctgactgactacgatcggttccccgaagatgttgatggtgagggggatgcattctcgctggcgtcgaagcgtaccacaacgtttatgtcgctgggtatgacactggtggagagctcgccggggcgggaaattaccgataccagatggaaaccgtcatcaccgcacgaagcaccgccgaccacaggaatactttccctgtacaaccgtggcgatcgtcgtcgctggtactggccgtgtccgcattgtggcgaatattttcagccatcaatggcgaatatgaccggctatcgccatattgccgaccctatggaggccagtgaagcagcgcggattcagtgcccacactgccataagttgactgaaccacagcagaagcgtgagctgaataatcgtggcgtctggttgcgggaaggtcagcacattgaccgcgacggcaatattaccggcgaagcccgccgctcacgtatcgccagtttctggatggagggaccggcggcggcttatcagacctgggcgcaactggtttacaagctgctgaccgccgaagaggaatacgaacgagccggcagcgaggaaaccctgaaagccgtcatcaatacggactggggattaccctatcagtcccgtcgctcgctggaggcacgcagcggtgacgcgctgatggcacgcgctgaggacgtatcaaaacgtaccgtttctgacggggtgcgttttattgtggcaaccgttgacgtacagggcggtaaaaagcggcgctttgtggtccaggtagtgggctatggcgcatatggtgaacgctggatcattgaccgctacaacatccgttattccctgagagtgaatgaggatggcgaaagccagcctgtcaatccggctgcaagaccggaagactgggatttgctgaaaacggatgtgctggaaaagacgtatccgctggcggcagatcctgaacagtttatgccggtactggcaatggcggtggactcaggtggtgaagacggtgttaccgataatgcctacgcgttctggcgaaggtgtaagcgaaaaggcgttgccgggcgcgtttatctgttcaagggagacagtacccgacgcgagaagctgatcaccaaaacctatcccgataacaccgaacgctcagaacgtcgggcaaaagccaggggggatgtgccgttgtatctgttacagaccaatgccctgaaagacagggtagctgccgcactggagcgtgaggagccgggggcgaattacattcattttcctgactggctggggccgtggttctacgaggaactgacctatgaagagcacagcgcagacggaaagtggaaaaaaccgggacgcggtaataacgaggcgctcgatctgatgtgttacgcccacgcgctggctattctccgtggctatgagcgaatcaactgggaaaaaccaccaggatgggctcgcttaccggaaaaagacgccgcaaaaaccacgcagcctgttgaggttcgccagcaggagcaacacgaaggaggagagaaagccgtgaaagccaggaagaaaaaaattttacccgcttggggcggtggttccggaggagggtggttatga

SEQ ID NO: 373882 - DNA, 207 bp, Salmonella enterica
atgaccagggcagggctacaggagttgtacaacgcctatctggaggccgagcttgctgtactgaaaggcaagtccatcatgcttaacggtcagtcaatgacaatggaaagtctggaggaaatcaggaaggggcgccgcgagattgaagacaggttacagcggttaaataatccgcgacggcttttcacccgggcgaggttgtcatga

SEQ ID NO: 373883 - DNA, 966 bp, Salmonella enterica
atgaattttatcgataaagctatcagcatgatgtcgccgggatgggctgtatcaagactccgatcgcgggcagtaataaaagcttacgaggctgcaatacccacccggacacataaaattaagcgtgaaaaccgcaacgccaatcaactaaaccagattgccggaaagtccctgcgggagcaggcccgctggttcgataacaatcacgatctggtggtgggggcgctcgataagatggaagagcgcgttatcggggctaaggggatcatcgttgagccacaaccactgacggtggccggaacgctgaataacgcgctggcggaacaaatccgcgccagatgggcagagtggtccgtgtcgccggacgtgaccggacaatatacgcgcccggtactggagcgccttttgttacgcacatggttgcgggacggggaggtgttctcccagatggtggcgggaaaaatgccggggcttgagccggtggcgggcgtaccgttctggcttgaggcgatggaaccggattatgtcccgatggaacagacggacagtacaaataatctgattcaggggatctattttaacgactggcaaaggccaaaaagttacatcgtctgtaaatcctggccgggatttgccaccgctatggtggccaccaagcttatcgatgcagaaaatatgctgcatcttaaattcacccgtcgcctgaatcaggcgcggggcgtcacgctgctggcgccggttattatccggctgctggatctgaaggagtatgaggacagtgaaaggctggccgcgcgtatttcggcggcttttgccatgtttatccggcgcagtgacgcaatggtacaggatggtgacgcgccagctaatgcggatgcagaaagagggcgatcgccacctcaatatccgtccggcatttgtactggtgccgacggcgatggagtctgtttcaaatcaggtgattaa

SEQ ID NO: 373884 - DNA, 318 bp, Salmonella enterica
atggagtctgtttcaaatcaggtgattaaatctgtcagtgtcaagggggcggatattaacgccgggatcattaacccggtgaaagatttcgccacggtgatcgcggagcctcgtcttgatgacgccagtcagtccactttctatcttactgcagcaaaaggcagcgataccgttgaggtggcttaccttaacggcgtggatgagccgtatatcgaccagcaggaaggattcacggtggatggcgtaaccacgaaagttcgtattgatgcgggcgttgcgccggtggattatcgcggcatggtgaaatgcaccgtataa

SEQ ID NO: 373885 - DNA, 324 bp, Salmonella enterica
gtggctaagaattacgtggaagacgacaaaacgattgaaattgtggcgaccacgtcactaaagagcggagatctggtacaggtcggcgatatgttcgctgtggctgttaccgatattgccgccgggagcgccggaaccggcatcgcagaaggggtattcagcataccaaaactgacaacagaggatattgccgtcgggaaaaaagtgtatctgaaggataacgtggttcagacggatgcaaccggcagcctgccgtatgtcggggtggtatgggcgccagcggcaaacggtgatgaaaccgttccggtaaaaattaatggctga

SEQ ID NO: 373886 - DNA, 267 bp, Salmonella enterica
atggatgcacttatcgcagaacgcttcggcatgaaggtcaacatcaacgggactgactgcatagtggtggagtctgattttctggctgaactggggcctgttgaaggaaacggaaaaaacgtagtggtgttttcaggcaacgttatcccgcgccggggagacagggtggtactgcggggcagtgagtttaccgtgacccgtatccggcgttttaacggtaagccacaactgactctggaggagaacaatggaggtaaaggggcttaa

SEQ ID NO: 373887 - DNA, 567 bp, Salmonella enterica
atggaggtaaaggggcttaaagaggccatttcagtacttaaagaaattgatcgtggatatgtgacccgggcaaaaattcgggccattaaccgggtggcaaaacgggtggtcagcgtgtcagttcgcagtgctgctgctttggtggtggccggagacaaccgacggcagggtattcccgtcagaacggtaagacgtcgcgccagagtcaggctggccagagcggacaagccttttgccaacatttatgtgaactgtgatccgctgactgccatcaggttactgagttcgccaccatcaaccccgatgagggggagaaaaggtaagccgctacgtataggaaaataccgttttgaccgggggtttattgcgcaggctccgaacggatggtggcaggtatttgagcgttccggtgccggaagatacccacttaatgtggtgaaaatcccggttgctgatgcattgcgccatgcgttcaacacgcaggttgttttacagatgaaaacggagatgcccaaagagctgaagcatgaaatcagttatgaactgaggagattcactaaaaaatga

SEQ ID NO: 373888 - DNA, 402 bp, Salmonella enterica
atgacccgacacagtgcagtacggcaggccattattgccgcattaaaaaagaccgatgatggctccatcacgttttttgacggtcgtccggtcgtggtggaggaggatgagttacctgcggtggcggtgtacctgagtgatgctcagtataccggtactgaggtggacggtgatatctggagcgcggtgctacatgtggaagtatttctgaaagccactgcaccggacagcgccctggatgaacagatggagaacagggtgtatccggcactggggagcgtggcgggactgggtgacatcatccggacaatgtcggcgcaggggtataactatcagcgagacgatgaaatggcgatgtgggggtcagccgatctgagttacgacatcacctattccatgtag

SEQ ID NO: 373889 - DNA, 750 bp, Salmonella enterica
atgacagacacgacaattcctaatccacttgcgccggtaaaaggcgcaaataccacattctggatgtacaacagcgagggtgatccgttcgccagcccgctaagtgataataactggctgaggctggcaaacgtaaaagacctgcagccgggagaactgacggcagatgcagaagataataactatcttgatgacgagaacgctgactggaaaagtaccacacagggacagaagtctgccggggatacttctgtgacgctggcgtggaagccaggtgaggacgtacagaaaaagcttattcaactgttcacgaccgggcagaagcgcggattccggatcaagtatccgaacggcactgttgatgtgttcagaggctgggtgagctcgctggggaaaacggtgcagagtaaggatgagatcgcccgtacagtaaaaattaccagtgtgggccgtccgtacatggctgaagaggatgcaccggaagtggttagtgttaccggactgacagtggaaccgacaaatgccaccgtgaaggtcggcgccacaacagcggttacgttcacggtgaaaccggataacgtgacagataaatcactgcgtatcgcaacgtcagatccgactacagccaccgtcacgcaggcggaaaatattgccactgtaaaaggtgttaaggcaggtacagtgaaaattattggcatgacaacagacggtaattttaccgctattgcggatattactgttcaggcataa

SEQ ID NO: 373890 - DNA, 399 bp, Salmonella enterica
atgtttttaaagaaagagacgtttacccggggggatgcgtcggtggcattgttcgagttatccggcctgcaacgtattgagtacctggagttcatccagaaacgtactgcgaaatatgacacggatatggatggtacgacggaagcggataagcgcgtggcttatatgcaaatggcactggaaattaatgcctggctggtatcccgctcgcttctgaatggtgattcttctcaggatgcagacacgctttatcagtcagtacaggcgaagtggtcgtatgaggcgctggacgcaggcgcagaaagtgttctgatgctcagcgggctgtctgcggataagaaagataacgccagtgattcaggtaatgaatcagaggacatgacgccggaaaagtcctga

SEQ ID NO: 373891 - DNA, 252 bp, Salmonella enterica
atgagttcaactgaacttagtgagtgggctgatttctttcgggaaaacagtttcagtgatgccctgctggatgcggagttttccacgctgaaagcgcaggtgttcatgctggtgacggggaaagaaatcgatgcagcggacttcagtttgctgacattacccggagcggtacagagcatgacggagcaggatctgcttgaagtggcagtcggtattccgggaggagtgagatttgagccagaaagtcggtga

SEQ ID NO: 373892 - DNA, 591 bp, Salmonella enterica
atgtacgtcacccgcccgtttattcatctcttccgaatacgcggacatggcaattttcgcagcatcagccgttcttccctgttcaccgagcaccctgatttgttcaagctgggtggcagtcagaaaatgcagtgccctgtccagttctttcgccgcgttcaccggatcatcctgcagccgtttaaactggcggatggtttcatccactgcctgcccggtaaacgctccgctaccgaccacctgggtcagtactcctgccgcgtcgtgctgcgtgacgccatttccggcgagcgacttcgccatttcattaagcttgcctgtggtttttccggcgtaacttccggtcagaataagctgtttattgaactcctcactttctttcgccccctcatagtacgccttacccagtccgtaaaccgccgcagccacaccgccaaccagcccgccgagcatcatgcccttcggcgacatcagttgctcaatccacccggcccggttggccagcgtgataccggaaccgcgaagggcgccaaaatttccccgtgccagttcaccaatcagtacgcctatctcgcggcgcgccattgctga

SEQ ID NO: 373893 - DNA, 975 bp, Salmonella enterica
atgaagccgtccatcattctctacaaaaccctgcctgatgatttgctacatcgcctagaggcgcattttaccgtcacccaggtaccgaacctgcatccggaaacggtagcgcgacacgcgcaggcatttgccagcgcgcaaggccttctgggcgccagcgaaaccgttaaccgcgcgctgctggaaaaaatgccggcgctacgcgcggcatcaaccatctcggtgggatacgataatgtcgaggtggacgcccttactgcccgcaaaatagtcctgatgcacacgcctaccgttttgacggaaaccgttgccgatacggtgatggcattgatgctggccactgcccgccgcgtggtggacgtcgcagaacgggttaaggcgggtgaatggacagaaagcattggcccggcgtggtttggcgtcgatgtccatcacaaaacgctcggtatcgttgggatggggcgtatcgggatggcgctggcgcagcgagcgcactttgggtttaccatgccggttctctatcacgcccgtcggcggcatcaggaggcggaagaccggtttaacgcccgctactgcgatctggatacgttgttgcaggaggctgattttgtctgcgtgatcctgccgctaacggcagaaacgcgacatctgtttggcgcaacacagtttgccagaatgaaatcgtccgccatttttattaatgccggacgcggcccggtggtcgatgaaaacgcgctgattgccgcgctgcaaaacggtgaaatatatgcggcaggtctggatgtctttgaacaggaaccgctatctgtggattcgcccctgctgaacatgtctaatgtcgtcgcggtgccgcatattggctcggcaacgcatgagacgcgctacaacatgatggcctgtgcggtggataatttgattgatgcgctgcagggaaaaatagagaagaactgcgtcaatccgcaagcggcgggataa

SEQ ID NO: 373894 - DNA, 675 bp, Salmonella enterica
atgagttatccgaaaccagataaaataaaaccaattattggctattctgacattacggcattacatatttatgcaaatgaatacttaaatttcccctcgatacactccgtcgttctgggtattaatggcgatatttttccgggatacaataaaaatggcctgggagcaacattagatattcttagcggaaaaaaaacagatgttatatatgagttatcaccgcttaataaatttgctgcctcaatgacagaggttacaggtaaaattgttggtggaaattctcttttggtttctgcgcttaatggggcttcggggctttcgcttaaaactaagggaaaattcctattcctagaatctattgcggatgatcccggccagttttctaggaaattgatggggttggcctattcgccagtaataaagaattgcttaggggtgatatttggagatgttattaaagatggtggtaaaacaaactcacctctggttcaaagtcagtttgattatattattcaccgattctcagaaaaattcattggagataaaattgcgttaaaagcaaataatatttttggtcatggtgcgatcaatatgccattgccacttaatacttttgctgtgataaagcgtaacggtgcgagtataattgctacaattagtgctaatagagtttga

SEQ ID NO: 373895 - DNA, 1689 bp, Salmonella enterica
atgttaaaaatgggaataactattattaaacctgattataatgaaaatttcatcactttacgtaaggtttttatgcaaaatattatctcagtcatctgttgtatactaatgattagctatttttctctgggatatgcagcggatattcccaacggagtggtactggcagagaaacaagaactggttcgtcaaataaaagatgagccagcttcgctagatccggcaaaagctgtaggattacctgaaatccaggtaatccgcgacttgtatgaagggttggttaaccagaataaaaaaggtgaaattattcctggtgtcgccacccagtggagaagtaacgataatcgcacctggacgtttacgctgcgagataatgcaaaatggtctgatggcacgcctgttactgctcaggattttgtctatagctggcgacgtctggtagacccaataacactttcgccattttcctggttcgccgtgctggcaggaattacaaacgcaaagtcgattattaatggtaaaatcgcgccggaccagcttggggtagaggctattgacgcgcataccctgcgtattcacctggataaaccgttgccctggttcgccagactgaccgcctgttttgcattttatccggtacagaaaaaaaacgttgaaagtggtaaggaatggacgcagccaggaaaattgattggcaatggcgcatatgtgcttacagagcgcgttgtgaatgaaaagctggttgtcgagcctaataaacattactgggataatgataaaacggtgttacaaaaagtgacatttttgccaatcaatcaagagtcagaggcgaccaatcgctatcttgcgggtgacatcgatattacagaaacgtttcctaagattatgtaccaacaactgatgaagaatattcccggacaggtatatacgccgcttacattaggtaccggctattatgcgtttaatactcaaaaggggccaactgcggactctcgcgttcgtctggcattaagtatgacgattaatcgacgccttataactgaaaaagtgttaggtacaggtgaaaaacccgcctggcattttacccctgatataactgcaggatttacgtctacgccttcaccctttgaaaaaatgagccaggaaaaacttaatgctcaggctaaaagtttacttcgtgcggcaggatatggaccacaaaaacaccttaatttaagacttctctacaatacctcagaaaacaatcagaaaatcgctattgctgtggcgtcgatgtggaaaaaaaatctaggagtggatgttaaattgcaaaaccaggagtggaaaacctatatcgacagccgtaataatggaaactttgatgtgatccgtgcctcttgggtgggggattataatgaagcctcgactttcttgtcgttgttaacctctactcattcgggaaatatttcacgatttaataatcctgcctacgataaaatcataatgcaggcaatgacagagcacaccttgcagacacgtaatgcagattataatgcagcagaaagaatacttcgggaacaggcgcctattgctccgatttatcaggaaactaatggaagactaattaaaccatgggtaaaaggatatcctattactaatccggaagatgtggcttatagccgcaccatgtatattataaagcatcaatga

SEQ ID NO: 373896 - DNA, 1050 bp, Salmonella enterica
atggtcgggaaccatgtcaccctgccagtctgtggccgtgacgtcacattcactctggaaaccgtagatgcggaaatggttgaacgggccactatggtctggtctggcaacgaacgtgaccaggcgctgctgacacaggcggctcttgatgaccttattccttcatttctgacgtccggacaacaaaatccggcatttggccgcaaaatttctggcattatcgaggtagctgacggtggtcgccgccgccagactgcgatttatacgcacagcgaataccgcgttctggtcggggatctggacgacgagcagatggcctggttatccacgatcggcaacagctatcgacagaccagcgcctatgagcgcgggaaacgctatgcccgccgcctaaaaaatgagtttggtgacaacgtcagtaagctggccgaggcggaaaatatctcacggaaaatcatcatgcgctgcatcaaaacagccgaactgccgcgaaaaatcatcgcattattcagcaatcccaatgaactgagtgctcgtgccggtgaatccctggcgaaggtgtacgcgggaaatgaggatgctgtactgtcgtttgcccagcaccttgccaaacgtcagaaagacggtgagtcattcgaaactgatgagatcctgaaacagttacatgacgtagccgaaaaaccaacaaaacctgcaacgcgtgagcgcctgtttggtaaggggatcaaggcgaagtacaaaggggattccgtatcattccagctgaacaacgtttctccggtagtgatccagaaaattgaaacattactgaaagagtaccaggaagagcaacaaaagctagttagcgaagctgtcgacgatgcgttcgtcgaaatcgatacagtgacaaattttatccgggctgcagctactggtattgattacgatattccagcaaacgagctacagactatgattccattctcgcgaactgtactaaaggaacacacaaacgaggctgatcggattaaacgaatcgctgatgaaataaccagacgttatattatataa

SEQ ID NO: 373897 - DNA, 309 bp, Salmonella enterica
atgggctttccgtctcctgcaagtgactacgtcgagccccgcctgactgtagatattttgtgtggtatcaacgctaatagttggattgtctatacatcagatggttatgcagtcgttgacgtttcactgattcagcggcagggagatacagtattgatacgttctgacggggcattacgttttgcaaaaataatggggcaggcgttaattattgatgatggtgaagcgattgaaggcgaggcgctggatggtgtagttgttataggaaaagttacgtattttattagccggataaatttttctggctga

SEQ ID NO: 373898 - DNA, 240 bp, Salmonella enterica
atgccccgtcactatgagatagaaatggcctggcgtaacgccataatgtttgaaccgagtggcagaaaaacagttacaacagggagatttgttcaggaactggagaaggtaaaccattactggagcctgcgcgaggcaaacaggtggatcgaatggcatgtgactacgttcagggatatatcgacgcaggaaggagaaaaccgcacattccagttatttaaccctaacggagggctttaa

SEQ ID NO: 373899 - DNA, 237 bp, Salmonella enterica
atgttatattttctatggaaattaattcatatgagagtgagttcatgtgctattcaaatccttactagctcccatccactgggagcgcaggccgggcacctgattagggcaggagtaccgcgacagcaggtagcgattatttatgatgtgggtctgtcgacactatacaaaaaattccctgttggtaaatcagttagttatacaggcgtggaaattgaaagttatctaccgtcttga

SEQ ID NO: 373900 - DNA, 519 bp, Salmonella enterica
atggaattaaaaaacgttcaccgatacattcctgataacccggattatgatagcaattttctgtattttcgtagtgaagatggccaggatttttatgaatcgctgagtaaattcacgaaaaaatataagttgtgcattgattctgaaaatataatccgttccgtatcagaagatgtgtcgcgactctatccggctggcttttcagttgttgaggtcaataaactaccagccggttttaatatctatggcgactggaaatattcgaacggcactattctggctgttcccgttgactatcaggctaaggccgaaaccacccgacagaaactactggatgccgctaacagcgccattgccgactggcgaaccgaactggcgctgggtgaaatcagtgacgacgataaggccagcctgactaaatggatggcgtatatcagggagcttaaatcactggttttaacaggaatttcagacgaggccacctttaataaaatacagtggcctgtattatcacaataa

SEQ ID NO: 373901 - DNA, 1632 bp, Salmonella enterica
gtgatttccctggaagatgccagcctgacgaaaaaaggtatcgttaagttaagcagcgccacggacagtgacagcgaagcgctggcagccacaccaaaagcggtaaaaaccgttatgggtgaggtgcagactaaagcaccgcttgacagcccggcattcactggaacgccgaccacaccgacgccgccagacgatgccaaagggcttcagacagcaaacgcggagtttgtccgcaaactgattgctgcgctggttggttccgtacctgagtcactggacaccctgcaggaactggctgacgcgctgggtaacgatccgaattttgccaccactgtactgaataaactggcgggcaagcagccgctggacgataccctcacggcgctgtcaggaaaaagcgttgacggtcttatcgaatacgttggtttacgagaaaccataagtcgtgccaccggcgccatgcaaaaagaccagaatggcggcgacattccggacaaaaaacaatttgcgagaactatcggcgcggtaacgtcgactaccattacatttggtgaatcgggatggttcaaaatcgccacggttttcatgccgcagaccacatcgacagcagtaattaagctttacggaggttcgggttataacgttggctcatttgaacaaggggcaatcagtgaactggtgttgcgttcaggtaacgggaacccgacaggaataaccgccacattgtggagacgttcgcctgtcgcggctaacgaggtcgcatgggttaatacatcaggcgacacctacgatatttatattaatatcggccagtatgcgtactggttaattgcgcaatatgattacaccggtaatgcaaatgtcacgctgtacagtacgcctgaatattcatcagtacagccgggaaactcaaccagcggtcagacatatacaatttacagtagtctgatgaaaccaacagccggtgatgtgggtgcattgccgattacagggggacggcttaacggctcgctgggtattggtactgataatgcgctgggcggcaattcgattgtgttcggcgataacgacacaggcattaaacagaatggtgacgggatactggatacgtttgcgaatagccagcacaccgttcgtgtcgctcccggtgaaatgcaagttctgggatccattcgcgcaggcaatgccaaacgaatgaccatgactagctcaaataactccgtgctgaatgctcaatttaatttgtggggtgacggaaatcgaccaacggttattgagctggatgacgaccagggatggcatttatacagccagcgtaataccgatggcagtattcagtttgttgttaatggacaagttattccggataattacggtaatttcgacgcccgttatttaacatcaggaaacgtatatacaaaaggcgaatcagataatcgttatgtccagaatatccagcgtggcgctccagtatggccgggcaaagtagatgaatatggacctgcagaagcgcctgctggttgctttttaacacaagccagacatgacccaacaacagcatatggtgtgacatttgcgtatcgaccgctgcaaatgtgggtgggtaatggctggcgtacaattaatggatga

SEQ ID NO: 373902 - DNA, 1518 bp, Salmonella enterica
atgcgtaatggcgacagtcgtccattacagcgtccgacgacgccgctgccttcgttagatcttctgacgccgccgccgagcgaagttgaaccggtagatacctttgcgctggaacaaatggcgcgtctggttgaagcgcgtctggcggatttccgcattaaagctgatgtggtgaactattcgccaggcccggtcattactcgctttgaactgaatctggccccgggcgttaaagcggcgcgtatctccaacctttcccgggatctggcgcgctcattgtcaacggtagccgtacgcgttgtggaagtcattccaggcaaaccttacgtagggttggaattgccgaacaagaaacggcaaaccgtttatctgcgcgaagtgttggataacgccaaattccgcgagaatccgtcgccgcttaccgtggtgttaggtaaggatatcgcgggcgatccggtagtggcggatctggcgaaaatgcctcacctgctggtggccggtacgaccggttccggtaagtcggtcggggttaacgccatgatcctcagtatgctgtataaagcgcagccggaagacgttcgctttatcatgatcgacccgaaaatgttagaactctcggtctatgaaggtataccgcatctgctgacagaagttgttaccgacatgaaagacgcggctaacgcgttacgctggagcgtcaatgagatggagcgtcgctataagctgatgtccgcgctcggcgtgcgtaatctggctgggtataacgagaaaatcgccgaagcggcccgcatggggcgtccgattccggacccgtactggaagccgggcgacagtatggatgttcagcatccggttctggaaaaactgccgtatatcgtggtactggttgatgaatttgccgacctgatgatgaccgtcggtaaaaaagttgaagagctgatcgcgcgtctggcgcagaaagcgcgcgctgcggggattcacctggtactggcgacgcagcgtccgtcggtcgatgtgattactggtttaattaaagccaacattccaacccgtatcgcttttaccgtatccagcaagatcgactcccgcaccattcttgatcagggtggcgctgagtcgctattgggaatgggggacatgctctattccggaccaaactccaccatgccggtacgtgtccatggggcgtttgtgcgtgaccaggaagtccatgcggtggtgcaggactggaaagcgcgcggtcgtccgcaatatgtggatggcattacctccgacagcgaaagcgaaggtggcggtggcggttttgacggcggcgaagaattagatgcgctattcgatcaggccgttaatttcgtcacccagaagcgtaaagcgtccatttccggcgttcagcgtcagttccgcatcggctataaccgtgcggcgcgtattatcgaacagatggaagcgcagggtattgtcagcgctcaggggcataacggtaatcgtgaagtgctggctccgccgccttttgagtaa

SEQ ID NO: 373903 - DNA, 612 bp, Salmonella enterica
atgaaaaaaatggcaatcgcctgtgcattactttcaagcgttgtagccagcagcgtatgggctgacgccgccagctctctgaaaagccgtctggataaagtgagcagctttcatgccacctttactcaaaaagtcaccgatggcagcgatgccgcggtgcaggagggacagggtgatttatgggttaagcggccaaatctattcaactggcatatgacgcaacctgacgagagtattctggtttctgacggcaaaacgttatggttctataacccgtttgtagaacaggttaccgccacgtggttgaaagatgccaccggaaatacaccgtttatgctgattgcccgcaaccaggccagcgactggcagcagtataatattaagcaggatggcgataattttgtgctgacgccgaaagccagcaacggcaatctgaaacagttcaccatcaatgtgggacgcgacgggactatccaccagtttagcgccgtagaacaagacgatcagcgtagcgcctatcagctaaaatcccagcaaaacggcgctgttgatccgtcaaaatttacgtttactccgccacaaggggtaacgatagacgaccaacgtaagtag

SEQ ID NO: 373904 - DNA, 1344 bp, Salmonella enterica
gtgagcaatctgtcgctcgatttttctgataatacgtttcaaccgctggccgcgcgaatgcggccggaaaatttagcgcagtatatcggccagcagcatttgctggccgcaggtaagccgttgcctcgcgctattgaggccgggcatctgcactccatgattttatgggggccgccagggacggggaaaaccacgctcgctgaagtgatcgcccgctacgccagcgccgatgtcgagcgtatttccgccgtcacttctggggtaaaagagattcgtgaagctatcgagcgcgcccgccagaatcgtaatgctggtcgccgtaccatcctgtttgtcgatgaagtgcatcgctttaacaaaagccagcaggacgcctttttaccgcatatcgaagatggcactatcacctttataggcgcgaccacggaaaatccctcttttgagctgaactcggcgctattgtcgcgagcgcgggtctatctgctgaaatcgttgaccactgacgatatcgagcaagtactggaccaggcgatgcaggacaaaacgcgtggttacggcgatcaggatatcgtgttaccgaatgagacacggcgagcgattgctgagctggtcaatggcgacgcgcggcgcgccttaaatacgctggaaatgatggctgatatggcggaggcggatgacagcggcaaacgcgttttattgcccgccttgttgaccgagatcgccggcgagcgcagcgcgcgttttgataacaaaggcgatcgcttctacgatcttatttccgccttacataaatcagtgcgcggcagcgcgccggatgccgccctctattggtatgcccgtatcattaccgcgggaggcgatccgctgtacgtggcgcgtcgctgcctggcgattgcctcggaagatgtgggtaatgccgatccgcgcgcgatgcaggtcgccattgccgcgtgggattgtttcacccgcgttggcccggctgaaggcgaaagggcgatcgcgcaggctatcgtttatctcgcctgcgcaccgaagagcaacgccgtctataccgcctttaaggctgcgctggccgacgcgcgcgaacgtcctgattatgacgttcctgtccatctgcgtaatgcgccaaccaaactgatgaaagagatgggctatggccaggagtaccgctatgcccacgatgagcccaatgcctatgctgcgggtgaagtgtacttcccgccggaaatcgcgcaaacgcgctattatcatccgacaaatcgtggtctggaaggcaagattggcgaaaagctcgcctggctggctgaacaggatcaaaatagccccacaaaacgctaccgctag

SEQ ID NO: 373905 - DNA, 1353 bp, Salmonella enterica
atgcagtatgccgatgcagcggtacgcaatgccgcgctggagcgtgaaaacgaacgccataaaaaagcaatggcacggcagaaggaaaagccaaaggcttactacaacgacgaggccgggcgactgcttttgcagtacagccagcaacaggcgcagactgaagggctgattgccgccgcgaagctttccacgaccgaaaaaatgacggaagcgcataagcagcttttgtcatttcagcagcgcatcgctgatttgtccggtaaaaaactgacggcggatgaacaaagcgtactggcacataaggatgaaatagcgcttgcgctacagaagctggatatctcacaacaggatttgcaacaccagaatgcctttaatgaactgaagaaaaagacgctcacattaaccagccagctcgctgacgaagaatcccgcgtcaggcagcagcacgcactggcgctggccacaatgggtatgggcgatcagcaacgtggccggtacgaagagcatctgaaaattcaacagcactaccaggaacaactggagcagcttaagcgcgacagcaaggcaaaagggacatacggttctgacgaataccgtcaggcggagcaggaacttcaggccagtctcgatcgccgactggctgagtgggcggattataacgcgaaagtggatgctgcgcagggagactggacgcagggcgcgtcgcgggcgctggataactttctggcgcaggggggcaacgtggcaggcatgacggagaacgttttcacaaacgcatttaacggcatggcggacagtatcgcgaattttgccgtgaccggaaagggcagtttccggagcctgacggtctccatcctggctgacctggcaaaaatggaggcacgtattgcggcttctaaactgttgggttcagtactgggtatgttcgtctttggcgcatcagcaggcggaagtacaccatccggggcatacagttcagcggcgctgtcggtcattccaaatgcggacggcggcgtgtaccgctcagcaggactcagtcagtacagcggcagtattgttaacagaccgacgttctttgcatttgccagaggggcggcagtaatgggagaggccggtccggaggctatactgccgcttcgtcgcggtactgacggtaagctgggggttgtggcagcaggttccggagggatggcgatgtttgcaccgcagtatcatattgcaatcagcaacacggggccggaactgacgccgcaggcgctgaaggcggtttatgatctgggtaaaaaggcggcggctgatttcgtgcagcagcaggggcgtgacggcggcaggctgagcggggcatatcgatga

SEQ ID NO: 373906 - DNA, 333 bp, Salmonella enterica
atgatgaaaacctttcactggaaagttgacccggacatgggggtggattcggaaccacaggtgtcggtggtgaggttcggtgatggctacgagcagcggcgtgcatccgggatcaataatgacctgaaaaaatacagtgtgactatccgcgttgaccgggaggatggtccggcactggagggctttttgtcacagcataacggtgtgaaggcgtttttgtggactccgccttacggataccggcagattaaggttgtctgccggaaatggagtgtaaaagcgggattgctgaaaacaacattcaccgcgacatttgagcaggttatttcttag

SEQ ID NO: 373907 - DNA, 498 bp, Salmonella enterica
atgaaaaagattgtcgtggcggttttagttggtctggcgttaggtagcatcggcgtggctaacgcagcagggtataaaaataccgtttcaattggatatgcctacacagatttaagcggctggctttccggtaatgcgaacggtgccaacatcaaatataactgggaagatctggacagtggattcggggcgatgggttcagttacatacacctcggctgatgttaataactatgggtataaggtaggtgatgctgattatacctcccttcttgttggtccttcataccgttttaacgactatctgaatgcttacgtgatgattggtgcagcaaacggacatattaaggataactggggaaattctgacaataaaaccgcctttgcttatggggcaggtattcagcttaacccggttgaaaatattgccgttaatgcgtcttatgagcatacaagtttttccactgatgctgacagtgacgtcaaagctggaacctag

SEQ ID NO: 373908 - DNA, 543 bp, Salmonella enterica
atgaatgagggctggtatcaggtccggattgccgggagcgatatggcgccggatacccttactgccagactgaacgaatcgttaccgccgggggcagtggttcatattgtaccgcgtatggcgggagcgaaaaacggtatctggcaggtggtagccggggcagcgctgattggcgcgtcatttattcccggtctgaatgctgtagcggcggcagtattgttttccgcaggaaccagtatggcgctgggtggtgtggcgcagatgctgacacctgtacccaaaacaccgacggtgggtcagacagataacgggaaacagaacacgtacttttcttccctggaaaatatggtggcccaggggaacccggtgccggtgttgtacggtgaaatgaaaatcgggtcacgggtgatatcgcagatgatgagtacccgggatgagagcacgtcgggaaaagttgtggtgatcggctccccgttacaggcaaacaccacgtcgcggcaggacggcgggattaccagaccgtctgtcgtcatccggcagtga

SEQ ID NO: 373909 - DNA, 318 bp, Salmonella enterica
atgagcaaaggtggagggaaggggcatacaccacgtgaggcgaaggacgatctgaagtccacacaacaactgagcgtgattgatgccctcagtgagggaccgatagtcggcccggtgaacggtctgcagagcgtgctgattaataacacgccggtggtggacgcggacggtaacagtaatattcacggcgtgaccgtggtatatcaggtgggggagacaccacaggcaccgctggaaggttttgaggcttccggcgcggaaatggtgctgggtgtggaagtgaaacacgataatcccgttacccgtactgttgtctaa

SEQ ID NO: 373910 - DNA, 1125 bp, Salmonella enterica
atgacgcttaatgcgtatattaccacccagcgtaaggcgtatgacgttctggcggatttctgctcggtgatgcgttgtatgccggtatggaatggccgcaaaatgaccttcatccaggaccgcccctccgataaagcatggacctacaccaacggtaacgtggtgggcgggcgctttaaatacagcttcagtgccctgaaagaccgccataacgcgatagaagtgagatacaccgatccgctgaatggctggcaaacctccacggagctggtggaagaccatgcctcacaggcccgttatggacgcaatctgctgaaaatggacgcgttcggctgtacctcacgtggacaggcgcaccggacggggttgtgggtgatgatgacggagctgctggaaacgcagaccgtggatttttctgtcggtgcggaaggtctgcgtcatacaccgggcgatattattgaggtctgcgacaacgattacgccggggcgtcggtcggtgggcgtatcactgacctggatatttccacccgcacgctgacgcttgaccgggaaataacactaccggaaagcggcgccaccacgctgaatattgtcgggcctgacggtaagccgttcagtacggagattcagtcgcagcccgcaccggatcgggtggtaacgaaagtcctgccggaaaccgtgcagccatacagtatctgggggctgaaactgccctccctgaagcgccgccttttccgttgcgtgcgtattaaggagaatgacgacggcacatacgctatcactgccttgcagcacgttccggaaaaagagtccatcgtggacaacggggcgcactttgacccgttaccggggaccaccaacagcattattccgcccgctgtgcagcatctgacagtcagcacggataacgacagtaccctgtatcaggccaaagcgaagtggggcacgccgcgggtggtaaaagatgtgcgttttgtggtgaggctgaccacaggcagtgggaacgagggcgatccggttcgtctggtgacaacggcgacgaccagcgaaacggagtacgccttccacgaactgccactgggtgactacacgctgacagtcagggcaataaacggttacgggtag

SEQ ID NO: 373911 - DNA, 1233 bp, Salmonella enterica
gtgcccagacgtcagcccccggaaccggtactgcgtatccggcgttcctgcgctgcttaccagccggtcactgccatcttccgccgccacgttcaggcgcaacgaaaaagagacgcccttaacgactcgcggtgtgtcccagcgcgccagtacctgatactgtccctcctccgccagaatttctgtggtcagatgctgtatcgccgggggaacggtgccgtgaatcgttccgggctgcgggtcgaacgatgccccgttgtccacgatggactctttttccggcacatgctgtacggcggtgatggcatacgttccgtcgtcgttttcccggatagccacacaccggaagagacgctggcgcagcgacggcagtttcagcccccagacgctgtattccgccacaccgtccggtatccggctgacctgaacctgcacaccgtcggtaacagactgcacgtccacgctgaccggcaagccttcgccatccaccaggcttatcagcgtggtgccggacgacggcagggtaatcgccctgtcaagggtcagaatgcgacggtcgcggtcaacggacagaatccgcccgcccagactgatgccggcataatcttcgtcgcaaacctcaatcacatcaccaggaacgtggcgcaacccctccgcccccacactaaaatcaaccgtctgggtttccagcagctccgtttttatcagccacagcccggcgcggtgcgcctgcccgcgactggtacagccaaacgcatccatttttaccagattgcgtccgtagtgactgatggcgaccgtgtcttccaccagttccgtggacgtctgccagccattatcagggtcagtccagttcacctctaccgcattatggcggtccttcctcgcactgaagctgtaacggaacggtgtaccctcatccggcatcaccacattgctgcgggtataggtccagactgtatccgatggcctgtcctgcacgaaggtcagcctctgcccgttccacaccggcatacaacgcatggcggagcagaagtcggtcagcacatcccacgccttacgctgctgcgccagatacgcattaaaggtcatacgcggctctgtcccgccgaatccgtcagggaccatctggtcgcagtactggcctattgcatacagcgcccacctgtccacgtccgccgcgccgattcgctgtcccatgccataacggggatgtgtcagcacatcccatag

SEQ ID NO: 373912 - DNA, 303 bp, Salmonella enterica
gtgtctgacctgtacaccaagcaccgtctcggcgccggacgattcaaatccctccagcggggtctgttcctgctcaccgacgcggtataccaccttcacgccgtggatattcgtgttaccgtcgcggtccaccaccggcgtctggtttaccagaacactttgcagaccgttcaccgggccttctatcggtccctcgctgatggcatcgatgacgctcagcagctgcgtggatttcaggttatccggtgcctcgcggggcgtatgcccttttccgccgccctttcccatttattaaccccataa

SEQ ID NO: 373913 - DNA, 507 bp, Salmonella enterica
ttgccaggtctccggcagaaactgaacgacggctggtatcaggtacgcatagccggagacgatgttacggctgataccctgacaaccagcctgcatgatccgctgccgcctggcgcggtgattcatattgtgccgcgtctggccggggccaaatctggcggggtgtttcaggcggtgcttggtgcggcgctgattgctgttgcctggtggaacccggcaggctggctgggggcggcggcgatatccggcatgtatatgaccggggcgtcgatgattctgggtggtgtggcgcagatgctggcaccaaaacccaaaatgtccgaaatgaggcagaccgataacggcaggcagaacacgtatttctcgtcgctggataacatggttgccaacggtaacacgttgccggtgctgtacggcgagatgcaggtggggtcacgcgtgatttcccaggaagtcagtaccgctgatgaaggcgatggtggtcaggttgtagtgattggccgctga

SEQ ID NO: 373914 - DNA, 738 bp, Salmonella enterica
atgaaagaacaggatattctggcgcacgcccgacggtgtgcgcctgcggagtcgtgcggcttcgtggtgagaacacaggcgggagaacggtatctcccctgtgtgaatatttctgccgcgccggaggattatttccgtatggcgccggaggactggctgagggctgaaacgcagggggatattgtggcgctggttcacagccatcctggcggccagccgtatctgagcgatgtggatcgcaggctgcaggttcaaagtgacctgccgtggtggctggtatgcgccggccaggtacataaattccgctgtgtgccacacctgaccggacgacagtttaaacatggggtttttgactgttacacgctgttccgtgatgcctatcatctggcggggattgatatgccggattttcaccgggacgacgactggtggcggcatggtgacaatctctatctggataatctggagacgacgggattttaccgtgtcagcgcagccagtgcgcagcccggcgacgtgctgatttgctgctttggctcctccgttccgaaccacgcagcgatttactgcggcgacggagagctgctgcaccatattcctgaacaactgagtaaacgtgagaggtataccgacaaatggcaacgacgcacgcactccatctggcgacaccgggcatggcgcgaatttgcctttacggggatctgcaacgattttgtcgccgcgtcagcctgcaggtag

SEQ ID NO: 373915 - DNA, 699 bp, Salmonella enterica
atgcaggacatttcgcaggatacgctgaacgaagccgctaaactggcgcagtccgccaggatcactttgtgggaaatcgatctgacacagtctggcggtgatcgttattttttttgtaacgaggcgaatgaaaagggggaggcggttacctggcagggacggaaatatgacgtttatcctgtagacggttgcggatttgaaatgaacggcaaaggcgcagctgcgcgcccgtcactgaaggtatccaatctttacggtatggtgaccggaatggtggaggatttgcatagcctggttggggcgacggtcatccgcaggatagtatatgcccggtttctcgatgccgtgaattttcaaaacggcaaccaggatgctgacccggagcaggaatccgtaagccgatgggtgatcgagcagtgcagtgatctgacggcggtaagtgcgacatttgtcctggcaacaccgactgaaacggacggatgtgtcttccccgggcgaattatgctggccaatacctgtacatggatataccgctctgacgaatgcggttatacgggaccagctgccgcagatgaatttgataatcctaccgccgatccggcaaaagatgcctgcagccgctgcgcccggggatgcgccctgcgtaacaataccggaaactttggcggtttcctctccattaataaactttcacagtaa

SEQ ID NO: 373916 - DNA, 330 bp, Salmonella enterica
atggaaacatttaactggaagatccgccctgatatgacagtggaatcagaaccaaaagtcacctccataaaactgggtgacgggtatgaacaacggcgtccagccgggctgaacaaccatctggcgaagtataacgtaacggtccggattcgtaagggagaacatcagaaccttgaggcatttttatcccgccacggtggagtgaaatcctttctctggacaccgccttatacctggacacaaattcgggtgatttgccgcaaatggtcgattagcgttggctctctttgggtgactgtgaccacgacttttgaacaggttgttatctga

SEQ ID NO: 373917 - DNA, 852 bp, Salmonella enterica
atggcgctggccacaatgggtatgggcgatcagcaacgaggtcggtacgaagagcgtctgaaaattcagcagcgctaccaggaacaactggagcagcttaagcgcgacagtaaggcaaaggggacatacggttctgacgaatatcgtcaggctgagcaggcgctgaagggcagtctcaatcgccggctggctgagtgggcggattacaattcgaaagtggacgctgcgcagggagactggactctgggggcgtcgcgtgcgctggataactttatggcgcagggcagcaacgtggcgggcgcaacggagcaaatgttcacatcggcattcaacagtatgggcaacgggctggcgacgttcgttaccactggaaaactaaactttaaatctttcaccgcatccatcgtgtcagatctggcaaaaatttcagcacgtatggcaatgatgcaggctgtaaagggaatcggatctgctctgggatttggtgtgacagccaatgcgactggtggagtttatcagtcttctgaactgagccgatacagcggcagcattgttaatcgcccgacattttttgcttttgccaaaggtgccggggtgatgggcgaggcaggaccggaggcaatattaccacttcgtcgtggtgcagacggtaagctgggtgtcgtggcagccggttcaggagggatggcgatgtttgcgcctgagtacaacattgaaatccacaacgacgccggcaacggacagattggtccgcaggcattacaggccgtatataacattggaaaaaaagccgccattgatttctggcaacagcagtcgcgtgacgggggtattgctggaggagggcgataa

SEQ ID NO: 373918 - DNA, 798 bp, Salmonella enterica
atgaaagaacgtggaataactgatggtttaaccatgaatcagcttgcagaacgtaatgctgaacacgtaactactatagcggcactggaagccagatgcgcggcgctggtagcggagaatgcggggctgaaataccaagagccagccggataccacgtcatcaaagagtgcggaaaggttggctgtagtgttgcaacgcttgaggaggccgagaaaacgcgggacttctggaataaaaagtggactatcaggccgtatttctactccgcagcaccagcgccggtagtgccggaggaaatgccaaaaggcctggcggatcaaattgtcagtctgctggctcataacattggcgataagtttttggctcagaaaatctggaacgcctgtcgcgctgccatgcttcagggtagcaaacctgtaagtaatcgtgatgagttgctatacgcaaaggttaaggcagtcgctgacctgtacgccctgtactggaaatcgggagaagtggttacttatacgcctaacccagaaaaggcgaccatctggctaaataactactcgggaacttgcgttcaggaatacgtgaagcttgaacggctgcaagaagcgctggttggcaactctccggtaattccggatggttacgcacttgtccccgttgaaccaacggacgaaatgatagcggcagcgatggaatgtgatgatgtggttttcgacagtaaagatccaaccgcattctgtgttcagtttcgggaaatatattgcgcgatggtggataccgcaccaaaaccagagcagagctaa

SEQ ID NO: 373919 - DNA, 696 bp, Salmonella enterica
atgaaacctgaactctaccgcgcaataaacaatcgggatggcgcagcgatggcaagcatagccaggggtaaccctgagcatggccgggttgtgaattcagacgctgagcgccttgttgacgcgctgttcatgcaactgaagcagattttcccagccgcgacgcaaaccaatctccgctccgatgctgacgagcgagtagctaagcagcagtggatagcggcattttcagaaaatggcatccgcacccgcaagcagctatccgccggaatgcagaaagcccgttccagccagtctccgttctggccgtcgccaggtcagtttatttcgtggtgccgtgaggggagtggagcactaggggtcagtgttgacgacatcatggacgaatactggcgttggagaaagctggttttccgttatccgaccagtgagcagttcccctggagagataaaaatccgctgtattaccacgtctgcctggagctgcgccgccgtggaactgaggggcaattaagtgaaaaggaacttatccgggccgctggcgacatcctgcatgactgggaaaagcgagctcttgcaggtaaacccataccgcctgttcgtcgcgctttatccgcgccgtcgcgggatcgcggtccaacgccagccgagttgttaatggcgaaatacaaacaacgcaaagacgccggtctgatttaa

SEQ ID NO: 373920 - DNA, 837 bp, Salmonella enterica
atggcaaacactgctgaagtaatcaattttcctgtgcctgacgtggcacataaggagccgcgcgtggcagatctcgatgatgggtttacgcgcatcgccaatgagatccttgaggctgtaatgcatgcaggtttgtcgcagcatcagcttttggtgttcatggctgtcatgcgcaaaacatacggcttcaataagaaatctgactgggtcagtaacgagcagttctcggtgctgaccggcattctccctcataagtgctcatctgcaaaaagcgccctggttaagcgggggatattaactcaaaccggtcgtgttatcgggattaataaaacggtcagcgaatggtcatctttacctgtaaaaggtacagaaaaaaaaccttacctggaaaaggtaaatttacctgaatcaggtaagaaaagtttacccgaatcaggtaacggctattacccaaatcaggtaaacacaaaagacactattacaaaagacagtaaagacaatagtaataaaccccctaaacccccccgggcggtttcgttcgatgcatcaagtgttcagttgcctgactggctgtcttcgatcacctggtcttcatgggttgaataccgccgtgacctgaaaaagccgatcaagtctcagcagaccgtgacgcaggctatcaacctgctcgaccgctgcaggttgaacggatacacacctgaagaaattattaaccgcagtattgcgaatggctggcagggtctgttcgaacctgacggacaggcgaagcgcagcagagataccgatcaggaaagtatccactggaacagcccggatgcatggagggatttcctatga

SEQ ID NO: 373921 - DNA, 321 bp, Salmonella enterica
atggagaacgcaattgcacgaaagttagacccaccagaaatcaacccgattgagatagagagtgtcctgctcaaccggcttgcatcagtagggcagaaatcatacgccgagcatatgggcatcagcgagtcgacagtcagcaggcgtaaagctgagggatatttctgcaacatggcgaaagagctggcttttcttgggattcaggccgcgccaccggaagcggtactggtatccagaaactatctcacagccgtagagattctcgctgatgccgggctaaaggctgaacgagccaggccggatgcgctggggtgggactga

SEQ ID NO: 373922 - DNA, 228 bp, Salmonella enterica
atgactggtattgaaaaagcaattcaaaaatttggaacaggggctgctcttggaagagcgcttggattttcaaaaatgacaatttccaactggaaaaagaccgggattccccccgatcacattcgttcagttttcgaacttacaggtgttacgccacatgagttacggcctgacttgtatccaaatccaacagatgcattaccaagccaagaggcatcagccaaataa

SEQ ID NO: 373923 - DNA, 468 bp, Salmonella enterica
atggcaaaagtaaagcatcattttaccaacaagtcaaactacgcatgcctacctacaagtaaagcaatcatttacaatgcggtgatgagcgataacacactgacgaatggcctgatctccaggctggcagagttaaataagaagggtttctctaaaacagagatggccagggtagctggtgtcagcaaacaagcagtttccagttggttcaaaacaggaagaattagtaaaagctccgcattagctatcgctgatgctgctggcgtatcaattccgtggctgcttggtgaggatgtcggagagaaagacggacttaaacctgacgaacagcgcctgcttgagctctatcgccagttaccggaagaagagcagcagaacatgttgcggatcgtatctctgcgattgaaagaactcgacgaactgtatgcgaagtacatggggcgaaggattagaagcgaaccagaataa

SEQ ID NO: 373924 - DNA, 474 bp, Salmonella enterica
atgcaaaagttgtgttttcccccgttacttaccgcgggtttccatgattttgatgacgatggactgaagcgtttatgtgttgatagccttccaaagtcattgcgtcgaaatgatttgtactgtaaatatatacagtacatgaaattcattcgcgacattaacctgcaaataaaatgttttagcgaagtttggatagatggttcgtttactacagaaaaaccagagccagatgatattgatttacttttagttttagattatcaagcattgaatcagttaccttctacattgcatggtcaagtaggagcaatgctggatcgtcaatacgtaaagcagaattttgatattgatgttctgctcttggctgaaaaccaccctcaagttaactatagtgagagaagaagttactggcgcggttggtttggttttgatcgtaaggagaatccaaagggtttggtgaggatcatgctatga

SEQ ID NO: 373925 - DNA, 933 bp, Salmonella enterica
atgaacgatgataaaattttcaagtcattaaatgacagaattgctttcgttcagcgtgaggttgactctctttccctaacgagtaaccacacttttgctgatagagttttattcaactctatggattctcatttaagcgatttactgaaagaaaaacgtcacatcgagtcgagacacccactggttgacttcatggagttgcgcctcagaggggctttggttgattttggaacaattcctttagagcttctttctgcattatctggcagcctggctgggctaattcaaaaagcgacacacagaatctcaagcggtaaagactccagtagagtaccgcaaagtataagaacacaactagatatgcggcttgctgacttaacaccaggctcaacaaggttagctatcaccttttcaacaggatcgtgtgaattagttgatactgtttcgagccacgctgttaaggagattttttcacttttaggcacagataatgacgttgagttcatctcgaaaattgctgaaataggtacaaattctgccgccagtttgcaaaaaattgcccaagaatgtgaaaaaaacaacttaaactttgatcttagttgggttggccctcttagtaatggaaaacgccatgtttcattgaacaatgaacgtttacgtaagttatctcagcgcctaatgaccacacatgtatccaaaccttacgatgagattattaccggtgaattagctttattatctatgttcgggaaattggaaatagtcaatgaattcggcaagtttaaatgctcatatcctattgaaatgcttggtaacttacaaagtaaatataaggtaggggagcgtgttagcgtgattgcgacggttacagaaatacacaacgagagactgaattacgtcaagaaaaatcttatgattaaaagtttccagtaa

SEQ ID NO: 373926 - DNA, 207 bp, Salmonella enterica
atggatcgtgacgagctggaagaagaccgtgcggcattcattgcgggtgagattggcggcgcagtggtcgaattgataatcgacggcgtagtgattaaccgtgatgcaatcgttgaacgtctggaggagaagcggaggagagtcgggaacgttattcacaaaggtgtattacgggatgcggctgctatggtgagaaaagggcaataa

SEQ ID NO: 373927 - DNA, 240 bp, Salmonella enterica
atgcgccttataaatcgcagtaagcaatcgccattgggccgtcgcgcatgtgatgttgcactggcggcgcatcatgaaaagttcggcgattacggcagacaaaagcacgttaccaattacaccgttgtagtggatggcgtaaaggtgcctgttgaagtagttaaccgggccaccagctacgtagccaccgcaatgatcggcgtccggaaacttagaaatctgccagcacaggcaaactga

SEQ ID NO: 373928 - DNA, 1110 bp, Salmonella enterica
atggaaaacacaaatattgttaccactgagcagcaggcaccaaacaccatttctgccagtaacgcaatttttaacgttcaggcactgggtcagttaacagctttcgctaacctgatggcagactcacaggtgacggtaccggcacaccttgcagggaaaccagccgactgtatggctatcgtcatgcaggctatgcaatggggcatgaacccttacgctgtggcgcagaaaacacacctggttaacggtgttcttggttacgaggcacaactggtcaacgcagtaatcgcaagctccagtgccattcatggccgttttcattaccgctatgggggtgactgggagcgctgcaccaggacacaggaaatcacacgcgataaaaacggtaaaaatgggaagtacaccgtcactgagcgcgttcgtggctggacagatgaggacgagatcggcctgttcgttcaggttggtgccattctgcgaggtgaatctgaaatcacctggggagaacctctttacctctccggcgttgttacccgcaattctccgctatgggtttcaaaccctaaacagcaaattgcctatctgggcgttaaatattgggctcgcctgtactgcccggaagtgatcctcggcgtgtacagccctgatgaggttgagcaacgagaagaacgcgagattaaccctgctccagtccagcgcatgagcgtacaggaaatcaccagcgaggttagcaccaggaccagcgcgcaggagtcggcagctaacgttgatgctgttgccgacgatcttcgcgaacgcattgatacagcaagttccgttgatcaggcaaaagcaatccgtgcggatatcgaatcacagaaagcgttgctgggtactgcgctgttcaccgaattaaaaaacaaagcagtgaagcgctattaccaggtcgatgcacagaacaaagtcgaggcagtgatcaactcaattccaaaccctggcgaaccggaagccgcagagatgtttgctaaagctgaaagcacgcttggcgctgctaaacgtcatcttggcgacgaactgcacgataagtaccgcgtcaccctggacgatatgaaaccggaatacatcggctaa

SEQ ID NO: 373929 - DNA, 2928 bp, Salmonella enterica
atgagtggaactaatcctgtatttttagtccgcaaagcaaagaaatcatcaggccagaaagacgctgtactctggtgcagtgatgattttgaagcggcaaatgcaacactagattatcttctgattaaatccggtgcgaagctgaaagattacttcaaagctgtcgctactaatttccctgtcgttaacgagctgccgccggaaggcgaactgagcctcactttctgcgattactatcaactcgctaaagacaatatgacctggacgcaaatccccggcgtcaccctgccatcatctgaagccgccgccgcggcgcgccagcatatcgtcgatggtgttgataccgaaacaggcgaagtgctggaagaccacaccgaaaattttggtaacgaaagcaacagccctgcccaggcaacagccccagcccccgagctgactgttgtcgcaactatgcctctccgtcaccgcgttcttgctcagtacataggtgaaggtgagtatctttatcacgtcgacgcctcccagaaaaaagaaattctgcgtctcgaaatggacaccgataattcatatgtccagaacctgctgcttgccgccgagaatgttgaagcgttcaagaaagccattgaacatgacattcacaaaatagtgaatgccgttaaaaaaatattccctgtcgatgaaaaaactcctgaactggagactgttatccagttccttaaaacatggttcgagacggagcatatcgatcgcggtttgctcgttaaggagtgggcgaaaggcaaccgtgtatcggctattcaacgcactgaaagcggcgccaacgctggcggtggcaataagactgaccgtaaccctgattacgaacatactctcgatactctggacgtagagattgcaatggccactttgcctatggactttaatatctatgagctacctggcagcgtttaccgtcgcgcaaaagaaatcgtaaagaaaaaggaaagtccgttcaaagaatggtccgcagcacttcgcgcaacgcccggtatcctggattattcccgcgccgctattttcgcgctgatccgaagcgcacaccctgagttttatcactaccccggacgccttcaggggtatatcaacgccaacttaacggagactgatcacgagaaccccaccgaggaagctctcacggctgcccgacacactccggaaaaagacgcggtagaagaagccaaccgacagcttgccgccgcgcgcggtgaatatgtggaaggcatcagcgacccgaacgacccaaaatgggtgaagaccgggacaagccagccgaccaccgaacctgaactggttaaaaatgttggcaacggtattttcgacgtgtccgctttaatgcagaactcatcaactcatggcacagaaacgaatccggagaccaccagcaatgtgcaggttcaaaaagctgacagtgatgaaaaacaggctggtgatgcggtgcaggcaggcgaaggcgatctgggtactggtaaagaagcagttaccgtagagaaccagaatcaggctgagacgcaccagaacaacgattctgtgagccaatctgaacctgaggcgcaacaaaacgtaccggaatcgcaacaagaagagccagaagcagcctggccggaatacttcgagccgggccgctatgaaggtgtaccaaacgaggtttaccacgccgccaacgggatcagctcaactcaggtgaaagatgctcgcgtgtcgctgatgtactttaacgcgcgtcacgtagagaagactatcgtcaaagagcgctctccagtgcttgatatgggcaacctggtacatgttctggctctacagccggaaaacctcgaagcggagttcagcgtagagccggagatccctgagggtgctttcaccaccaccgccaccctgcgcgagttcatcgacgcgcacaacgccagcctgccagcgctgctgagtgctgacgatatcaaagcgctgctggaagagtacaacgccaccctgccgtcgcagatgccgcttggagcttcggtagatgaaacctatgcatcgtatgagcagcttcccgaagaattccagcgcattgaaaacggcaccaaacatacagccacggcgatgaaagcctgcatcaaagagtacaacgccaccctgcccgcgccggttaaaaccagcggcagccgtgacgcgctgctggagcaactggcaataatcaaccctgacctggtcgctcaggaagcgcaaaaatcgtcgccgttgaaagtctctggcacgaaggccgatctgattcaggccgtgaaatcagtcaacccggcagtggtattcgccgacgaattgctggatgcgtggcgggagaacaccgaagggaaagtgctggtcacccgccaacagctcagcaccgcgctgaacattcagaaagccctgctggagcacccgaccgccggcaaattgctgactcacccaagccgcgctgtcgaggttagctattttgggattgatgaggaaaccgggttggaagttcgggtacgccctgaccttgagctcgatatgggcggcctgcgcattggcgccgacctgaaaactatcagcatgtggaacatcaagcaggaaggcctgcgtgcgaagttgcaccgggaaatcatcgatcgggactatcacctgagcgcggccatgtactgcgaaactgcggcgctggaccagtttttctggattttcgtcaacaaagacgagaactaccactgggtcgccatcattgaggcgtctaccgagttgctggaacttggcatgctggaataccgcaaaacaatgcgagagatagcaaacggcttcgacactggtgaatggtcagcgcctatcacagaagactacaccgacgaactgaacgattttgatgtgcgccgccttgaagcgttgcgcgtacaggcataa

SEQ ID NO: 373930 - DNA, 288 bp, Salmonella enterica
atggaaatcgtaaaaatagaaatgaacctgaaagcagttaataagagcattgctttattcaattgcgaaaagaaagtctcaggcgttattcactcaaattcaactggcgaaaccactgtgattctcgacggtggatatgtactcggaaagttcgactgtcctcattgtgctgtaaaagccatttcgctgctcacagtcaaggtaagtgatggagaacaagcagggtttggtaattaccgaagttacaagcttgattactcagaaaaattttatcagaccatccattaa

SEQ ID NO: 373931 - DNA, 159 bp, Salmonella enterica
atgcttaaacaatgcggttactgccgcaaatccattgatgaaggcaaagaagtaaaaaacacccttctctatctcaacggctcgcaactggcgcgcaaagaaaaggaatattgttccaggcagtgcgctgaatacgaccagatggcgcacgaaagttaa

SEQ ID NO: 373932 - DNA, 405 bp, Salmonella enterica
atgaactttggagagcgtttacaaagagtgcttaatgagactgggatcacccaatctgagttaggtcgtagagtcggcgctacctctcaatcagttaatggttggtgtcagtccggcattcttccccgaaaagatatcttagagttgttacctaaggccacgggtaagccgttgtattggttcttcatggaggatgatgaggaatcggatgtgcctgaacgtctaacacaaggtggtccaacagatctcaatgaccgacaaaagcggctcttagaaatatttgatcagctaccgactgttgaacaagaccgttttattgagctggcaggcgccagacttcaagaactagacgatttcatggctgaataccaaagacgcagaaaaatcgagcctccttctcgctaa

SEQ ID NO: 373933 - DNA, 237 bp, Salmonella enterica
atgaaagtaactgttcaacgcaagatcctttccgtgtgtagccaggctgagttgggacgccgacttggtcgccgtgctcagaccgttaacggctggtttaaaaacaaagttcccggcgaacttgtagttcgagtggcaagagctattgactggaaagtcaccccacacgaactgcgtcctgatctctacccaaacccaaccgatggcttaccaagccaagaggcatcagccaaataa

SEQ ID NO: 373934 - DNA, 321 bp, Salmonella enterica
atggagaacgcaattgcacgaaagttagacccaccagaaatcaacccggttgagatagagagtgtcctgctcaaccggcttgcatcagtagggcagaaatcatacgccgagcatatgggcatcagcgagtcgacagtcagcaggcgtaaagctgagggatatttctgcaacatggcgaaagagctggcttttcttgggattcaggccgcgccacctgaggcggtactggtatccagaaactatctcacagctgtagagattcttgctgatgccgggctaaaggctgaacgagccaggccggatgcgctggggtgggactga

SEQ ID NO: 373935 - DNA, 570 bp, Salmonella enterica
atgtcaaataccgctgaaatatacaaattccctgcgccggtaccgacgcaacaggagtgccgtatggctgatctggaaaatggctatttacgtttagctaatcagatccaggacgccttgtgtatcgttgaactatcggggcgtgagttccgtgttttgaatgcgattatccggctgacttatggctggtcgaaaaaatcagatcgtattgccaacagcctcattgcagataagacaacactgaaggtaaagcacgtatccgaagcggtgctgagtcttgcctatcgtaacatcattatcctgcgccgtattggtcaaacaagatacatagggattaatacaaacctggataaatgggcttattccaagccacattgctcaaaatgtccggtgtcttttcctgatgatgaaattgccacatggattatttctgtacccgaaaccagggatagttatccccgaaaagggggaagggcatccccgaaaacggggatagttatccccgaaaagagggaagggcatccccgaaaacagggaacaccaaagacattattccaaagacaaatataa

SEQ ID NO: 373936 - DNA, 312 bp, Salmonella enterica
gtgaagtttgatccgttgagtattcctgttcccgaatggctgaatgctgcgtcgtggaacgaatgggtcacctaccgccagcaatccggaaagcccataaaaaccgaactgacggtaacaaaagctttcaggcttctgaaggagtgcctggatgaaggccacgatccggtaaacgtcatcaacacaagcattgccaacggctaccagggactattcaaaccgaagttcgctctcaacgaccgaagagctggcagagatgtgaaccacatttctgcgccagacaaaaccattcctaccggattcagggggtaa

SEQ ID NO: 373937 - DNA, 750 bp, Salmonella enterica
atgaaaaacgtaatcggtactggcagtgcgcttgatcgcctcaaaagaattatcccagccagtgtgcagccgaaattctcgactgctgatgagtggcgggcatggcaggaagccgaagggcgtaaacgcagtgaagagcttgacaggatgaatcagaaatcccgcaccgagaagattttcgagcgatctggcattcaggatctccatcgtagctgtacgtttgctaactacgaagtaagcggggaggggcagcgaaaagcgtacacgatggcaaaaagttatgcccagaacttcggtagtggatttgcgagctttgtgttcagcggtggtctgggaaccgggaaaaaccatcttgcggcggcaatcggaaatcatctgctggccggcggtcatagcgttctggtggtaaccattcctgacctgatgctcagggttcgtgagtgctacgacggtgggcaatcagaagcgtccctgcttgatgacctttgcaaagttgacctgctggtactggatgaagtcggtattcagcgcggaagcagtggtgagaaggtcattctcaatcaggttatcgatcgccgtctctcatcgatgcgacctgttggcgttctgacgaatcttaaccacgaggggctgttggattcactgggcgcgagggttatcgatcgcctccagatggacggagggatgtgggtgaattttgactggggaagctaccggaaaaacgttagccacctccggatcgtgaaataa

SEQ ID NO: 373938 - DNA, 318 bp, Salmonella enterica
atgattattcttgagcggattatcggtctggtgaaagagcaggggcgcatcacgacgaacgacgtcgttgcgatgttcggcgtgcaccgaaccacggcggagaaatatctgcagatcgcgttagtgcgcggaggtttcatccgccacgggcggtgcggcgtttttcgtgatcagcgggcagtaattgattatgacctgaagcgttatagctgcaacaagacaaccggattttcagcgctaccggcactggagaaaagccaggtaatgcaggttcatggagcacccaaaatgagcatcaacaaggggggagtccaatga

SEQ ID NO: 373939 - DNA, 264 bp, Salmonella enterica
atgagcaacatcgacaaacaggcagtaacagcaaaaacaaaagaactggcatccttcatggttgagcgattcagtatgaatcctgtcagctgcaaattgctgaatgaggcatgggaaaaagaattccctgacgaagtggctatcgctgagcgaatgctggcgctgctggatgagctgaagcattacaaatctcgtgaagagcgagttacaaagctggttctggataactcgacaagctgggacgctctctacaagaagctgtaa

SEQ ID NO: 373940 - DNA, 264 bp, Salmonella enterica
atgtcggcacgaattgaagaacttgaagcccagaggaagctggctttcactgccagtaaccgttgggcggataaattcagggaagcagagaaacacatagcagaactggaggcaaaacttgaaactgccgacaggttgcaggatggcgcattccgttccggcctgaaagccgggttcagctatgggcagacagatgaccagtccgggttcatgcaatgcatgtctgcatacagcccccgcgctggcatcaaggttaaggagtga

SEQ ID NO: 373941 - DNA, 258 bp, Salmonella enterica
atggctactttgacgaaacaggaaaaagcttgggtaaagaaactcaataagctactggcggagtgtccctcaaatcggatcgcgtttgcgacgactggcgattgtgaagtatcgctatttgatgtgacgcgctatgacgaaatttttgatgaagtagagaaggggaaaagcgaatttatcccttccgctatgcgtatcggcgcaacctttaatgagtgcctgacattccctaatcaggttgaaagcacggcaggctga

SEQ ID NO: 373942 - DNA, 282 bp, Salmonella enterica
atgaccactattaccaaagaacgcgcagagcttaaggcgttcatcgctggattcctttccgacccagcgcatgataatcagtcatcacgcagcatgactgctgaagtgtttcgtatcgcgctggcctcgctggacgctgaccagccagtgccggagaaaataccaaaaggtctggcgggtcaaattgtcgggctgctggcgcacaatattggcgataagctccttgctcagaaaatatggaacgcctgtcgcgccgccatgctcaacggaggtaaatcgtga

SEQ ID NO: 373943 - DNA, 627 bp, Salmonella enterica
atgattccatattccgtgtggtcacgtaagggaggtgtcggaaaaagcacgctttcgctgactctctcaggctatcttgcacagcagggtaagcgggtggttctggttgattatgacccacagaacggggctacaatctgttctgacattgccaaagctaacggcaaccctttacccttccaggtcgttaagagccttagtgaagtaaaccgcgacgagatagatgccgttgtttttgaccattccccaggtatcaatccaggtggccagcttgcccctattgttatcgttccaaccattctcgatgccgcaagccattccgtgaccattaagagtgttcacgaactggacggaacggataagctctgtatcgtcattcctaaccgtgtagaacttcaaaacaaagaacataaagacctgcttgatatgcagtttgaaaatgttccctacatgaagaagcgagtctcttactctcgtgcttatggtatgggtgtaactatctactcagaaggtacgggcttaccgaacctggggatcactcgccaggagttcgacggggtagctaaatacattcataaacgaatcgaaaagcatatctccgatatgaaagcaaaagagaaggcataa

SEQ ID NO: 373944 - DNA, 336 bp, Salmonella enterica
atgagcaagaaaaaaaactcatggctggacgatatgcagtcttttgaaaagattgcagttgaaactgcttttaatgccggtgactcttactggtcgcatgaatactttgcacatagcgataatgctgctcatgtcgtcactaatgtaaaaataagagcaaaagaagacgaaacccgtttaaccaatattcgtattcctgcacaactggaagctgttcttgcacagatcgcccctggtgttcctattgctacggctttattagtgttggcagatttaaaagccagcgagcttgttaaggaaaataaagccgtaaaaatatcgaataaaggggagtga

SEQ ID NO: 373945 - DNA, 1980 bp, Salmonella enterica
  misc_feature (1718)..(1762): n is a, c, g, or t
atggcaaatgttagtgcaaaaggcttaaaaaattataatcaccagggatttcttacttcgaactctggggcgaacagcagtgatagcccactctatccgtcacaagaagatgcttactatatcgatgcctggtctggtgtagaagttaccgatccaaatcctgctaaattggttaaggatattgaagaaggtgcatataacaatgttaccttcccgactaaaaaattccttaatgatttaaaattacaaaatcttgtcggtggtctgaaacaaactaaagatttagataaattagcaaatcaaaccgaaggtgagcattttgtattttaccttgatggtatcccaaaacacttacaaccaaaagcaagagagataattataagagtattatctcaccctgattatatcactaaaaaagaccagggccctgatcgtaaacctacatggacagtccataaggggttacaaagtgtacttgcatggggtattcatagtggacaaacagaccatttaggaaatgttgttcctgatcacttccatgtattccgttctcttcattgtatcaccgataaaaattacggtgtcagatttgataaagacgacacaaaaccaatcccttatgtagatgctcgcgatccaaataaaagatttattaatgctgctatgtcattagcaagacatgatatcagggcaaatgttcaggctcaaatcaatgaagccttaaaagcggctggtattgatgccaccattgaacttggaactttgcaggataaaatcggtgcagcagaagatattaaatccgataagattaataaagaggcagaagaaaataataaaccacttgctgatgttgcacaagaacatatcaatgacgaatcccttgatgaagaagaaattgccgactctgtaaggcaatacggaaatcttacagaagaaacgattgataaacttgaaggtatcgttaacaaaacagcatttgacagtaatgaacaagttagaagaaaacaggctcagataaaagagctaatggctgaacttgtcgaaagagaacaagaattacaagctatcaataaaggtatcctttatgaagctaaatacattcatgctaaaaatcttttgaatgaaacctcaagaaaacttgaagctgtaaataaagagcttgaagagtctaataagctgaatgacgaattcaatgaaaaaatcattgaaaatacaaataccatctctaacctaaatgacgaattagcaagagaaagaaaatataacgaagaacaagagttacaactcaatcagttagaagcagatcttgaactcgaaaaaaatataaatgcggaaaactccgagcttattacaactcttaccgataagaatgctgttttagcggctaatctggaagttgagcaagagaaaacagcagaactgacagccgaaaatgcagaacttaaagagaagcataaagttgagatcgctactcttcgtagtgagttcgctcagaaactggttaaataccgtaaaaactttgtggctcgtgtcagaaacaaagtggcaacggctgttgaacatgctattcaggcatttaaagataatcaattgccatcattacttaaagatgcaacaaccaaagcagtaagtgaatataaattaaaagaattacctggaaaaattagaaagataagagaagaagaagctaaaaaatcagcaaaagaaattgaagcatnnnnnnnnnnnnnnnnnnnnnnnnnnnnnnnnnnnnnnnnnnnnnctaacgatgtttctacattgaagactaatgttaataccttaacggctgataaagatacattgcagaaagattttgacgaattgttcaatgccagcaaagaaaaagcaacggaaatgaataatgaaattgctcgtcttaaagaaattcttaaaagcaatgggataaaccctgatagtgataactcaccaaaaaagcctaaaaacgataataagaaataa

SEQ ID NO: 373946 - DNA, 1389 bp, Salmonella enterica
atgctaaaaataagcccattcatagccttagccaactacattggtttttcaggatataaggcttatgcaataggcggtgcaatagcgatctgcgtttggttttatatttgcaatctaattatctctaaatattgtggaaataaatatttttcacttttactatcaacttgcttattcattccgcttggtatggatgatattgattttttacttggtcaggaatcgcatctttcgaatgtagtactttctattatgatatgcctaccggttatcatatatattcaagaaagcaaaaagagttttttgtgtatttctgcccttgctgttattctaatgactgcagagcaaccaattagaactttgattattatagcaccttttattttattcatactgattatattcagatcaaaaacttcagttgtgtcaatgttatctatagctgtatcttttgttatcggcaagatggcaaatgattatcttttaggcagacatttcccactcaaggtcgactattctcaagcatcgttgttaatatctccagataaagcaattgacaatctttttataattttaaagtcaatcctggtgtactcttcatcctctagcttggctgttggaagtaatgcaataggaatattgacacctttctactttatgggcttattgtatatacttttatttattgcaactattgtatatggcttaaaaatatttcttcatattttgattgatggcagaaaaactaaaactagtatttgtcgactagatctgttatgtgcattgggagctacaggttttgttttaggactgctacttatatcatgcctcaacccaaaagggcgccatattttctgggcaacttgtatactaaaaatttctgtatttgccaccatttttaaaatttttaaaagtaatataaaaaataatgtgtattcatattcattaactattgcaatggctatatgcatgtcagcaatagcaccagtactatatacaacaaaagcagagtcttttagttataataaatccaatatgaattcagaaataaataaaaaaattatttcaattgtaaggctaactggaataaaatatatttatggagaggatttctggagaatgcaactattaaactcgattgatgcagaagtacactcttctgaactcacagactcttatgataaatttgtaattcctagaacatggttgtccagaccaagttggtactgcattaatggtgaggttttatattacacaaaagatggtaaggcggataaaataatagagtcagaattaaagagtaaaaacggaaaaatattgtataacggtgcggaaggaaaaatatggttagggcctgtaatatggagcaagcctaagtggtgtaattaa

SEQ ID NO: 373947 - DNA, 150 bp, Salmonella enterica
atgcctttggcatatagcgataaaaatctggctgtctatctgcgtgagccgcgtctggttcttcttaatcaactgaggtttgaaggtgttttcacagtcacgcggcgtgttcaattcaatctcgccatcaccgcaaagcaggatgtttga

SEQ ID NO: 373948 - DNA, 840 bp, Salmonella enterica
atgcggttaaaatttatcaggcgcgatcgcggcagtttttcgggtggtttgttgccatttttacctgtctgctgccgtgatcgcgctgaacgcgttttagcggtgcgcgtaataagggattatgttaaaccacgtatgaggtgttatgtgattaatccatctgctcatgacatatcaaaatggactattagttatagagttgagtgtcagcagcgctctgcgcaactcatcgcccaccaagagaagaagcagctatatgctaattcttgcggtgcatgtgctttgttggttgctgctaaagagcttggaatcgaacatatgccagtgttaactggtctttactctgaattaacaggagggaggctggccttaactaacgaatgtgaatctgatttgtataaaataaccagtaattcaacttcgtatcgcgatagttgtagtaacctagccgacgctggttattcaatgcctcaaggtatcgttgttgcatgcaggcttttgggaatgggctgcgatgttactgaggagaaaaatcttttttccaaagcattatcttggctgtacccagaagtaaaagcacaatgtcaagctattggtgttcaggtaagagaaggtataagagaggattttgataagtatcgcttaaaggcaatggctgttagttttatcggtatgccagttggattacactgggtgcttcagcgacctgatggcagttttatggatcccggcgtggggaaaaatagcttgagttttgatgagttagttcaaaactcaaggagtgatttcaggtttgcagggtattacgacactggtatttctattgtcttgtcagcttga

SEQ ID NO: 373949 - DNA, 192 bp, Salmonella enterica
gtgactaaacaggaaaaaaccgcccttaacatggcccgctttatcagaagccagacattaacgctgctggagaaactcaacgaactggacgcggatgaacaggcagacatctgtgaatcgcttcacgaccacgctgatgagctttaccgcagctgcctcgcgcgtttcggtgatgacggtgaaaccctctga

SEQ ID NO: 373950 - DNA, 357 bp, Salmonella enterica
atgggggtaatgataccgatgaaacgcgagaggatgctcacgatacgggttactgatgatgaacatgcccggttactggaacgctgcgagggtaaacaactggcggtatggatgcggcgggtctgcctgggtgagccggttgcccgttccgggaagctgccgacactggcaccgccgttactgcgtcagctggctgccatcgggaataacctgaatcagacagcgaggaaggtaaacagcgggcagtggtcttccggtgaccgggttcaggtggtggccgcactgatggccatcgagagagagttgcgcagcttacggcaggtcgtcagggaacagggagcgcgggatgattgttaa

SEQ ID NO: 373951 - DNA, 519 bp, Salmonella enterica
atgagcaatattttacagacgggcgcggagttcgagaaaaagctgaaagagagagccgaatctacagagaaaatgctgaacgacgaattcagcaggctcggcgaatctgtaagcgaggctgtgacctcaaacgagacgaaaatcaaagacgctatagccctgttcacaacgtcgacagaggaatcgctgaaaaaacaccgggaaggggtgaaagaggcgatgatgcagcaccggaaggacgtgttaaagctggcagggaatacgggcgtgatgttactggggatagtctttctcctgtttaccgcgagtggcgggacgctctggtatcttggcgggaggatacagacgaacctggaagaaatcagggtacaggaagagacattgcggaaactgaacgcgaagacatggggcgtggagtttgttcaggacgggagaaggaaatttctggtccttccgtacgggaaatcagcagaggtgacgcactatcaggggaaggactggatacaactgacggagtga

SEQ ID NO: 373952 - DNA, 234 bp, Salmonella enterica
atgacagagctggaaacacatttgctgaacgccttagagcagctgcaacaggactatatgcagcggctgaacgaatgggagagcgccttcgtggaattgcagaagatgttttcgcttacgcaacgggacaacgcgatgctgaacgagcgggtcatgcagttgagtcagcaggtacagcacttgagcgagcggacagaacacttgagccagttatacagcgagaactggagataa

SEQ ID NO: 373953 - DNA, 612 bp, Salmonella enterica
atggctaaattaccgcgccgtaagtgcgcaaacaaagaatgccgccagtggtttcacccgatacgcgaggggcagatcgtttgctcgtaccagtgcgccagcgccgttggcaaagaacaaaccagaaaagctcgcgaagccgcgcaacgtaaggcgcaatcccttcagcgcgccgctgagaaaaaagaacgcgccacctggcgccagcggaaagccccggttaagccgctgaagcactggattgacttgacgcagcgcgccgtaaatgacatttgccgcgaaaccgaactggcagaaggactcggttgcatctcctgtggaacgaagacggcgttcgcatggcatgcaggccattacagggctacggccgccgcggggcatctgcgcttcactcgcttcaacatccatcttcagtgtgatgtctgcaacgtctacaaatcagggaacatcgaagcatatcgtaccgcgctggttgagcgttacggtgaggcggcggtgctggcactcgagaacaataacaccccgcaccgctggacggtcgaggagctgaaggaagtcaggctcgcggctctggcggatctgcgtgcgctaaaaaagctggaggccgcatga

SEQ ID NO: 373954 - DNA, 234 bp, Salmonella enterica
atggcgcacgaattacaactcatcaagcagtcatctggaattctgatccccgcaacgccggagaccagtgatattctgcaatcaaaaatcaaactcggcgccgtgctggtggctgagttccgtcaggtgaggaatcctgtattccatcgccgctttttcgcgttgcttaatcttgggtttgaatactggaacccaccggcggcgccatttctgccaatgagcgcaaactggtaa

SEQ ID NO: 373955 - DNA, 633 bp, Salmonella enterica
atggaagacgaaagtaatccgtggcctagttttgttgatacattctctacggtattgtgtatttttatatttcttatgttggtgtttgcacttaataatatgattattatgtatgacaactcaattaaagtttataaagcaaatatagagaataagactaaatctactgctcaaaatagcggagccaatgacaattcaaatgctaatgaaatagttaataaagaagtgaatactcaagatgtgtcggacggaatgactacaatgtcaggtaaggaggttggagtatacgatatcgccgatggtcagaaaattgatataacatctacaaaaaatgagcttgttattacgtatcatggcaggctgagaagcttttctgaagaggatactcataaaatagaggcttggttagaagacaaaatcaatagtaatttattgatagaaatggttattcctcaggcagacatctctttctctgactctttacgactgggatatgaacggggaattattttaatgaaagagattaagaagatatatcctgatgtagttattgacatgagtgttaactccgcagcatcaagtacaacgagtaaagctattatcacgactattaataaaaaggtgtcagagtga

SEQ ID NO: 373956 - DNA, 558 bp, Salmonella enterica
atgaaacgcaacgtactgttattaccgctgctgatttttctgctgattgccgcggcgctgctgtggcagctggcgcgcaacgcgcagggggatgacccgacgaatctcgaatcggcgctgaccggaaagccggtgccggtgttccgcctggaatcgctggagacgccgggtcagtactatcaggcggaggtgctgacgcaggggaaaccggtgctgcttaacgtctgggccacctggtgcccgacctgccgcgccgagcatcagtacctgaaccagctttctgcgcagggtatccgggtggtcgggctgaactataaggacgaccgggcgaaggcggtggcctggttaaaagaactgggcaacccgtatgcgctgagtttatcggacagcgacgggatgctggggctggacctgggcgtgtacggcgcgccggaaaccttcctcatcgacggcaacgggattatccgctaccgccatgcgggcgatttgaatgcccgggtatgggaaagtgaactgaaaccgctgtgggacagatacagccgggaggcggcgcaatga

SEQ ID NO: 373957 - DNA, 1932 bp, Salmonella enterica
atgatgcctgaatacggccacgcgctgctgtgcctggcgctcggcgtggcgctgctgctgtccgtttacccgctgtggggcgtggcgcgcggcgacgcgcggatgatggcgtcggccggggtgttcgcctggctgctgtttatctgcgtggcgggcgcgtttttcgtgctggtgcacgcctttgtggttaacgacttcaccgtggcctatgtcgccggcaactcgaacacgcagctgccggtgtggtatcgggtggccgccacctggggggcgcacgagggctcgctgctgctgtgggtgctgctgatgagcggctggaccctggcggtggcggtgttcagccggcaggtgccggcggatatcgtcgcccgggtgctggcggtgatggggatggtctgcgccggttttctggcgttcatcctgttcacctccggcccgttcgcccgcacgctgccggcctttccggtggaggggcgcgacctgaacccgctgctgcaggacccggggctgattttccacccgccgctgctgtacatgggctatgtcggcttctcggtggccttcgccttcgccatcgccgcgctgctgagcgggcgtctggacagcgcgttcacccgttttgcccgcccgtggacgctggcggcgtgggtgttcctgacgctgggcatcgtgctcggctcggcgtgggcctactacgagctgggctggggcggctggtggttctgggacccggtggagaacgcctcctttatgccgtggctggcgggcaccgccctgctgcactcgatggcggtcacggaacagcgcgccggctttaaggcgtggacgctgctgctgtccatctgcgccttctcgctgtgcctgctgggcaccttcctggtgcgctccggggtgctggtgtcggtgcacgccttcgcctccgacccggcgcgcggaatgtttatcctcgcctttatggtgctggtcaccggcggctcgctgctgctgttcgccgtgcgcgggcacagggtgcgttcgcgggtgaacaacgcgctgtggtcgcgcgagtcgctgctgctcggcaacaacgtcctgctgatggccgccatgctggtggtgctgctgggcaccctgctgccgctggtgcacaaacagctggggctgggcagcatttcggtgggggagccgttctttaacaccatgttcacctggctgatggtcccctttgccctgctgctgggggtggggccgctggtgcgctggggccgggaccggccgcgtaacatcaggaaactgctgtgggctgccgttgtcaccaccctggtgctgtcggtacttttgccgtggctgctggaagataaaatcatcgccatgacggcggtggggatggcgatggcctgctggattgcggtgctggcggtggccgaagccgtacagcgcgtgtcccgcggcacgaaaacctctctcagctactggggaatggtggcggcgcacctcgggctggcggtgacgattaccggcatcgccttcagccagaattacagcgtggagcgtgacgtgcggatgcgggcgggcgacagcgtgaccattcacgactaccgcttcaccttccgggaggtgcgggacatcaccggccccaactaccgcggcggggtggccctcatcggggtgacgcgccacggcgagccggaggcggtgctgcacgcggagaaacggctctacaacaccagccggatggtgatgaccgaggcggcgattgacggcgggctgacccgcgacctgtacgccgcgctcggggaggagctggacaacggcgcgtgggccgtgcgcctgtactacaaaccgtttgtccgctggatatgggccgggggactgctgatggcgctgggcgggctgctgtgcctggcggacccgcgctaccgccgccgtaaaccattgccggaggccggatga

SEQ ID NO: 373958 - DNA, 1776 bp, Salmonella enterica
atgaccattgccattaccgacgtcgtcctgcgtgacgcccaccagtccctgttcgccacccgcctgcgccttgatgacatgctgccgattgccgccgcgctcgatgacgtgggctatggctcgctggagtgctggggcggcgccacctttgacgcctgtatccgctttctcggcgaagacccgtggctgcgcctgcgcgagcttaaaaaggccatgccgaagactcccctgcagatgctgctgcgcggccagaacctgctcggctatcgccactacgccgatgacgtggtggaacgcttcgtcgaacgcgccgtcaaaaacggcatggacgtcttccgcgtcttcgacgccatgaacgacccgcgcaatatgaaggccgccctgcaggcggtacgcagccacggggcgcacgcccagggcaccctctcctacaccaccagcccggcccacaccctgcagacctggctggatttaacggagcaactgctggaaaccggcgtcgattccatcgccatcaaggatatgtccggcattctcacgccgatggcggcgtatgagctggtcagcgaaatcaaaaaacgttttgaggtgcgtctgcacctgcactgccatgccaccaccgggatggcggagatggccctgctgaaggctatcgaggcgggtgttgacggcgtggacacggcgatttcctccatgagcgccacctacggccacccggccaccgaagcgctggtggcaacgcttgccggcacggaacacgacaccgggctggatatcctgaagctggaaaatatcgccgcgtacttccgcgaggtgcgcaaaaagtatcacgcctttgaaggccagctgaagggctacgacagccgtattctggtggcccaggtaccgggcggaatgctcaccaacctggaaagccagctgaagcagcagaacgcggcggacaaactcgaccaggtgctggcggaaatcccccgcgtgcgcgaggacctcggctttatcccgctggtgacccccacctcacagattgtcggcacccaggcggtgctcaacgtcctgaccggcgagcgctacaaaaccatcgccaaagaaaccgctggcattctgaaaggcgaatacggccacaccccggtgccggtgaacgccgcgttacaggcccgcgtgctggaagggggcgctccggtgacctgccgcccggcggatttactcaaaccggaactggctgaactggaagcggacgtcaggcgccaggcgcaggagaagggcatcactctggcgggaaacgccatcgacgacgtgctcaccgtggcgctgttcccgcaaatcggcctcaaattccttgagaaccgccacaacccggcggcgtttgagccactgccgcaggcggaagccgcgcagccggtggcaaaagcagagaagcctgccgcctccggtatctataccgtggaagtggaaggcaaagcctttgtggtgaaagtcagcgacggcggcgatatcagccagcttactacggctgttccggcggcctcttccgcaccggttcaggctgccgccccggcaggcgccggcaccccggtcaccgcgccgctggcgggcaacatctggaaggtgattgccaccgagggccagacggtggccgaaggcgacgtgctgctgattctggaagccatgaagatggaaaccgaaatccgcgccgcgcaggccggcaccgtccgcggtatcgcggtgaagtccggggacgcggtttccgtcggcgacaccctgatgacgctggcgtaa

SEQ ID NO: 373959 - DNA, 639 bp, Salmonella enterica
atggccgaaccgataacccccgccacgttcgggcccatcgcgtgcatcagcaggaagttctgcgggtctgattccagccccactttgttcgatacgcgggccgccatcggcactgccgacacccccgccgaaccgataagcgggttgattttgttcttactgcacaggttcagcagcttcgccatcagcaccccggccgccgtcccaatcccgaacgcaatcacacccagcagcagaatgcccagcgtctgcggctgcaggaacttatccgcgaccagcttcgcgcccaccgacagcccgaggaagatggtcacgatgttaatcagcccgttctgcaccgtgtcgctcagacgctccaccacgccgctttcgcgcatcagattgccaaagcagaacatccccagcagcggcgcggcgtccggcagcagcagcgccaccagtagtaacagcactaccgggaagaggattttttcccgcttactcaccgtgcgcagctgcaccatgcggattttccgctccgtctccgtggtcagcgctttcataatcggcggctggattaacggcaccagcgccatatacgagtacgccgccaccgcgatggcccccagcagctccggcgccagcttgcccgacaggtaa

SEQ ID NO: 373960 - DNA, 1968 bp, Salmonella enterica
atgtatcatacctccagaaaatcagtaaaagggaaagttgtagttaaagatattcttgttcataacttccctattattccagtagaaattattacggctcttgatggcacaactgacgaatcagtaacctatattaaatttgttttcaagagcatcgacggcgaatttaaagaggttattattccttctggtgctgctaacgattttaaagaagttaaaaaggcgggattccttgctccttccccattaaaccattcaaaagtattatctcttattaatgatgttatttccaatggctcgttaaccaaaaaaacgggctattcacaatgtggctggacaagtgatttaatgcaccatatcagaccagataacgatctgtatgtgggtaagaaagttaaagttacagaagtaaagggaagtgctgatttatatttttcaatgctttctgaatttattcttaattgtcctcagatggcttttgggcttgcttttgctgctatgggatatatgcgtggttatattactgtaacagcacttacaccattttatatcttatatggtagtcctcacaagggtaaatcaaaaacctgtcagcttatcgccagcttacagggaaacccgatgaaaggaaaaggcaataatattgattacaacactactatggttggttttcataagtttcttgcaaacaataaccacggtgttttagttgttgacgaattagataaccttttgcttaaaaataatgttgcaggtgcaacacttattatggatatttcgaatggtggtggtcgcggttactctgaccagtacaggaatacttaccagggcgaaagctggaacaactctgttattgcttcaactaacctccgcattgaagatgtggcaggtggaacaatgaaagaacaagctttgttcactcgtttgatgcaaatcgatgttgatgaccctgttttacataattataaaggtggtcaatacagacttgaacaactcagtcagatcatgagtgagaactacggacatttttatccgaaagctattgaacaaatcaaagtcaaaggtaaggaatataaagcaaggcttaacgaactgttaaaagaactgactactgacattaagcttgttgacttgcagaacgaacctcgttcactggaaatgctggctcttgctcaggttggtgctgaacttgtcggtgatgtattaggtgaaaaagaaggtgcagcttgccaggcagcggttgacatcatcattgaacgatttaagagatcggaagacgaactgatatccagaaagcaaaatgaagatgcgaacacttatgaattgttaaaaagcttcattacggataatgctcaaagatttcgctgggaaacctatgcttatgctcagggtaatcgtcttgatatgaaaaagtctcaaattgaacaggctattgaatattctaataatgcaactaaatcaaacactggtgcattaggagtagtcgttcttaatgagattatggatcatgacctggactacaacggctatgttttactcaatccaagtgctttcgatagcctttctcgtcattacagcatatcaaaggataagttgataaccgccactaaaaacctgaatgtgttgagagagcagggtggaaagagcacttataaacttagtgaaaaatataaaacaatgctttctggtgttagtcgtgcttttaaaattgaacttaaagacattaacaagattttgaccgtagaagaacatgatgaagttgcaccagaagaaaaattgaaggaagttgtacccgcgaaagagtcagatttcacgacagagcaccttccagagcacgggaacgggcaactttcccctgaaatggaacaacagttagacaaaatcatggaagactatgacaaattcggctttaccgactgggataacataggagcttccattcaaaatacaaccaacaaaggagagtga

SEQ ID NO: 373961 - DNA, 261 bp, Salmonella enterica
atgaaagacagatacacccttaaccagggcagaaatgcccttatagacagtgaagcagatcagccagtcaggattttttttaccaacaatgtttatgtgtgcaagactcaaacaggcatgtttaaggagcgaagccccgaagaactggcaagattgcttaaccgaacggcaaaccagcaaaaggtatcggcgggttttaagttaggaagacccagaacggcagaggaactatcgaagctgttagagaagaaccagaaataa

SEQ ID NO: 373962 - DNA, 252 bp, Salmonella enterica; identical to SEQ ID NO: 234692

SEQ ID NO: 373963 - DNA, 2280 bp, Salmonella enterica
atgagtacaaaaaatatgacgaggtgtttaggaagtatattcttacttctttcactaacaacacaaaatgcttatgcagaaggttttgatctctttaaacccagcgatgataactggttaattaaacatatattccttcaattattctatcctgatgtatcgccacttggtcccatttcagaagttttccttgcaggtattcttgcttttgggggaatccttgcagggtataccatgcttgccggcacactacacacggcgaacgatggggagatgttaggtaagaaatggtcttctctctggatacctatcaggacaaccctgggtgtgtctatgattttaccaatcaagggcgggttctgtgccattcagttagttctcatctggattgcagtgcagggtatagggcttgcagatcagacctggagtgcttttgcggaaaaccccttgaagggttcagtcgttccacaaccttacattgataaacaagtcaaagaactctataaagctggggttatggggtatgcctgtcttgcagcaatacaaaaagaccaggatgaaaatgaagctgatgcaaaatcagcaggaatcattgataaattattgaaaccttcaagagatgcctggaatccgggtatcactacaaccacttcaaaaggagctaataatagtcaaagacttacgattgagttcggtaataaaaacaatgaagtatatagaaatgtttgtggttctatcacatatgatatgtctttatctgcaactcaatcagtatcatcggctccggcagcggcattagatttagttgatttagataagattcaacatgctcttgttcctgtgcatgtaacggcattgagtgcattactggcaagatcaagtcaaataggtaataagcttgttaattccgatgaaataacacctgaaagccttgcttccgatatgaatacagctactgatgcttataaggtcgctattgctcttgcagctaacacggcttaccaggatgcaatcagtaaagatgcggttgaagcaatgaaaaaagacgggtttgtttccgctggggcatggtttatcagaatagcttcggcacaggatgcagtaaatgctctcgctaataatgttccaatgggtacgggtccgggaagctatttagaagagtcaactggttggtggttcgacacttctgggaaaacaaattacccatctgttgagaaagttatcaaaaaaacaaaagcatattttggtaaagcaaatatgataaataataacagtgccagtggtgcaggtgtaggtgctgatggtgaaattaatcttttagataaattactggcttatatttccccttctgaattaggtgcattgtttgattctcagtctatgacttctaaccctgttattgcaattgtcagcattggttctaaattaatcaattttgtaatagtaacagcctcagcaatagtagcgggtatcgtggttgtaggtactacttcattagtggcaagtggtggtgtaattgcaggggtaacttttgcaacacctttattggcaagtcttcttggaactcttttgtggaacggggttaagatggcatatgtccttgtctggaagccattcataatatggtgtggagcggttattggttggttaattcttgtcgtagaatctctttttgctggtccattatggatggttgctcaccttgcccctgatcaggatggtgttgtgggtaaaatggggcagggatatatgttagttctttcattgttccttcgtcccgttctaatggttataggattcgttgcggcattatcacttatgacaccatgtcttatgttcataaatgcttttatcgcttttaacggtaatgcaattggtgtaggtgcggcggctttaatcggtaagattgtaatgataagcatctaccttaaagtagttgaagaagtaatgaacaaactattcggattaattcactctattccagatagtatcttgcaatggatcggtggtggcttatctcgctctatgggtgattatgcaaatggtattgaagcaggttctacacaaaacactgaaagatttggtcaaggtatgagccaggttaatcaggcagtaaccaatgcaggaactgataaaataaaaagagttggtgctgaaaggaaagaatcacttaaaggtaatatgactaatgccagtgcaggcgacgaaccgggaagtggtgcaggcaacaaaacaaaagcaagtgaatcaccaggcaacaagccaaaaacaaaaggttaa

SEQ ID NO: 373964 - DNA, 798 bp, Salmonella enterica
atgaatcttgagtccttaccgaaatatttttcacctaaatccatgatgcccggcgcagtaccatgcggaataacgtctgatacgctgactattactgacgtaatggcatccctcgggctacttactgcaaaagccgcagtgggtattgaattgtatcttgcaaaagctggggttttatcttctgaaaatatcatcgcctatatcaggctattagcagagcagcgtgcagaacggcatggggcattacggaaaatggaagagggtaagcgttcaaaatttctcgacactatggcgcgttatgtatttcgcgattattccctcagcgcggccagcctggtgacgtgcagtagctgtcatggtgctaaattaattgatgctgaggttttcacgaacaaggttacctatccggatggtaagccaccaaaatgggtaaaagatacgaaaggtatttctccgtccgactgggaggtgtggaaatcagttcgtgagcaggtgcgcgtagtgtgtaaggcgtgtgatggcaaaggccatgtgaaaaatgaatgtcgttgccggggacgcggagaaattctcgataagaaaaaatctgagttgcagggcgtgccggtttataaaaaatgcccaagatgcaagggaagaggctacccacgtctcaaagataccgagatttttaaagcactaggagtaacggaaatggtatggcggtacaactataaactgtttttcgatcggctggtggagcattgccatattgaggaatcgtatgcagaaaaggttctgggaaacgtgactcgatga

SEQ ID NO: 373965 - DNA, 126 bp, Salmonella enterica
atgaaaatgcacaacgatccccattcaatggactcacaatctatttttgctggctcacaattactgccaatggaaaaaacttctcatttggctctgagcgtcggatttcgctctcacttagcgtga

SEQ ID NO: 373966 - DNA, 1278 bp, Salmonella enterica
atggacgaggtacagaccaaagcgccgctggacagtccggcactgactggtacgccaacagcaccaactccggaaaccgcagctgcaggtattgaaattgccacggcagcgtttgtggctgcgaaagtggcgcagttggttggttctgcgccggaaacgctggacacgctgaaagaactggctgacgcgctgggtaacgatccgaactttgccaccactgtactgaataaactggcgggcaagcagccgctggacgatacactgacggcgctgtcaggaaaaagcgttgacggtcttatcgaatacgttggtttacgggaaaccataaatcacgccgccgatgcattactaaaatcacagaacggtggcgatattccggaaaagccgctgtttgtacaaaatatcggagcgctccctgcatcaggtacggctgttgcagcgaacagactggcatcacgcggcgcgcttccggcactgactggtgcgacaagaggcagcgatagcggcctgataatgggcgaggtctacaacaatggctatccgacgcaatacggaaatattttacgtctgaccggaactggtgatggggaaatcctcattggctggagcgggacaaacggtgcgccagcgcccgcatatattcgcagtcatcgagataccgccgatgctgagtggtccgaacgggcgatgctctacacctcactaaatccgccaccgaattcgtatccagtaggtgcggcgatagcatggccgtctgatgctaccccagccggttacgccctgatgcaggggcaatcgtttgataaatctgcttacccgttactggctatagcgtatccgtccggcattatccctgacatgcggggctggacaataaagggtaagcccatcagtggacgtgctgtactgtcgcaagaaatggacggcaacaaatcgcacagtcacagcgccagagcgcaggatactgacttagggacaaaatctacctcatcctttgattacggcacgaaatcgaccaataccacgggcaatcatactcaccagttcggcggttatatcaattcatactggggagattccaatcacacctcatttcagcctggaggtggtgcatggacacaggccgctggcgaccatgcacatacagtttatatcggaggacatgagcacaccatgtatataggtccacacggacacgtcgttattgtggacgcagacggtaatgcggaaaccacggttaaaaacattgcatttaactacatagtgaggctggcataa

SEQ ID NO: 373967 - DNA, 243 bp, Salmonella enterica
atgactatgtcgcgcgtaatttctctggcggcagggctttccctgtccgttttattttccactgctgccgttgccgataacggaagaggaagcggcaacagcaatattgaaaaccagacccggatttataccggcaccgaccgtgggcagaaacagcaccgcgaggcaaagggaaaaacaatcacgcggagcgtccagtgttctctgccggcatatttacgtgacccggataatcagtgctga

SEQ ID NO: 373968 - DNA, 783 bp, Salmonella enterica
atgtggggcgtcaaaatagagcagaccaaagacggcaaatattatgtggccggacttggactgagcatggaagacacgcctgacgggaagataagccagttcctggtggcggcggatcgcattgcttatattaacccggcaaacggaaacgagacgcccggattcgtcatgcagggcgaccagataatcatgaatgaggcgttcctgaaatacctgagcgcgccgaccattaccagtggcgggaatcctccggcattttccctgacgcaggatggaaagctgactgcgaaaaatgcggatatcagcgggcatattaacgctgtgtctggctcgtttacgggagaaatcaatgccacctccggtaagttttctggcgtgatagaagcaagagagtttgtcggtgatatctgcggctcaaaagtcatgcagggcgtgagcatcagggcgacgaacgacgaacgcagcacctcaacacggtataccgacagcgccacctatcagatagggaaaaccatcacggtgatggctaactgtgagcgtaacggtggcaccggtgccatcacagtcacgataaatattaacggccaggtgaaaacgggggaggttatgccgtataccgcagggcttccggccatgtatcagaccgttgtcttttcggtctacaccacttcacctgtcgtggatatcagcgtctctctgagggtccgtgggcagtacaccacgtctgcttccgtctggccgctggtgatggtttcccggtcggggagcaacttcacaaactga

SEQ ID NO: 373969 - DNA, 489 bp, Salmonella enterica
  misc_feature (420)..(429): n is a, c, g, or t
atgttgcttactaaaatctacatgttcgttgagaccttttctgcaactgtcattagtcccctcccaatcactgaccaggtttgggttaaaaccgatactggggatgagacacagattccagcctttggtatcgcatttagaaaatctcacaaaatgtgtaaatacgagcttcgccagtatagagttgatggttcatttagtgtcttcaaagatgctctcattgttaatgcaaccactggtgaatacgaagtcaacttagatagaaagacagttattatcccggcgtttctcaccgtacttttccctaacacttcgatggcattttattttagggcgatgcctgttcctaattttttttcgaccatatttatcttgctttgttgcactgcagttgtttcattttttgtgttgccatggggnnnnnnnnnnacttggtgctttgcggggcgtttaagaattgggattttaagttgtttcagcagacgataa

SEQ ID NO: 373970 - DNA, 942 bp, Salmonella enterica
  misc_feature (837)..(846): n is a, c, g, or t
gtgttgcatgacgatgcagtcggtcaacacatccacattatcgccagccgcatagaccgtaatacaggcaaactctatctcggaaaaaatgaaaacctgattagtacacgcattatccaacagcttgaacacgactattcgctactaagaactaaaggccctaaaacaaaaacctcttcagcattgccctgccctaaactaaaacgaaaaaaaacacgaaatgaagcgatgcaagagaaaaggacaggtgaacaatgcccaaaaaccatcatccagaacgctttagagacgttagtttctaaaagagtatcgaccactgagtttgtccaacagctttttgaacgaaatattaatgcattacccaatatcacatctacaggtaaaatgaatggtttctcattcgaatacgccgggattgctttcaaagcttcgcaattagctaagtgttattcatggtcgaccttgcagggtaaactcgattatagaccggaacgcgataacggctttctgtttgacctaaaagcaactatcactaaagcgaatgcaaacgaaatcttaaaggaaaccgttaaaaactccttcgaagcatttattattgataggcatgcaggtaaagacgaaagtgctgtcgcttatgtagaagagaagtgttcctcggaagctttagcagggagtaataaagcgataacaactaaagccgtaaaagagatgcctaatcaaagctacgaggtctcagcattcagatggatggaaaccataccttaccttgatacgatttatcgtctgctgaaacaacttaaaatcccaattcttaaacgccccgcaaagcaccaagtnnnnnnnnnnccccatggcaacacaaaaaatgaaacaactgcagtgcaacaaagcaagataaatatggtcgaaaaaaaattaggaacaggcatcgccctaaaataa

SEQ ID NO: 373971 - DNA, 186 bp, Salmonella enterica
atgatcaggaatgtttatcttaaaaggcgtgttttctttaaagtactgttctatttttttgtaacgttcttgtggattatcaattggcgaagatggagctataacgtcaatgatacaaactgctacaccagttgttttcaaaagaaattcacggcgagttaccattatacgacctttttagtgtag

SEQ ID NO: 373972 - DNA, 354 bp, Salmonella enterica
atggagataagtttgaaaacttctgttctcattcagaaactgatggagattgataaaactgtgccattcgatgcggatgtagtaaccggtgaagagtggtggccaatcccgatttctcgtgtctatcacaatccaccccatacttttgtcgaatttgaaacaggcgaacaatcccaagatgaccctgatgagctgaccatttatagtgaattagagatccgagtacaccaaatgatacaaatcagagacttcgtgcaatccaacaaaaatctacaacctgaagaaattatctcggagttaaacgttcagattgagcgtttaagggcaatggctgaggcaaatttgaagcaataa

SEQ ID NO: 373973 - DNA, 1251 bp, Salmonella enterica
atgatgataattatttctttgacgatcttaattattatccttacctactttatagaaattaattcagtggttcatggtcagggcgttatcactactaaagataatgctcagttaatatctctttctaaaggagggacgatacaagatatttatgtagccgagggtgatactgtaaaaaaaggagaactccttgcaaaggtcgttaaccttgatctgcaaaaagaatatcaaaggtatagaactcaaaaagggtatctggataaagatgttaacgaaatatctttcattcttgataaagaaaatgagagtgggttgattaccctggatggcacccgttctttaagcaataaagaggtaaaagcgaatattgaattagtgcatagtcagataagagctaaagagttaaaaaaaacctctcttgattctgagattagcggattacaagagaagctgagttcgaaagaaaaagaactcgcattgcttgccgaagaaataaatattctctccccactggtaaaaaaaggaattagcccatataccaattttcttaacaagaaacaggcgtatataaaagttaagtctgaaattaatgatattgaaagtagcatcactttaaaaaaagatgatattgagttggttgttaatgatattgaggcgcttaataatgaattgcgactatctttatctaaaataatatctaaaaatcttcaggaacttgaggttgttaactctacattaaaagtaatagagaagcagataaatgaggaggatatctattcaccggttgacggtgtaatttataaaatcaataaaagtgccactactcatggtggtgtgattcaggcggcggacttactttttgaaataaaaccaaaagtaaggactatgctggccgatgtgaaaatattacccaaataccgtgaccaaatatatgtagatgaagccgttaaactggatgtgcagtcaattatccaaccaaagataaaatcgtataatgcgactatcgataatattagccctgattcctatgaggaaaataccggaggaacaattcagcgttattataaagtaattattgcattcgatgttaatgaagatgatttacggtggttaaaaccaggtatgactgttgacgccagtgtaattaccggaaaacacagcattatggaatacctgttatctcccttgatgaaaggcgtggacaaagccttttcagaaccagttaatactaaacgattagatacaccttga

SEQ ID NO: 373974 - DNA, 504 bp, Salmonella enterica
atggacgatatgataatcaggtctgttaaatcagctttgaagcacagcaaaagaaagggaacgacagctatggacttcctgttaaccgatagccacacacagttgaagctggacgacagatacggggggatagctgatacagggcatatgttcgctatcctggtggaagatcactacaagaagaagtttaaggacataacaagaaaggggaatgtagtaaccattaaggtagcaagagacatactggtagggttcagattcagctactcgccaggctctctatccgtttactacaaaatcagggttaaaggaaaaaattataaggagggaataaaggtaattgatgggtttaacagaacatcagaaagcataataaacaacatcattaacaaagcaagacagcaaatcgtttcaataaaatttattgctggcatgactgttttagccatatctggtgtgggaatgttttatgcaatatttaatttaaatacactaatcacataa

SEQ ID NO: 373975 - DNA, 594 bp, Salmonella enterica
atggcgaaatttaatctcattggtaagaatcccgaacaagcccaaaaatactttaccttctggaaaattgttaatgctggggaagaggaacagtatcagaaagctatggagttatctcttgaaccagggttcaacatgaataagacaaaaaccaatggtctattttttatggaagacatgatgatctcttgccgtaaagagttcttctccttgttcatggacacacatcgtcaaacggtcaaataccacttatcccgcagatcttacactatcccggaactggtcattgcaagatacatgggtagttataccaggcttgcaagtgatgaagaaaggatagaccacttaacagcaaacattgtctgttttctcgatgccatgttggccaccggcacacataagcgattacagcacctggacagctacgagaagcttatagcgaaggtggaagagtattacatgggggttatagccgatttgccgtctgtaaggctctatgaggctctcaaagcgaaagcggcaggtaatgagcaagcggagctgaaggaagtcatagcagcgacgacaggaacgacgaagaagagaagactgtaa

SEQ ID NO: 373976 - DNA, 354 bp, Salmonella enterica
atgaatttactacacttcattgaaaccaaagtctttcagagagtaatcgatggattgctctcacccgacgaactccgggagtttcaggaagtgttaaggcaagatcctaccgctggcgataccatatcaggtacgggcggttgccgtaaaattcgctgggctttgcctggtatgggtaaaagtggtggtatcagggtcatatactactatctgacagcagataacgaagtattccttcttatcgcttatcctaagaacgagaaagacaatctcactaatgctgaaaagaaccagttgaagaaagccgtagaaggtatagagcaagcctcccaggaggcaagggggaagaaatga

SEQ ID NO: 373977 - DNA, 291 bp, Salmonella enterica
atgagaaaagaactctttgacgacctgatcgagagtgtcaacgaagccgtagccatcaaacggggtcttgttgccccagctcgtgttacgacctttgagatgcccgatgtgaaagctatccgcacgaaagcgaagctcaaacaaaatgagtttgcccaggtagtgggtgtctccccttctctggtgcaagcctgggaacagcaaaagagaacacccacaggcagcagtcttaaactgttgcgggtcattgaaaagcatcctgacatgcttaacctgttcagaacagcataa

SEQ ID NO: 373978 - DNA, 696 bp, Salmonella enterica
atgtattttcgtttatttgctttcgattatctcagcaagaaggtaaacaccttactttatttggatgccgatgttgtatgcaaaggatctttgcaagatcttctacaacttgatttgacagagaagattgctgcggtcgtaaaagatgttgattccatccagaataaggtaaatgagagattaagagcatttaatttacaaggtggttattttaactccggcgtggtttttgttaacctgaaattatggaaagagaatgccttaactgaaaaggcatttttacttctggcaggtaaagaagctgactcttttaaatatcccgatcaggatgttttgaatattctcctacaggacaaagtcatttttctaccgcgaccgtataataccatttatactatcaaaagtgagttgaaagataagtcacataaaaaatatagcaatataattaatgataatactgttttaattcattatacgggcgctacaaaaccatggcatgcctgggcaaattatccttcagttatctattataaaaatgcacgactgaactcgccctggaaagattctcctgcaaaagatgcgcgtaccatagtcgaatttaagaagcgatataaacatcttctcgtgcagggccattattttaaaggcctgctggctggaagcgcatatctttatcgtaaacttttccacaaataa

SEQ ID NO: 373979 - DNA, 636 bp, Salmonella enterica
atgaaatggggctatgatatgacacagcttgatgattttggtataccccatattgctaacttcggtaaggaagcactatcagaagtgataaagaacggattagatatgagtcaatttacaagagatgatcattttgattttaatcataaccatagattctctcgttttataaatacaagtgaaaaacttgaagtctttcttcagtctggattaataacacctgacaccataaaagactatgaatgttttgaacatcacaaactttataacaaacctgatttaaatctaactgataagggattcgaactgctttttaaatgctatgacaccatatcattaaacaccgaaatgatgagttcatatagtattttttcaggggaaaccagaactaacccggcagtatttatattaacagacaatgataaacatttagatcatttgtttaaacgatatatagaagtgagtccagataaaattgaagctgttaacttcataaaagacctgttccagaaatcagaatctcacgatttgaacagtgggaactatcctaatacagttacgacaatagaagataatgaaatacagaatgtattcaaacaatcacaaccaaaaaccattaccagaagacgaatgtag

SEQ ID NO: 373980 - DNA, 681 bp, Salmonella enterica
atgaacgctctatacctccagtatgtacgtgaacagctaatggtagcgacagccgatttaagcggggagactaaagggcagcttttggcctggctggagaacgcgcaattcgacacgaaaaactatccccgaaaaaaacagcgtatctgggacgaggaaacagaaagctggataacgttaaataacccgccaatccccggcaagcagtcgctggcgaaaggaagtgctatcccgctggtaaagcctgtggaatattccactgcctcatggcgccgggcggttctttcactcgatgaacactacaaggcgtggttgttgtggaattacagtgagaatacctgctgggaacaccaggtcgaaataacacgttgggcgtgggagcaattcagccagcaactggagggtaagcgggtagctaaaaagactattgaccgcctgcgccagcttatctggcttgcagcgcaggatgtgaaatcggaattagctggccgtgatgtctatcagtatggtgatctcgctgcactggtgggcgttaacaaaacaaactggtctcaaaattacgtggagcattacgaggcaatgaccagactgtataagagattagactcccaggcactacatcacgttgtacaatcacgttcacagcaaaaagcagcaaattatcagcaatgtattgcataa

SEQ ID NO: 373981 - DNA, 267 bp, Salmonella enterica
atgcgaataataatcaggaagaaacctgcgttcactgacctgtaccagactggtgttctgacgcgtatagcagccgttaagactgacagtggcggctggcgcctgtttggagtgtggcgtgatcaggatatcgctgtatttgtggaagcggcgcgcggcggcatccgggaatggtccggtttaaattatctggctgagtttgtgttcagttgcggcattagtctctgggaggttcacaacaagacggatcggaaaactccggcatga

SEQ ID NO: 373982 - DNA, 366 bp, Salmonella enterica
atggtaattattgataaagtagcgaccgggaaaacaaattttctaaatcgtattgttaaagaccatccagattcaattttaaacttagacagtgatttttatttcgctgggaaatcttcctacttgtcagcaatcaatgaagcagaagaaaaagggaagtttattattatgtctggtagctatattggtgatacagaaaagagtgaactggttaataaaggctatctggtgttccattcaatagctcaggcgatgttttactattcagaacatttaagccctgaatcaatcgcaagaaaggaacagcaagctattaaacaaattatgacgggtgaaagactcacccataaaagaaacagattataa

SEQ ID NO: 373983 - DNA, 306 bp, Salmonella enterica
atgaatactgaaaaatatgaaactattgaagaaaagatcctgactatttactctggcaaagctgaaaaactggctcaaagaaaaagtgctgttcttaaagaactcattacggctaacaatgcgaaagctattgaagaacttaccagagaaagaatggttatcgacaaaaggctttttgtctgtaaaaacatactcaacagtattcgcaatgcttcatccaagaagaatgaaaacttttcaaattatgttgtcgtgctttctaccgaagcagcaagattaaacatgctgacaccgtacaccgtttaa

SEQ ID NO: 373984 - DNA, 483 bp, Salmonella enterica
gtgctcaccgtggcgctgttcccgcaacccggcctcaaattccttgagaaccgccacaacccggcggcgtttgagccggtgccgcaggcggaagccgcgcagccggtggcaaaagcagagaagccggccacctccggcgtctataccgtcgaagtggaaggtaaggcctttgtggtgaaggtcagcgacggcggcgatatcagccagcttactgcggctgttccggtggcctcttccgcaccggttcaggccgccgccccggcaggcgcaggcaccccggtcaccgccccgctggcggggaatatctggaaggtgattgccaccgagggccagacggtggccgaaggcgacgtgctgctgattctggaagccatgaagatggagaccgaaatccgcgccgcgcaggccgggacggtacgcggtattgcggtgaagtccggggacgcggtttccgtcggcgacaccctgatgacgctggcgtaa

SEQ ID NO: 373985 - DNA, 282 bp, Salmonella enterica
atgaacattccccgctatttgggcagaaaattggatgatagtttaccagattttgtgacctttgtggtgagtcgattctggaattggggaaaaagagacaacaatccgcatttcatcgtgacagataaatgcattgcccataaaaaaacccgccgaagcgggtttttcgctaatagttgtctgccgaagcagaaacccattaacgtttggagaactgcggacgacgacgtgctttacgcaggccgactttcttacgttcaacctgacgagcgtcacgagtaa

SEQ ID NO: 373986 - DNA, 939 bp, Salmonella enterica
atgaatactcttgttctccctaaaacacagcatttggtggtctttcaggaagtcattagaagtggttctatcggttctgccgcaaaatcgttagggttaacccagcccgccgtcagtaaaatcattagcgatgttgaggcctattttggcgttgagctaattgtacgcaaaaataccggcgttacgttgaccgaagcgggacaggtactgctttcctggtctgaatctatcacccgcgaaatgaaaaacatgatcaacgagatgaacagtatgacgtgcaataccgttgtcgacgtctcgtttggttttccttcgctgattggctttaccttcatgtccgatatgattcataagttcaaagaggtctttccaaaagcgcaggtatccatgtacgaagcccagctctcttcattcctgccggccctgcgcgacgggcggctggactttgctattggtacgctcagtaatgaaatgcagctacaggatctgcatgtcgagccgctgtttgaatcagagtttgtcctggtagccagcaagtcccgaacatgcaccggcaccatcacactggaatcgttaaaggacgaacagtgggtgttgccgcaaacgaatatgggctactacagcgaattactcaccactctacaacgaaatggcatcagcatcgaaaacattgttaaaacagattccgttgtcacaatatataatcttgttctcaatgctgatttcttaactgttattccctgcgatatgaccacgccttttggctctaatcaatttatcacgatacccataaaagacacgttacccgtcgcacgttatgcggcggtatggtctaaaaattatcgtatcaaaaaagccgcttcagtattagtagaattggctaagcaatattcatcatataatggatgcagacgcaggcagttaatagaaattgaatga

SEQ ID NO: 373987 - DNA, 1569 bp, Salmonella enterica
atgtttttgcataacattaaaatacgttcaaaattatttatggcctttggcttattcattgttctcatggtggtgagttccgctctgtctttgtttagccttgatcgggctaatacgggtatgcaggacattattaccaatgattatcccaccacggtaaaagccaatctgttaatcgataattttaatgatttcatcatcgcacagcagctcatgttactggatgaagaggggcgctggagccagagctcgcagaaagaactcagtgagataagccagcgcatttcggcgttactggatgagctttccagggaaaatagtcacgatgcggattcacagaaaatcattaatgagatccgtgaagcgcgccagcaatacctggagtccagattccgtattttgaaagatattcaaagcaataatcgtcaggcggccattcaggagatgatgaccagaacggtgcaggtgcaaaaagtctataaggacaaagtccaggaacttatcgctgttcaggacgcgcagatgcatgaagcgagcgtgcaggtcaaagaggattttaaaaataatcggacgctgttaatcactttggcgctgataagcatcgccgccggaggcgtaatgggatggtatattgtgcgttctattacccgaccgcttgatgacgcggtacgctttgccgaggcgatcgccgatggcgatctgactcgtcatatcaccaccgactataaagatgaaacaggcgtactactgcaagcgttaatggcgatgaaaacgcgtctgctggatatcgtacaggaggtgcaaaacggttcggagagtatctccacggcggcggcgcaaattgtcgccggtaaccaggatttggcggcgcgtacggaagagcaggccagctcggttgaagaaacggcggcgtcgatggaacagattaccgccacggttaaaaacacagccgatcataccagtgaagcgaccaaactctctgccggcgccgccagcgtggtgaaaaacaatggagagatgatgaatcaagtgacgcagaaaatgcgcgtcattaacgatacggcaaatcgtatgtcggatatcatcaatatcattgattccattgcctttcagaccaatattctggcgctgaacgcggcggttgaagcggcgcgcgcgggcgaacatggacgtggttttgccgttgtcgccggagaggttcgccagttggcgcaaaagagcgcctcgtcagccagtgaaatccgtaatttgattgaagattcaaccagtcagactcaggaagggatgcacctggtggagaaagccagcgccctgattaatggcatggtggataacgtcgaagagatggatgtgatattacgtgagattgggcaggccagccgcgagcaaactgacggcatttcgcagattaacagcgcgattggcctgattgacgccgccacgcaacaaaactcctgccttgtggaagagtctgttgccgccgcggcgtcgctgaacgaacaggcgttacatttaaaagagctggttaacgtgttccgcgtccgcgaagaggacacgcagcccgcttaa

SEQ ID NO: 373988 - DNA, 1782 bp, Salmonella enterica
atgataactgatgataaacaaactaatgagcatttaagatcatacattaactattatactggtttgaagaatccaagatatgctgtattagttaagggcgagtggggtgttggcaaaactcatcttattaagaatatacttaaagatgatcaaaaattctatgtaagcctatttggattaactacaattcaggaagttcactccgctgtttttgttaaaatgtacccaaacagatcgcgattaaagaaaattttgaactggtttggtagttccagcatgaaagccaatgatgtcacactcgcattaggcccattagttggaaatattgctaacgctcttataaaagagaaagtggacaattcaaaaacaatagtttttgacgatttagaaagatgtagtataaaccttgaagatttattcggtgcaataaataaatacgttgaacatcatggatgtaaagtgattgtcattgctcatgatgataaattaaatgatgaattaacagacaagaaagaaaagatatttgggcaagttattaaagtaactccggatatagagggagcgttcaaccaattcattagcaaaagcaaggcacctatagcttttgaagccataaaggatataatttataaatcattcttagcttctgaatgcaaatctttaagaatcttagactacatgataaatgattgcgcgagattgctctcatgcattcccgataaactatataataataaaagactattatcagagatttttgtactatttaccgcactgaacattaattacagactaggtaaattaaaagcaaaagaaattgaatcaaggaattctgtcctttactacgtaaagaaagatactaatgcagatgatatttatgatgagataaaagagaattataaaaaccatgaagtcccattgaggttagaaagcgatttgctatcaaacgaagtcttgattgatactattgtaaatggcctttatgacaaagataaaatcacaaaaagcatagataacagtcggcattttattaaacctgaaagcaaaggcccatggtttacgatattgaactttgacttatacccaacaacagatgtagataatgctttagaagagctatataaacagtttgaagaaatgcagataattgaaaatggtgaaatacaacactcaataaacctattattcatgctatctgaagccaagcatatagataaaactatagatgatatatatcttttctttttagagtatgtaagaaaacttcagaaaaataataaattcccacccgcagacctttttacagagtatgaaccaattcgagactcagcatatggatatggatattggattaatgactcctataagcattactcctcaaagttaaacaaaattctagctcagcagcaacaaatagcattaagaaagagatatcctcaattcttagctgatttaagaaataatttaaaggaagacaccgcaaaattttgcgaacaaatatctagaaatggattaaaagatatcaatatatatggatatattgcaatactatcaagttttaagcctcatgagtttgtcgatatgtggcttagtattgatatgaccaattggcataatgttagaacagcactggtaaatcgatactctggcggatcattgcatggtgatttaacagatgaggggccatggctaaagtttgtcaaaatgaatatccgacatcgagcatctaaggcatctggtatagacaaattgagaatatcaaggctgttaattggactatag

SEQ ID NO: 373989 - DNA, 1038 bp, Salmonella enterica
atgccagttaggaaattagacaatggtcaatgggttgctgacttttacactgtagatagaagcaacggtaaacgcggcaagcgggttcgcaaaaaatttgccaccaaaggtgaagcgctggcgtttgaaaattacaccctccagaaagtggaggacgcaccctggcttggtcagggcaaagacaaacgccgcctgtcagatttgatacatctttggtttgagcgccatgggataaccctacgcgatggagagaagcgtaaaagcgccatgctttgggctgatgagtgtatgggttcccctatggctacagaattcaccgcacagttgtttaccgcttacagggctaaaaggcttgatggccattttgccagaactaagcgcgtaactcaggtatcgccgcgcaccatgaacctggagcacgcttatttcctcgctgtatttaatgaattaaaacgactaggggaatgggacgcgccgaaccctttagagaacgttcgtcagttcagaacagaagaaagtgagatggcttatcttactggagagcagattgaccggctcttagaggaaagccgccatagctctgctaaagatttagagctcattgttagaatttgcctgtctactggcgctcgctggggagaggctgagaaattgaagcgcagccaaatcactgctggaaaggtcacatttataaaaacgaaaggtaagcgcaaccgaactatccctcttgaccctaaaatcatagctgaacttcctaaaaagaacggcactctgttcagtccatgttactacgcatttagatcagctctggaacgagccaggatagatttaccggccggacagctgacgcatgtgctcagacatacatttgcttctcattttatgatgaatggcggaaatattctggtattgcaaaagattctcgggcataccgatatcaaaatgacgatgcgatacgctcactttgcaccaaatcatcttgaggaagcattaaaattaaacccattaaattttagtggtaaatataatgataactga

SEQ ID NO: 373990 - DNA, 567 bp, Salmonella enterica
atgatcgactacaaaacagcatcaaaagatcagttgaaagcagagatgaaacgcttggccagtgtggtatctgacaccccttttggtaccaaaaaagaatttttccatctcccggagattttaaattctggtgaacaaccagtggcaattgccagcggaatgatggatggcaacacatggctaataacccttactaacaaacgagtaatttttctcgataagggtatgatttttggcgttaagcaagtcgacattaacctcaacaatatagtgagtgttggcggtaaaaccgggcttatgtttggtgagattatgatttctaccagtggccaaaattacaccattaaaaatgtaatgaagggatcagtaattccgttcaccaacttagtgaatgaaactagaaacaatttgaacacccccgcccaatcacaacaagaaccaactaaagctactcattcttttgacgaacaaatgtcaaaaattgaacgtctggcagaaatgaaagaagaagggatactgactgaagaagaatttcagcaacagaaacaacgtattcttaatggttaa

SEQ ID NO: 373991 - DNA, 582 bp, Salmonella enterica
atgggcaaattttcttacagacaaattagccacagcagcgaagtgctcgatagagtcattgatgcttatggttttacgtcaaaactaatgcttgccgaccattttgatatggcatccagtagcctggctggacgttataaacgtggtggattccccgctgacatggttgtcaggtgtgtagccgaaactggtgcttctctagagtggcttgcaacaggtcaaggtaggaaatttgacgacgaagaactagacattttgaaaatgccccgccgaaaaatcgttgatggtgttctttacgatgcaggtatgtacatgcttgataaagtttcatttttaccaggcacccctttaccaaacaccccaatatgtgtccttgaggggaacaatcagtttatcgttgatacctcttttacagaggtttatgacgatgagtggctagttgaaattgaaggtaaaaccagcattcgtacccttacccgcatacctattaagaaagtaagagttagcggcgttggaatggccttcgactgttcaattgaagacataaaaattctaggtagagttgtattaaccataaaataa

SEQ ID NO: 373992 - DNA, 222 bp, Salmonella enterica
atgcgtcccaacattacaatcgtgatccccgatccgtacatcccacttgatgaatattgccgccgtactggcatgtccaaaagtacagctgagaacctgatttcatacggaaaacttccaatcaagcccaaaggcgcgcagaaaagagggctggtagaagtcaatatggccgccctaaccgtgatggcattaagcgagtgtgatgtttcgcttaacgcgtaa

SEQ ID NO: 373993 - DNA, 504 bp, Salmonella enterica
atgtttgattatcagacttctaaacatgcgcactttgatgcggcttgccgagcatttgcggttgagcacaatctggaagatgtggccgctgccgttggtatgagaccacagatcctgcgtaacaaactgaacccagcacaaccgcaccgcttaacctgtgacgagcttttagccattacggattacaccgaagatgcgcgtttactggatgggatgctggggcagattaactgccttccatccgtgccggtgaacaatgctacagaagcaaacatgcaactgtgtgctcttagcgccaccgccagtgtgggcgcaattgctggggaagccgtatcaactggtcatatgaccgccgcccgccgtacacaaattcttgatcgcgctcgcgatgctatccgtagcctttccgtgttggcttacaccgttgaaagccgtatccattctgcgccggttttagccgcagcggtggatctggtcacgacgaatgccactggcctgatgtga

SEQ ID NO: 373994 - DNA, 228 bp, Salmonella enterica
atgaaagcgtttgtgacttacctgaaaaaagaatcaccggctatgcagttacccagtggttcaaccggttggatagaactgccgaacggccagcgctggaatcctggtcacacctataaattcaatgcacatgagtctgtccagatgaagggcggttctgttctgcgtttcctgacgactaaaacccgccgcctgctgggaatggttggggggcgttatggcaattaa

SEQ ID NO: 373995 - DNA, 195 bp, Salmonella enterica
atgatacagctgcgccagggaatttcccgtgctcgtttaacttttagcggattcgggagtttacgggacagtgatttctccagacgaaccgctgaacgtccagtaaaaatcgtccatcccattaataccaggaacaaggtgcagatgattatcgcacctcatattgtccataaattgcagcaggggaatcactga

SEQ ID NO: 373996 - DNA, 402 bp, Salmonella enterica
atgagcattatttctgtagagggtaaatcgttgggggctgaactggctgtgtggggagtcccgcataactacgcggtagcgtttgcagagaaaagcgccagtaaaaatggccgcattgcgttgcatccattcttcttcaatgacaccgaacacatgactaaccagcgccactggctggcgatcaatgccgctttctggtgctgcgtgtaccgcgaagctgagagcaaagaggcacagattgaagcgctggcggggattcgcgcaattttctatacagccggggcgctgggtgttggcgagataaaggcgctgatccaggagtggtggcggacaacctatgagcttcaccttattccggcaccgaattattcagccgtcactacacaacccgcttttcactaa

SEQ ID NO: 373997 - DNA, 234 bp, Salmonella enterica
atgcatatgacacgtcaggatttacccgcaacgaaatcaggtactgacctgctgaccatgctcaccaaagctacacaggaaggtaaagccgctgctgctgatttgtgttctatccgtctggataagctggccacccatgcagctaatgaaggtttaagcgcaacggaaattgttgagttaatccgtgaagaggccgcagcgatttgtagtaaaggcggtgccgcatggcagtaa

SEQ ID NO: 373998 - DNA, 861 bp, Salmonella enterica
atggcagtaaaaactccacttaagtgggtgggcagcaaagcccgccttatgccgcaattacgtccccatttgccggaaggaaagcgcctggttgaaccgttcgcaggttcctgcgccgtcatgatgaatacggattatgacgaatatctgatcgcggacgtaaatcctgatctggttaatctttacaaggcgatggcgtatcacactgatgcgctgctgaatgagctggagattctttttaacgctggttcgttaggcgatgaagaaagccgagcggttttctattatgcggtgcgtgatgctttcaaccaatcaggtaaatcctttggttcggaatccgtagaagctgctgcgcgtttcctgtacctgaaccggcactgctttaatggcctgtgccggtacaatcgccgcggtcagttcaatgttccgttcggtaagtacaaaaagccttatttccctgctgatgaaatctgcgcctttgctgaaaaagcaaagcgcgcaacattcattactgcccactatttagaaacgcttgatttggttcgggacgggaatgacgttgtttactgcgatccaccttatctgactgatagcgataatttcaccgcttaccatgagcgtggtttttcgcatatggatcaggggcggctggcgcgtaagctgcggcgcctagctgaacgtggaattcaggtagtcgcgtcaaacagcgatctggaaatggtgcattacatttacgcaggttttaactcggtaagggttaatgcgccgcgtagtgttggtgcggcagctgcaagcccgaaaatggcggcagaactgattcttaaatggcctttaccggtgactcctgaggccagcgcatga

SEQ ID NO: 373999 - DNA, 2022 bp, Salmonella enterica
atgacgctggcaataaacgaagattgttacgccgttgatgcctggcggcgtgaaaccttcgcgccaggtacaccggcagacgtgacaatcacggagcgccgcctgtgggctataaacccgcaggatcataaatggcgtgctcaatacctgcatgaaatacccgactggttagccgggtattttggtcgtcgttacgaaaagctttttactggccctgacgggcgtcgccgtgccaatacattcctgcgtcagactattggagggaatgtattgccacgtctacgcaaagtggctgctcattataagctggccgctgatgcaatagaccttccttttggcaagtcgctggaacgcctgccgtcacttgaccgcccggaacttaaaaaactggctggccagatatctggctggatctcccagtcgctgtatgacttcaccgaacggtttgattccggcactgacgaccctaaagagctgcaccgccgaacgatggagtcttatcgctatctttgtgcgtgcagtctgatgctgaataatcagccgccatactgggcagaacatgaagccaatgccgggcaactggaaacacgtaaggctgaatccggcattcttcgcatgatggcacctgaatggtggtatctgcgcctgaagcgagcgcgtgacgtacagcgtgagcatatggccatagccgtggggcaggtgcagaaagcggccagcgcttatgtatcccgtaaaactctgggggaatggatagaacagaaaaagcgaaatctggagttctttaaaaagtttgatctgctgaatgatgaagggctgcgcattgcactggacagcatggtacaccgcagtgttgcaaatccggcgatccgtcgctgtgagctaatggtaagaatgcgaggatttgaagatatggccaatgaagaagggctggccggtgagttttacactatcaccgcgccatctcgtttccatgcggtacacagcaaagggggctttgtatcgcaatgggatggaagtacgccgcaggatacccagcgctatttatgtggcgtatgggcaaaagcccgcgccgcgatctcgcgtgcgggtatccatgtatttgggttcagggttgtcgaacctcaccatgacgggacaccgcactggcatatgttgctgttcatgcgcccgcaggacgtggacacggtgcgagatattctttgttatcacgccagaattaccgattccgaagaactgcaaacgccaaatgcgctaaaggcacgtttccatgttgaagccatcgatcccgctaaagggtcagcgacgggctacatcgccaaatacatttccaaaaacattgatggattcgcgctggatggcgagcaggacgaagaaaccggcgaaaacctgcgggatatggctaaatctgtttctgcatgggcttcacgctggcgcattcgccagtttcagcagattggcggtgcgccggtgacagtctggcgtgagcttcgtcggttgcgggatcaggtgctgaccgatcgcagaatggatgcggttctggctgctgctgatgtcggggactgggctgcatatacccaggcgcagggcggcgcactggttgcccgccgtgatctggttgttcgtctggtctatgaaattacggaacagggtaacgaatatgcggaagacgtgcagcgcgtacagggtgtttattctcctttggttccagattcagaggtctgcacccgtctggttaagtggcagaaggttgcgaagttgaccgaagcgtcagcggaggcgggtttttctggcggcaacgccgccccttggagttctgtcaataactgtacggagggtggaacccgcagacggttaaaactggaattaagaagccgggggttcgatggttctgatgaagaaatcgacattctgaaacgagggggtgggcttcgtttcggccagtcagcacttatttaccggaacggaagattgcaggagacgcaaaacgagccaatgcaggagctttggccggaatggttatga

SEQ ID NO: 374000 - DNA, 207 bp, Salmonella enterica
atggatattctggaggcgtcggcacagctggaacgcattgagttgttggccaagattgcccatatttacgaaagtaaccaaagagagaaaacgatagctttgtattggattggagagattgcaggagaaatgcgggaaaaggttagtaaagcgatgaaaagcccccaaaaagggggattgtcaggcggcgggagtcgctttcagtaa

SEQ ID NO: 374001 - DNA, 270 bp, Salmonella enterica
atgcgagttctgaaaatcgaatgccctgaatgcggctcaaaagctgttattcgtaaaacgaaccggaaacaccggcagattgccgatatttactgcgcctgttcagatgttgagtgtggccacacgtttgtcatgaatctgacgttctcccacactctcagcccaagcgctaaaacaggtgatgctatggtacaaaaaatactaaatgccctttcacccgatcagcgtcagatggcattagacttactgaaagcgactcccgccgcctga

SEQ ID NO: 374002 - DNA, 1062 bp, Salmonella enterica
atgagtaaaaagaaacacttcgttaagcgcaaccagcgcggcgataagtcaaaaaaaatgagcatcattacgttcggcaaaccggaaccggttctgaccactggcaccgactaccgggatatctggtacgacaatgccgccgatcattttactcagccaattgaccggctggcactggcacaactgattaaccttaacggtcaacatggcggtatcatccacgcccgtaaaaacatgattgtgtctgattatctgtctggcggcctgacttacgaccagctggaagccgcagcttttgactacatcacatttggggatattgcgcttggaaaaattcgtaacggatggggagatgtgatcggactggaacccttacccggcctctatatccgacgcaggaaagacaggaacaacgcaactgatcaacctggtgattacgtggtgttacaggaaggcaaaccgcagatatggcctgaagaagatattatcttcatcaaaatgtatgatccgcaacagcatatttacggactgccggactacatcggcggcgtacattctgcattactcaacagtgaagcggtcattttccgtcgccgttactaccacaatggcgcccacactggcggcattctctacacgcgcgatcctagcatgacggatgaaatggaagaggaaattgaacagcagctgcgtgacagcaaagggatcggcaacttctccaccatcctggtaaacattcccggtggagacggtgacgccatcaaattcattgaaatgggggatatttccgctaaggatgaatttgccaacatcaaaaatatcagcgcccaggatattctgaacgcgcaccgttttcctgccgggcttgccggcattgtcccgcaaaatactgccggacttggtgacgtagaaaaggccgaacggatttataaaaaaagcgaagtcgcccctgttcagcgccggtttatgatggccgtaaacaatgatccagaaataccggaaaacctgcacctgaactttgatttaagttacacagaatcaacggataagggtgcggtatga

SEQ ID NO: 374003 - DNA, 1776 bp, Salmonella enterica
atggctaaatactctgaagaattaaaaggcgttgtccgcgcactttatctgcgccgctatacgccaaaggaaattgcatccgaattaaatctgccgaatgcgcggatcgtttactactgggctgaaaaatacaactgggcagatttgctcagttttgaaagcactgaagaggctatcgaacgccgctaccagctactggccagccgggataacaaaaccgatctcgatctgaaagagatggacatgcttattgctcacgccacgaaactacgtgcgcaaagcaataagcataaagagaagatggccagcggtcagaactccgggcaggcagatgcgcgggacagcaatgacgacgaaccccgccgcaaacggaaatacaagaaaaacgatatttcctcgctgacgcaggaggattttgacgcctgggctgatgagcacctgtttgaataccagaaacacctgcgccggaacattggccagctggtcagaaacatcctcaaaagccgccagataggtgcgacctggtattttgcatttgaagcctttgaaaacgcggtcatgacaggcgatccgcaaatcttcctgtctgcctccaaagtccaggcggaatacttccggtcttacatcgtaaatattgctgaacagtatttcgggatcacgctgaccggcaaccccatccgcttgtccaacggcgcggagctgcgcttcctgtccaccaacaagaacaccgcccagtcctacagcggccacctgtactgtgatgaatatttctgggttccaaatttcacaaaacttaatgaagtggccagtgcaatggccacacatgacaagtggcgtaccacctacttttcaacaccgtcagctaaaactcaccaggcgtacccgttctggacaggcgatgaatggaaacagggcagtaaaaaacgtactgccattaagtttccgacctttgatgaattgcgcgacggcgggcgggtttgtccggatggccagtggcgctacgtcattactatggaggatgctattgcgggcggcttcaatctggccaacatcgagaagctgcgcaaccgctacaacacagccactttcaacatgctctatatgtgcgtgttcgtggacagtaaagattcagttttcagcttttccgacctggaagcctgcggcgtggaagtggatacctggcaggatcataacccggacgccgcccggccatttggtgacaggccagtatggggcggctttgatccggctcgcagtggggatttgtcctgttttgtgattgtggcgccgccgatgttcgccgtggagaaattccgcgttctgaaggtgatttactggaaaggaatgaacttccggtaccaggcaaagcagatcgagcagctgtttaaaaaatacaacttcacctatctgggcgtggacgttaccggtattggccagggcgtttttgacaacattcagcattttgccatgcgtgtggccgtcgccattcgttacgacctgaacacaaaaaatcagctggtactgaaggcggctgacgtggtcgaaagtcagcgaattgaatgggacaaaaacctgaaagagatcccggccagctttatgtccgtacgccgcacaaccacgcaaagcggtaacgccatgacctttgttgcagaccgcagccaggacacaggacacgccgaagcgttctgggcgataacccacgccctgcataacgaacctctgaactatgaaaataaacctaaatcacgctggaatttaaggaacaaggcagcatga

SEQ ID NO: 374004 - DNA, 804 bp, Salmonella enterica
atgtcacatttaaaaactgactggctgtgtgttgctactgaaggggataccgttgacggcaggataattaaacgccagtggattatcgatatgggggaaacctatgactataaccactgggtcgctttaatctggccagagcatgaggacgattacggtaattttggcgaagttctggaggccacctggaatgatggtgaagatggactggcgcggttgtatgtcagtttatgcccgaatatacgtctgattttcgccaatcatgaagatcagcttttgttcttttccattgagccggaggagaactggcgcggtagcggacggacttacctgaaaggactggcagtaacagacacgccagccagtgttggcaccacacggctgcgctttagcagtcggcgcaaaaaattatctaagcagggttattacggctgtgtaatttcccgtgatggaaaaataaaacaggaagaaagaatgaagaactggcaaaaattgtttggtattaaaccgaagtttgaagatgaaacgccgccagatgataccgcgcagggtgatgataagctacaggcactggcaaacgcggtaaacgaactggaaggccgtgtggccaaaattgaaaatcaactgaatgatgttcagggtgatgtggatactattgcggaagtggtggatacagaagaatttgccgccattcgtgataatgcaaaagatatcgttaagcgttttaacgatttgggaaataaatcagcccgtacaccaggccgcaaaatttcagagaaagccgggaagtttaatttcctgtaa

SEQ ID NO: 374005 - DNA, 1023 bp, Salmonella enterica
atgcaccttaataaccgtgcgcgggaattactggacggatattcggcgggcatggcgcagcagtttggggcgcgtgatgccagtcgttatttttccctgaataacccgcaggaaaatgcgctgcgtcttgcgctgctggagtccgtcgaattcctggacatgcttacctgtctggatgttgatcagcttagtggacaggtgatttccgttggttcctccgtgttacacacaggacgtagtgaaagtggccgttttattcgccaggttggtgtggacggaaacgactattcactggttgaaacagacagctgcgctgcgttgcgctgggatctgctttcggtatgggcaaacgccggtaaggatgaaaacgagttttacaatcttgtccaggcattcaccacgcaggcttttgcgctggatatgctgcgtatcggctttaacggtaagagccgcgcaaaaaccactgatcccgaagctaacccgaacggtgaggacgtgaatatcggctggcatgagcgcatgaaagcgctgctgggcgggaatcagattatgaccgatccggtggtgctggatgcggccggggattacaagtcactggatgcaatggcttcagacctgattaacgccaaaattccggcgcagttccgtaatgacccgcgtctggtggttctggtgggggctgatctggttgccgctgaacagtatcgcctgtatcaggccgcagaccgtcctactgaaaaaatcgcggcgcagatgctgggaaatactattgctggccgtccagccattatcccgccgtttatgccgggtaaacgcatggtggtgacgccgctgaaaaacctgcacatctatacccagcgcaatacccgtatgcgtaaggcggagtttgtggaagaccgtaagcagttcgaaaacaaatacctgcgcaatgaaggatatgcggtggaagtgccggaactgtatgcggctattgatgaatccgccgtaactatcggcaaggtttccgaaccagcggagggctga

SEQ ID NO: 374006 - DNA, 702 bp, Salmonella enterica
atggcactttctcccgcgcagcgtcacagccagcgcattgcgatggaacaaaagctgaagcgaagccaggcgctggaaaccacggaaagtatgcaccttctggtcaaagcgctggaaacggatgtgggacacgtacgcagcctgccgacaatcgcggatcgcattgagtttaaaagggatgtgttgctgccgcgctgggtaccgactgttgaagcgtatctggaaagcaagcaggtgtacgccaatccggtatttgcctggtgtgttatctggctgtttgacgtgggcgagctggatcaggcgctggaatgggctgatatcgcaatcagtcagcaacaggccacaccggatcagttacgcagcaattttcccacgtttgtggccgatacgatgctggcatgggcgcaggaaagcgccgggcgcggagaaagtattgagccgtatttctcccgtacgtttgaacgtgtggcaggggtatggcgactgcatgagcaggtaacagccaagtggtacaaatttgcggggctggagctgctgcgcaatgaggatggccagcaaactgctgcgggtgtggatgatattgaaacgctggaaaaagccgatcatttgctggccatcgcagaaaaacactattcaaaaattggcgtcagaacagcgcggcagaccattgccgcccgtgtccgaaaactgacgcaggggtaa

SEQ ID NO: 374007 - DNA, 504 bp, Salmonella enterica
gtgtgtcattgcgccgtggaaaccggtcagtccgcctttttcgggggatttatgtttagtggaaaaccgctggattatcaggacgaaccgctggccaataacggtttctggccggatctgaacctgaaggattttcaggcgcagcggtcactaccgccagatattgacgctgataccatcagccaggcgctgcttgccgctgtcgcggaggtgaatgccgagctggaaaacgtggaggccagctggaaagcgaaaggccatacgctggcggcagatgtgccgggtgtaaagatgggcggacttaacagcctgtgcgcccagtacatgaaagccgtttttgccagggcaaaagcggatctgttgggtgagttcgccactatcggacggcgtgatacccatccggggcaggaaagccaggagacacgggccgggttactggctgaggcgtccgtggtgatccgtcgcatgaaggggcttaaacgggcaacggtgaaaaaagtatga

SEQ ID NO: 374008 - DNA, 507 bp, Salmonella enterica
atgagccagacgcagatccaaagcctgaccgctttttttcaggagaacgttccgccgcgggcgatgcagtcatttgacagcgtactggatgaaatgaagttcatccccgccgcgaaggattacgggctggggcaatatcgccaggcagttattcggtatgacgcagttctgagctgggcgcgttttccctatcgcctgtgtccgccgcagttacttatgtccttactggcggcgtggctggacgatgcagacagagacctgctggatgaagtcgggctgagtgaagccgaacctgactgggatgtgtcggtggaagatgaggaaaccgccactgtggtgctgaccgttccgatggcggaagaactggtgatcaggcaggacgaaaacggggctattccgtggcgtggtgaacgctggtcactggcagatcctgaaatctggacggcgttaactgccagcattttcagtgtggatgaaaccggggcgccggtgagcggggaaatatga

SEQ ID NO: 374009 - DNA, 708 bp, Salmonella enterica
atgatagccggtggcgagctgaataaaaaacagctgactgaattacgtaaggcactggccagtatggagttgccaccgcagaagcgccagcggctgatctggcgtctggcgaaatatggcgtgattgctgctgcaaaaagacatgttcgtaaccaggaatccccggacggccagaaatggccgggacgtaagacaaaacgcaaagggaagatgctgcgtaacctgccaaagctgcttcatatccgcgaaatgcctgagattcaggccgtacggatctatttgcagggcggcgggtaccggaacggggaagcgccggttccggcaggaaccgtaggttatgcgcaacaaaacggaatgcgggtaaaggtcagccgcagaagtcagccacgtaaggcggacgccggaaaaatggcgacacctgcccaggctaaaaaactgcgtgcgctggggtatcgggtgagaaccggaaaacgctggaaaaagcccacgctgggcgatatcacgcggacgatgccatacagccaggccggattactgattcgaaagctgagtggtaaagcagtgaaaaccagctggacagtggatcttcctgcccgcgtatttctgggcatgaatgacgatgaatttgataaagcgctggcgcgtcagcttcaggctataggctttggctggaatgtaaaggcgcaggatattaaggggaaaacatga

SEQ ID NO: 374010 - DNA, 1128 bp, Salmonella enterica
atgacctggccaaccgtgaccgttaaccaggtaaaccagttactgggtgaaaccaacgaggtggagcgcacgttgctgtttatcggtacgggtaccaaaaatgtgggtaaaacgctggctgttaatgcacagagtgactttaacgcactactgggcgaggggaacagcccgttaaaaagcgatgtactggcggcaatggcgaacgccggccagaactggtggggatttgttcatgtactggccgcagacagtgagccgggcgcgtgggtggatgccgtcaaagctgcacaggtttcctgctcggtggaaggcgtggtgctgtcggatgatgtggcggcaaaagaacagattaaccaggcggcaacgctgagatctgaactgattgcgcaatacgggcgctgggtgtggttcatcctggcggttcagggaatgcaggaggatgaagcccaggcggattacctgaaacgtctgtccacccttcagcagggtattgcagagaaagcggttcagctggttccgcgtctgtgggggaatgaaccgggcgtgctggccggtcgcctgtgtaaccgggcggtgacggttgctgacagtccggcgagggtgaaaaccggggcgttgcttaatctgggcagcgatgaactgccggaagatggcaccgggaaaacactggagctggccacccttaaagcgctggaagcgcagcgctacagcgtgccgatgtggtatccggattatgacggcttttactgggctgacggacgtacgctggatgtggaagggggtgattatcagtccattgagacgctgcgtattgtggacaaggccgcccgtcgtgtccgcctgctggctatcggtaaaattgccgatcgttcgctgaacagtacgccgggcagcatcgcggcacaccagacgttgtttgcccgcccactgcgcgaaatgtccacggcggccaacattaacggtgtgtcgtttccgggagaggtgaagccgccgcaggatggagatgtctctattgtctggaagagcaagaaggcggtggatatttacattgtggtacgcacgtatgaagtgccgctgcaaatcactatcagcctgttactggatgccagtctggaggccgcagcatga

SEQ ID NO: 374011 - DNA, 456 bp, Salmonella enterica
atgaccaaacgtatttcaggcatgtcatttgatgcctacatcgatggtgaactgatccatatagaaaaaatttcgctggatatcacggataacagcgccgccgcccagacccgtggtgtgccggacggccatgttgatggtgatgtggccgcagagggagaaattgaagtcagttctaaagtgcttcaggtactgacagccaaagcccgcgccgcaggttcgtggcgaggtattgaaccgctggattttcttttctacgccaaagcaggcagtgaagaagtgaaggtcgagacgttcggcaataaattgcagttaagcaatctgctggatattgatccaaaaggcggcagcgtatccacgcacaaaattaaatacttcgtgaccagtccgaagttcgtcaacatcaacggggttccgtatctggaagcggaagctacggaaaatctgatcgggtaa

SEQ ID NO: 374012 - DNA, 294 bp, Salmonella enterica
atgcaggactacgaaaaagggtttattgcgctggcaattatgggggcgctgattgccctgggcaagatgctgaacagtgacgagccgatcacggcacgtctggttctggggcgtgtcattgtgggcagcgcgttatcagtagcggcaggggtggcgctttacttcgtaccggatatccatccgcttgcgcttgccggcattggttcagcgttggggattcttggccttaatggtgttgaagcctggctacgtaagaaagggatcggttttctggggaagggggctgacaaatga

SEQ ID NO: 374013 - DNA, 342 bp, Salmonella enterica
atgacactgagtgaaaaacagcagctgtttaccgttatggtggcaaatctgatccactgggcagaagaacacggctaccggctgacgttcggggaggcgtaccgcacgccggaacaggcggcgctgaacgcgaaaaagggcagcggtattaccaacagtctgcatacacggcgtctggcagtggattttaacctgtttgttaacggccagtaccagacccgcacagaggattacctgccgctgggcgaatactgggagtcactgggcggcagctggggcgggcgcttcaaatccaggccggatggtaatcatttcagtctggaacatgacggggttcgctga

SEQ ID NO: 374014 - DNA, 333 bp, Salmonella enterica
atggatcgtgtggtggcgggctggcttatgactgttgttctggccttctgggcagggtggaaggcggctaactggcagcgtgacagtatcgatctggccatcagccggtcagccagcgctaccggggaaacgctggcgagcatggccagtgaatccgggcgaaaactggaagaacaactggaggctttgaaaaatgcaccgccgcgtgaaattcgtacggaggtggttaaaccggtgtttactaacgtgtgcctgtctgacgactttgtccgcatgtacaacgacgccgccgccagtaccgaacgtgcgttatcaggaaaacctgaaaactaa

SEQ ID NO: 374015 - DNA, 258 bp, Salmonella enterica
atggaaaaaattaaactgtgtgtctgtgggactgatattatttttgaaccaaatcagaccgcctataacaagtttattaatgaaatggcaatggacaataaagtggcacctgcgcataactacctgacgcgtattgttgcaacggaaagcaaggaagctttagctgaaatattaaaacgtccgggcgctgcgcttcagcttgtcagtaaggttaatgatatttacgcccctgaactggaaattgaagtaaaaaactga

SEQ ID NO: 374016 - DNA, 1971 bp, Salmonella enterica
atgaaacagttagattttacattaagcctgattgataagttgtcccgcccgttaaaacaggcacagagcagcgtcaccggctttgcggaaaaatcaaaagcggcctttatgcagattggcggtggtgtgctggctttagcgggtacaggaatggccatacggggtgcgttatcaccggcagttgaaatgtatgatgcgctgaatgatgcagccgcaaaagggattgatgaccaggcattaaaggccgtacagcgcgacgcgctgcgcttcagtacaacttatggcgccagtgcggtggaatttgttcagtccactgaaagtattaattccgctattgccgggttggccggtaatgaactgccgaaagtcacaaaagtcgctaataccctggcgtttgccctgaaatccaccgccgcagaaacggcggaatttatggggcagatgtttggtaatttttccgccgatgcggagcgtctgggcaaggttcagttcgctgagcagctggccggaaaaatggtgtatatgcgcaaggtcttcggtaccgaaatgggcactatcaaagacctgatggaaggggcgcggggcgtcggtaccaactacggcgtcggactggatgaacagctggccgtactggggcagcttaaccgcacgctgggaacggaagccagcagcgcttacgaaggctttatgacgggggcagttgaaggggcaaaaaaactgggtctgtcctttacggatgccaccggcaaaatgctgtccatgcctgagatgctgattaaattgcagggcaaatacggcaagagcctggaagggaatctgaaagcccaggcggaactggatgcggcattcggtgacagttcggctgtggtcaaacacctttacggtaatgtggcgcttctccagaggaacatcaccgaactgggcggatctgacggtctgaaacgtacgcaggagatggccagtaaactggtgaaaccgtgggatcggtttgtacaaatcctgaaagctattcagaccgtaatagggctgacactaatcccggtattgtatccggtgctgaatcgtctggcggatatgggacagacatttgccagatggatgcagctatttcccaacattgcccgtgttatcggctacgcagctatggcgttgctggggtttgcggcagtgggcgcggttgccaatattgtgatgggcgcttctaagttcatcatggcaggtttacgcgggatctgggttgccatgaccgccgtcacgaaagcatatacggcaatggtatggttggcacaaattgctgttatcgcctggaatgcgacgcttaaatttttgcgcggagcgttgctggccgttcgtatggcggcaatcatggccggaatcggtattaatcttatgagctggccggtcttgcttgtgatcggggcgatagcgttgcttgcggcgggttgctggttgctgattaaacactgggatacggtgaaagcagctgttatggaaacatccgcgtttcaggcatgtgccagggtggtggcgtggctggccggggtgttttccacagcatggcaatttatcagtgaaggctggaacagttttattgcgctattaacagggttttcaccctcacaggcattaagtggactggcgtcgggtattgtatccatgtttgataatgtctggcagtccgttaaaggtggttttctgaaatcgtggaactggattgttgagaagctgaataaaatacccggcgttgatatctcaatggctaatgaaacctcttcgccaccattaacagtaaataatttatctacaggtggcgagctaaaaggaattgataaaggtggtatcagtaaatctgtcagtaataactcagggtctgtgacggataacagccggaaaattaatactgtcaatatctatccaaaagaaatgataacgccggggcagttaatggagtttcaggagctgggcgtatga

SEQ ID NO: 374017 - DNA, 330 bp, Salmonella enterica
atgaatgaaatcctgtatgttgatttattaattcaggggaatgactttgtcctgaataccggtaatgaacctgaattatgtaataaccgtaaaagtatcgggcaggacattattcattccattattgaaagcggtctggcaacggaattaattgccgagagaagcccgaccatgcgggcagatatttttacccgcatggaattactgattgaagatgatgagcgcatcgttccggggacggtggaaatcggtgaagaaagccggacacggttgtggatcacggccagtacttatgactttggcggaatatcggtacaggtggatttatga

SEQ ID NO: 374018 - DNA, 1185 bp, Salmonella enterica
atgacggaaaagccacaggttgactttgaagaggtggtgaaagccagcggtatgccggtgacggaagaagagattcgcgatcgctttaatgccattgcgacggaggagggaattatcacgaatacctcccgtatgtctccgttctggcgactggtcacggccattgtaaccgcgccggtgatgtggctgaaggaggttctgatctccaccgtactggcaaatatgtttgtggccacggccagtggaagcatgttacggctgctggcatgggcggtgaatatcacgccgaagcccgccagcgctgcacagggcgttatccgtttttacaaggaagacgccagcgccgtggtgacggtgaaggccggaacggtgatacagacagaacgtattaacggcagggtgtatgaactggccatcacggaagatgtggtgatcgcctccggtaccgccagcgcactgctgccggtaaaggcaacgggaacgggcggcgcatataaccttgcgccgggatattaccgcattctgccggtggccgtggacggcatcagccatgtggccagtgaagagaactggctgaccgtaccgggcgcggatgaggaaagcgatgatgagctgcgtgagcgttgccgtaaccagtttaacctggtgggcaactaccacacggacgcggtgtaccggtcgatgatagccggtgttgccggactgagcattgaccggattttctttgagcacgaagcaccgagggggccggggacagccaacgcctatttattgctggacagcggcgtggcttctgcgccgtttgtggatgccgtgaatgactatatcaacacgcaggggcatcacggccacggggacgatatgcagtgttatgccatgccggaaaccctgcacgatctggcggtcactgtctgggtcaggaacctgaacaacatcagtgatgatgaacagaagcgcctgaaggacggtattgaaaacctgatccggtgcgccttccgggaaaatacggactatgacgtcagaaggacgtggccgtattcacggttctccttctcgcagctggggcgcgaaatccataaaaactttccggtaacggaatcgctgaatttttcgctggatgacattgccagtgagctgaatgtgccgcgtctgaaatcgcttgtggtgagtattgagaatgaatga

SEQ ID NO: 374019 - DNA, 588 bp, Salmonella enterica
atgaatgagttcatgaaaaaactggccggaatggtacttccctcctggatggacaggggcgagccgcgaaaactgctgcaaacggcgcggcggttctgggtggaggtgtacggctgggtgacgtggccactgaaccagtttgatccgctgacctgtacaccggcgttacttaacctgctggcgtatgaccgggacatttcccgctttgacggggagccgctggagctgttccgcaggcgtgtggcgtatgccttcgtgaatgcgcgtgacgccggttcggttgagggatttatcagtatctttgagcggctggggatcggttacgttgaactgctggagcgccagccgggtattgactgggatgtgattcaggttcgagtcacggacagccagatagcgactaacacgcagctgatgatccagattatccggcagtacgggcggacatgccgccgttaccagtttgaagtgatcacatctgaacagctggctatccgggcgggatgggatcagggggaatatgtggtttatccggcagtactgagcggtacggaaaccagcagcgcaacgtacagcgcagggttataa

SEQ ID NO: 374020 - DNA, 2235 bp, Salmonella enterica
atgtcacagacaacaattacacgggcatttgaacagtggaaagcgcagcagggtgccacgggggagcctgtcctgctggatgaatttgtgttcgctaacgtaccggggcttgagccggatcggccggttgaccgtaatgaaaccctgccaccggctgaacaaattgttcaccggcaggccgtcagccgtaagggcgtggtgaatgacaacgctgtagtacattccgtcgtactgggggcggacgtgggggatttttcctttaactggattggtttgctgaataaagccagtggtacgctggcgatgattgttcatgcgccattacagcaaaaactgaaaacagctgaagggcaacaggggaacgtgcttacgcgttcgttcctgatggaatataacggcgcacaggctgaaaccggaattaatacgcctgccgagagctggcagattgactttaccgcgcgtatggccggaatggacgagcgccagcgcctggaaaatatcgacatcttcggggcggcggcgttttttggtgacggttatctggtcgggaaaagcgggaatcagttttatgtgaccaaaggtaccggctatgtggcagggctgcgcacaacgctggcagaaaacctgaatattaccgtgacaaccaggccggtcaaagtctggctggatgtatgctggacaggaacgcttaccagcgtgtggggtgtgcagtcccgtattacggtcgctgacaacctggcggattatgtgcagaacggcgtacagcattatgtgtttgcagtggcgggtattgatgaaaacggcaatattacggatttacgcccgaaagggacgctgaatgagcagcaggccagcgatgcgctgagaaaacatgaacaatcccgtaaccatccggacgccacaacccgcgaaaaagggtttgtgcagttaagcagtgatacgaacagtgagtcggagatgctggccgcaacgccgaaagcggttaaagcggctatggataatgcgaacggacgactggagaaaaacagtaatggcggcgatattccggacaaaaaacaatttgcgagaactatcggcgcggtaacgtcgaccaccattacacttggcgaatcaggctggttcaaaatcgccacggttgtaatgccgcagtccacatcaacagcggtaattaagctttatggaggttcggggtataacgttggatcatttgagcaagcggcaatcagtgaactggtactgcgtgccggtaatggttcacctgttggaataaccgccacattatggaggcgttcaccttctgctgctaacgaggtcgcatgggttaatacatcaggcgacacctacgatatttatattaatatcggccagtatgcgtactggttaattgcgcaatatgattacaccggtaatgcaaatgtcacgctacacagtacgcctgaatattcatcagcacagccgggaaactcaaccagcggtcagacatatacgctgtataacagcctgatgaaacctacagccggtgacgttgaggcactgtcggttaatggaggacggctaaacggtgcgttaggcattggtactgataatgcgcttggcgggaattcgattgtatttggcgataatgacaccggatttaagtggcacagtgacggtgttctgggtatttatgccaataatgctctggtcggttatatcgacaattccgggctgcacatgtcagtagatgttctctctaatggtgccattcgcgcaggtaacgcaaaaaaactgtcactgacgagcaataacaactcagcactgactgccacgttcaatttatggggcgacccaaacagacctaccgtgattgaactggacgacgaccaggggtggcacctgtacagccagcgaaatcctgatggttcgattgtctttacggtcaatggagatatcaccgctaacacacttcgtgcaggtggagccatctatcagaataacggcgacatctttggttcgttgtggggaaatggctggttaagtacctggattcacaacaatgtagtaaaagcggtcagacttggccccgtggcgctttctggcggtctgtggcgtgattttcagcttggcggcggacaggtggtgacggggttccatactgacggtagctgggaaatggaaggtgatgatgacaaggtttattaccgtcccattcagtatctgattggtgatacgtgggtaacagccccaagtgtataa

SEQ ID NO: 374021 - DNA, 555 bp, Salmonella enterica
atgaaagtggcaaaaaataaaaagaacgaacagtttttaaatattaaaaaattcatcccttatacaccggaaccagaggaggcactattccccggtggggcgcatcttaaatcagaggatggtcaggactggtataagtgccagaaattattttcagaagacacgctgaaaattacctacgacgataatgacgtcattacgtgtatcacgcgcgatatttccggtttgtggcctgcgggccagagcgttgcagagttgcctgatacggatgaaaaccgtcgcgctgatatttcaggcggctggcagtttaaagacggtaaagtcgttcaacgggtttattcgccggaagagctgagtaaaaaggcggaggctgaaaaagttcgccgccttgctgaagctgaatcagctattgcaccactggtgcgggcagtaaaactaaaaattgccacagatgaagagatgaaacggctggaagcatgggaactctacagcgtaatggtaaaccgggtggatacagcttcccctgactggccggaggtgccggatgtggcgtga

SEQ ID NO: 374022 - DNA, 726 bp, Salmonella enterica
atgtggcgtgaagcgcgtctggcttttacggattctctggctgcgctggattgttccgtcgttccggcgcatccgtggattcacggtctggggcagcagaccgataacggggcatacctgagtccggtcaatgcaatccattatctggcggaaaggctggccggaacgggaggcaataccgatgtggtgatcatgatggtaacgggacagacccatgaaaacttcatgaaagggcttaacagcctggtggatgttttccccgcgcccgcattcacccaggtcagacgtctggctgagtctgcggcgacactggctactgagaaaatgcagatccccgcgaaagtcggggcaggactgccggttgccattccgctgtccgttccgaccagcagggcagcgttatccgctgccgctgtcagtgaggcgcagaaagcggctggcgccggattcagcctggacgggctgaaacaacaactgggggaatttacgcaactgcgtgacagcctgattaacgatgtggccagtggccttgctgatttgcaggggaaaagcgccagggcatgggtatttacggccagtggcgacaccgccgccacccttctggcgctggtaaaggatattccgcagccttcagccgtttatactgcggcaatcatgctggccggaaaaaatcttgatggaataaggggcatgattcatgacgtcgatcccgacactggcgcttaa

SEQ ID NO: 374023 - DNA, 546 bp, Salmonella enterica
atgacgtcgatcccgacactggcgcttaatggtgaggccattctgctgaaaaacatgcgcgtgaccgtttcccagcagtttcaggataaagaccagtccggccagaccagcgcgaccaccaaatcagagcagggggcaaagggcaaagagctgcgtatcagcggcgaaatcccctttaaaaacccggagatcctgaagcgtatttttgaactggccagcgccaccgatgcagacgggaaacgcatgaaataccgcgttgcgcatgaggtggccagagcggtgaattttcgtgaggccaccttcagcggaatgctggatgcaccgccgcaggacgggaaaatggcctggctggtcacgttcaccctggcggaacatgtcagcgtacaggagaagcgggaagccagggcaaccggtaaaacaacggcaaaaaaacagacggccagcagtacgggacaatccggtggccagagtgccggagaggatgaagaaaaactgacgtggtttgaacgcagggtgctgaagcccgtcaatgatgctttaggttaa

SEQ ID NO: 374024 - DNA, 1701 bp, Salmonella enterica
atgaaaccagtaaaacgcctttacctttcaacggatgaaatacacctggctgacgccagtctggtgctggagctgaacagctgtggacgtggctttattacggcacagacgaccacagactacaccggcaaactggtacggctgggtgtggggtattccggtttacttctgcgctggtttaccggctatgtggagcgctcacagcctgccgaaaacggttatcagcgtctgttcgtccgcgagctggctggcgtgtttgagcggatgtggccatgctcatttcagcatcccacactgcgcgatgtggccggatggctggaggaaaacagcgggatcagcattgcggtaccggatgtgccgtacagtgataaaccgatcccccatttcacccataacgggacgggataccagctgctgaataacctgggcagggcattcagtatcacggattacatctggtatccattgccggatggttcgctgtatgtcggcggcgcagaaaaggcgctgtttgccggacgcccggtagaaatcccggcagagttcagccagggaacggcgggcggtaattccatgacattgccggtgatccagagtcttcgtccgggcgtggacgtgaacggggaacgcgtgaccaaagttcatctggcgaatgacacaatgaccatcacgtggacaccacggaaccgcgccacaggtcaaccattgcagaaaacaccggcgcagcgtcagatagaaagccattacccggaactggcttcaggtcttcacctgcccaaactggccagggtggtggcacccagcgaggccgtaaaaagcggtaattttgccgacccgttccggccacggtacgccgttgacgtgcagctgcttgacgcggacggcaacccggacaaccagacgccggtatattccgctgtaccgctgccggtgccaatggccggtaacgattcgggaatgttccagtttccaccggaaggaacgctggtagaggtggcgtttacgggcggcaggccggataagccctttatcaggcagacgctgccggatggcaccagtctgccggacattaagcccggcgaacagctgcaacagcagcgggcggaagtctcgcaacgcgtgacacaggcaggagactgggtacgccagacggatcagaccatcagtgaaacatcgatggcgcggacggtgaaagccgacacggaacggcgcgaactggtcagccgtgaaaccacggtgaaagccacggataaaatcacagtgctgggtaccgccacgctgatggccggagccatacagcaggtcagtgctggcgacttcagccaggcggtaaaaggaaaccggctggccagtattacaggaaatgaagaaaccgaaatcgccgggcagcagtccacgaaagtggccggtgccatgaatgttgatgtggggggaaccctgacagaaaagattgccgcattacgtaaatccgtggcggcgggcggtcagcagattatggggccaaccgtgcatatcggtagcgagggcgtaaatacgctaaccatgatgctggacaccattgatttactggcagagctggcgcagcagtgcgcgagccattcacaccccagtgtcggtacgccgacgaacgcggccgcattcaaccagacggcagcgaaggccgggcagacccggagcaagtaccagaacatcatcgcctga

SEQ ID NO: 374025 - DNA, 186 bp, Salmonella enterica
atgaagaaacgtctgtttggcttagtgaagtggctcgcgagggttaaattagctctcgagtttctcaacgagttaatcgctttcgttgagaaagtatacagctacattcacgtagcccttaactattactgcttaagttgggataaatcatccagatggaaacatggaagcataaattccttctga

SEQ ID NO: 374026 - DNA, 765 bp, Salmonella enterica
atggaaacatggaagcataaattccttctgaaagaaaaaaagtgggttcatataccttctgaagaaatgattaaatatggttcctccctgcatgaatatttaagaaggaattggaggtttccactttattattatcatttgagaaatggcgggcatgttgcagctgctaagttacataaaagtaatgatttcttctgtttaattgatattaaatgcttttttgaatcaacatcgcaaagccgagtgactcgtgaactaaagaaaattataccatatgacaaggctaggcatatcgcaaagctttcaacggttcgacttccaaatgctgctagacataaatttgctgttccgtatggctatccgcaatctccagttctagctactctttgtttacaaaactcttacgctggggctgttatagattctttttataggtcaggcattgttacagtttcagtttatatggacgatatcattctttcttcaaaggatcttgccaccttaaaccagcatttcgagatactctgcgaggcgctaagaaagtcgcgctatgaaattaatattgtaaaaactcaaaagccagctacaaaaattagtgttttcaatcttgaactgggtcatcgacatctaaaagttgagtcaggaaggatggttctcttcatacaagcctttgctaaatcacgtaacaagcatgaaaaaaaatctattgctaaatacgtccacaccgtcaatccagaccaagcggagagacactttccgaagtga

SEQ ID NO: 374027 - DNA, 867 bp, Salmonella enterica
atgaatgacctgatcagcgcggcttattccgaacgtctgcggcgcgtttgcgaccacattgagcgtcatctggatgagcctctgtcgattgaggcgttaagccggatggcgcacagctcgccgtttcattttcaccggcagtttaccacctggagcgggcttccgctctatcgctatatccagtggttgcgtttgcgccgcgcgtcatggcggctggcgtttaacccgcaggataaagttatcgatatcgcgctggatgccgggtttcagaatccggagtcgttcacacgtgctttcaaaaccgcgtttggtcaaagcccgcgccggtttcggcaatcgccggactggctggcctggcaccaacgcgttcctaaacttgcgttacaggagcagcatgtcatggacgtaaaaatcgttgaatttccacctacccgcgtcgcgatgctgacgcatctggggcatccggataaggtcaacgccagcgcggcgaaatttattgcatggcggcgcgaaacgggccagtcgccgattgccagcagtcaaacttttggtattgcctggcacgacccgcagacgacgccgccggatcaattccgctttgatatctgcggcagcgtccaccagccgatagccgaaaatgacgttggcgtggtgaatagcgagattcctggcgggcgctgcgcggtggtacgccatcagggatcgctcgacagcctcccggagagcgtgtggtatttattccgcgaatggctaccggccagcggcgagacgctgcgcgattttccggtcttcttccagtacctgaatttcgtctatgaggtcgcggaacatgagctgctgacggatatctatctgccgcttcgttaa

SEQ ID NO: 374028 - DNA, 753 bp, Salmonella enterica
atgagaatcagtgaggagggatggcggctgctgacgttctggatgtttactgcaggcggctatcttattctgttcttcattgttatttgcctggcttttttgttccaaacgcctcgtcgcgtgttgctgtggattgctttgccacagattacgctggttcttttgctacggtttgctgcgggtgatgaaacgcttttcttcccgattggcgcagggtggatactggggcttagtttattgctggcgctactgtttagccaccgattacgccaaccacaccacctttgggccgggtgccatgcggtcgtattgctgctgttgttagcgcacataggggatattctcgagaggcatcatcggcgcgatgcctatcaggcacagcaggtggcggaagaaacgctgttacaaaaaatcgatacgaccgatgaccgcgcttttttaaatcatttgatgtcacaagcaatgcagtcgcaaaacgcaggggattggtggacgaataggcggattgagcatctcgcaaaacgcatttccccttttgatattgcggacggaactgaaaaaatttggttggttttggccatcgaccggcttaatcgccctgccgttggggcgtttgcctcctggtttattggcgattctgtacaggcaaagcaatatcggcatcagctcttacaaaacaatccattattggacctactgaatcgtatttttaatgatagtatggctgacgaacaaatttttctgcaacaataa

SEQ ID NO: 374029 - DNA, 1422 bp, Salmonella enterica
atggttgaatcatttgcgtggatgatgtgggactcagtaatattgatgagcgcgtgggggatttatggcgtcgtattattgaggttaattgtcggcgcatttgattctttgcgctatcggcgggttttcttgcgtgttgttcttccgcaggtgagcgttgtttgtatattgtggggaggattattctggatcgattcaaaaaatatttatatcgtatatttattgatattaggattgatgccctcgataataattgctattttttctagtcgagagtctccattttttattctgggaactatcgtgtcccatactatttttttgttcgttttcgtttatgtgatggacggcccgcgattatggcatcacattggtgaagactggaataactataaaattacccgactgtttgagcgcgcgaaggggaatgttcaggttttgcaggatgcctcttgttatcaattggcaagtgttttgacgctggctgcagaacaccgcgatacaccggaaaatttattgcgttatctggctaaaatacgaggtatttcgccatttttgacagcggcagaatcttgccctaaagcggcgatcccgaatgccgaatttctttatacgccatttgtcaccgctcttcgccaacataacgtaccgatagtacgcttttttagccagcaactggtgggcgagacatcttccgccagagagaatcgcaacattgtcgctcgtaaagaaaatccactgctgacgctttataaatctaactatatatcacagtatcgcgagcagtacagactagaaattagtcatttattgctgaatattatgccagaactgttgaatgatgctgtctatatttatcccattatccaacgtaacaccgagttggttgcttatttttggcagaaacatccgcccactattcctctgcgcaggctcgaagcgatggtgttgttagccaaaacggaaccgctaataagcgaggtaacccataatccagaaatattgatcacaccgccgattgagaggtgggatcgtgaaaacctgctcactttcatactgagcaatggcaatctggtaatgattcagtcgcttattgatgcaaacgtagtggactggaaacgagcaatggaagacggaaataatgagcctctgcatcaggccatattgcgactgcgtggtggagcgttagagaacgcattgctgatacagatcattaaggcgatgcaagcgcagaaagcgttatccaacgagcaaatcgcccactatcttccctggacaccgacgtttcctgccgcttttttacaggctgggctttcctgtgagcaattgcgtgaggtgttgaatgcttcagtggcggggggcgaacaagcacgaaacgatacgcggcaacggctgaatgcgctatgtccagtcgcgaagtga

SEQ ID NO: 374030 - DNA, 1425 bp, Salmonella enterica
atggattatattaatcgatggcttggctctgaactgctgatgttttgtattctaccgtgggggtatgccgctgcggtggcattactgctgatcctgatgttttccaaaaaacgcagccgacagattttgctgtgggtattactaccacagtgggcagtcgtggtattgctgttactcacgttgcagtacacccagttgttgagccaaacaggcacggtatggatgttgatgctcctgttgccgattctgagttgggcgggcttgctgcccgcgctgctgctgggaacctggctgcgcaagccgtggcccgcatggctgctgtgccatattgtgttcattggggtgctgtgcccggtgatgccggagctgtggcgtgctattagccatcaatggcaacagcaaaatattgcgcagttgctcaggcaggttcaggcaggcgacttggaccagttagagagcattcatgataacagtatgttggaacagacactggttcaggcggtaaaagcgccaggcatatcagaaaaaaacttgcgcgctctgactgcacgtgtggcatcgccttttagtgtttcgcgggaagatggctatttcgtcaatgcgccattttttgcagcttttgagagtggcaatatcactgcggtgcgtatttttagcgagcagctcacgggcgactctcagcaggcgcaggcaaatcgcaccatcgtacggcagcaaaatccgttggaatatctccccacgccccattttaagcctgagggatttcgccagactttttttgagatggccgacgttctactacgggtcatgcccgatctcctcaccgatgaagcctattcgggggcgatacagcttcaggataaagagactctggcctttttctggcagcggcgtgaagcgcaaaatccgctgtatcgcgcatattatttcttgttgcaggggcaaactaaagcgctgcttgcccagataaaactgacgccgcaggtgctgggacaatcagtttatccgaataaaaatctgctggcgtcgctgtttagtgatgcggatggcgagacgctgcgtgcgttggtgaaagggcagatgctgaactggcagcacatccctcaggataagttgacggacggctggaatttcctgatttcacgcacattgcatacagcctcgaaagaggacgcgctgccgccggatattctggcggggatactgcaaagtatgcaacagcaacatacggcgttgccggaagcccttattgtagccagccttgattaccaggatgaaatacatagcctgatgactgcctaccggatggcttggttggactgtaacaagcttaacgcaatgatcgataaggtgtatccaccagaagatacgcggcgtaccaatgcgcgtataaaattagcacagcagtgcgccgatttagactga

SEQ ID NO: 374031 - DNA, 1422 bp, Salmonella enterica
atgaaaaaatgttttttatttatatttgtgtgcctgtttatcttctcagctaatgcggaactaaaattccgccctgagttcgaaaataaaaaaatctattttcagggcaaggtcacagactacacactaaatgactttacctttttcggtgacagtcgcgaacccttttatggcagcgaaaacgatgattataccgccactgcagatgagtggctcggattttacgctgagttgcccgacgttcgaaaatggcagcgcgtggttcctgacgatttttctacgatgtatggcgcgccgtggtgtgacatccagttttttgaacaagagaatgatcattcggtgattactggaagtgaacatatgcgctgtatcgattttctcgtgacgcctaaaagaaaagggctcattcctatggggacaaagggaacgctgatggattacggcagctatcttgctttcgcaccgcagataaagcgcatcacgctggaaggccgatttcctgaagcctcgcggacctggcttcctgtaagaagcgtgcaaaccagggcaacctcgatagccgatcttaaaattatgcttaatgagatttatgctcgccacggttatattttcagaccgggcggtgagatggaacggtacttccgacagcagccgtggtatcgcccacgctatgcgaacgttgattacctcattaccaagacagaacatcgtaatatcaaactcctcaaagagctgctttctcctgagtcacagcgtaaaaaggcgctgtatattcagaacacaaccgatttttgtgaggcgctgaaagcgaataatatcaaatatgtcatggacaatacggcagaataccttacgactggcgcagatcagccaatcaatttagaaaaagtatggcaaaaatacagagacttaatgatcaatggcggcggaaactgtcaacgcgatatcgagagctataagcgctactcctttttatacagcgaacctttaggtatttattacaattccacttttgagtttgatgaaaagaaagggaaatatgttctcacttatgtgaactttgattcttcctgcaacaaagagggtgacacgattgaactggaaggtatgatggtcaaacgcgagcacgtcattgaagataaccaaggccaacactcggataaagatctcgaattaaaaacaataaaccttcagtgtgtggcaggggccatgatggaccaacctgactgggatcgctatgtccagctcattcttcctcctgaaaaatacaattattatcaacggtttatagggaagagaatcaccctgcgagggaaagtcatgattgcagaatccatgtatcatgtcacgccggtactgttgaatttgctcgaagaacaaaatcctattatcaaagtagcagatatgcctgttcgtccataa

SEQ ID NO: 374032 - DNA, 1305 bp, Salmonella enterica
atgaagatgacaaaattaagatggtggattatcggcctggtctgcgtagggaccatcgtaaactacctgtcccgtagctcgcttagcgttgcggcgccagcgatgatgaaagaactccattttgatgagcaacaatattcctgggtggtgagcgccttccagctttgttacaccattgcgcagccgatcaccggctatttgatggatgtcatcggactgaaaatcggcttctttatctttgccttgttgtggtcgctgatcaacatggcgcacgcgctggccggcggctggataagcctggcatttctgcgtggtctgatggggctgaccgaagcgtcggcgattccggccgggattaaagccagcgccgaatggttcccgacgaaagaacgcggtattgcggggggactgtttaatatcggtacttcgattggcgcgatgctggcgccgccgctggtggtctgggcgatgctgacctttgctgatagcggcatcggtactgaaatggcgtttgtgattaccggtgggatcggcgtgctgttcgccatcacctggttcctgatttataactcgccaaataaacacccgtggatcacccacaaagagctgcgttatatcgaagacggccaggaaagctatctccaggacgataacaaaaaaccggccgttaaagagatcgttaaaaagcgtaacttctgggcgttggcgattacccgttttctggctgacccggcatggggaacgctgagtttctggatgccgctgtatctgattaacgtgatgcatctgccgttaaaagagatcgccatgtttgcctggttgccgttcctggcggcggactttggctgcgttgcaggcggtttcctggcgaagttcttcatggaaaagatgcacatgaccacgatcaatgcgcgtcgttgtagctttaccatcggcgctgttttgatgatttcgatcggttttgtcagcattacgactaacccgtatgtcgccattgcattgatgagtattggcggttttgcgcaccagacgctgtctaccgtcgtgattaccatgagcgctgacctgttcaagaaaaatgaggtcgcgacggttgccggtctggcaggatctgcggcgtggatgggacagttaagcttcaacctgtttatgggggcgttggtcgctattatcggttacggcccgttcttcattgcactcagtctgttcgatattatcggcgccatcatcctgtgggtactgattaaagatccggaaaagcaccacccgccaatgacggaacagccgctggcgtctcaccgctaa

SEQ ID NO: 374033 - DNA, 1266 bp, Salmonella enterica
atgaaaaaattcgcgaagatagcggctattccaatagcagtagtcgcggcctgtccttctgccctggccctacaaatttctgatgatgagtccgccttacgttttagactgaaaaatgagttacgaagagctgataagcccagcgcgggcgcaggcagagatatttatgcctgggttcagggtgggttaattgattttaatagcagctattattcacaacggatcggcgtcgagggtagcgcgtattatgtttataaactcggtgctcgcgataatatgagtacgcgctggtacttagacggacacgagagtttcggctatgtgcttggcgcaataaaaataaagccaacagaaaatagccgcttaaaaataggtcgttttggcaccgattatagttatggcagcctcccctggcgaattccactcatcgccagcagctcacaacgcacgctaccgaccgcttccgaaggcgcgctgggctacctggcgctgacgccaaatgtagagttctgggcaatgtggcgtacccgcgtttttcagtggacagactcaacgaccggtattcgcaatgaaggcgtctacaacagtaaaacgggtcaatatgatcatcatcgtccacgcgcatttttcgccgccagctggcacgacgagagcagccgctattccataggcggctcgcagcaaaacgatgtctcccgtcaggtacagggtatctttgaaaaacggataccactagacgatggttatgccctgaaaggcgagctgctcggtttttacgcccggctggaggggctaagtcgttcatccacccagcctaatgagaccgggttggttagcgctcagtttacctggagcgccccctggggcagcctgtttgccagcggcggctatctgcaacacgccatgaacggcgcagtggtcgataccgatattggttatcccttctctttaagcctcgatcgcaaccgggaaggcatgcagtcctggcaggcgggcgttaattaccgtgttacgccacagctcaccatgacattcgcgcctgtcgtcacgcgcggttatgagtccagccagcgcgctgttcaaattaagggggtgggtctgctgggagccataaattatcgtattgaagaggggccgctagagggcatgaacatttttcttgccgctgacaaagggcgcgaaaaacgcgacggtagcgcgctgggcgatcgcttgaattactgggatgtgaagatgagcatccagtatgattttatgctcaggtaa

SEQ ID NO: 374034 - DNA, 1374 bp, Salmonella enterica
atgaaccagccgctttcctggcgcgttatcgtaggctacagcctgggtgatgttgccaataatttcgccttcgccatgggggcgctgttcctgctaagttattacaccgacgtcgcaggcgtcggtgccgccgctgccggtacgatgctcttactggtacgaatatttgacgccttcgccgatgtggtggcgggacgcatagtagatagtgtaaatacccgctgggggaaatttcgcccgttcctgctgttcggatcggcgccgttaatgctgtttagcgtactggtattctgcgtcccggcagagtggagtcatagcaacaaagttatttacgcatatctcacctatatgggacttgggttctgctatagcatggtcaatattccctatggatcgctggcgacggcaatgactcaggaaccgcgttcgcgcgcccgtctcggcgcggcgcgcagtattgcggcctcgctaacgtttgtctgtctggccttcctgatcgggccgcgtattactcattccagcccgacagaaatggcgtcggtctacctcttctggaccattatcctggccattgccggtatggcgctgtatttcatctgttttaaatctacccgcgaaaacgtggtgcgtatcgtcgcgcagccgtcgttaaaaatcagtctgcaaacgcttaaacagaaccgcccgctaatgatgctttgtaccggcgcgctatgcattctgatctcgaccttcgccgtcagcgcatcgtcactgttctatgtacgctatgttttgaatgataccgcccttttctcggttatcgtgctggtacaaatgctggtaggttctgtggcgtcagcacctctggttccccgtctggtggcgaagataggtaagaagaataccttcctggcgggcgccttaatgggcacccttgggtatttgcttttcttttatatgtctgaccattcagtgcccgtggccttaaccgctctggcgattgccgctattggccaggggatcaccatgacggtaatgtgggcgctggaggcggataccgtggagtacggcgaatatctcacgggcgtgcgcatagaaggtctgacgtactcgctattttcttttacccgtaaatgcggccaggctatcggcggttctattccggcctttattcttgggttaagtggctatatcgccaatcagacgcagacgccggaagtcattaccggtatccggatgtctatatcgctcataccgtgcggctttatgttactggcttttattattatttggttttacccattaacggataataaatttaaggagattgttcaggagatagataaacgaaaacagtcacagcaacaacttattaaagattttaataaatag

SEQ ID NO: 374035 - DNA, 1812 bp, Salmonella enterica
atgttacgtcccgtagaaacccagagccgcgaaatcaaaaaacttgatggactgtggtcgttttgcacggatgcagacgattgcggtatcgcgcaacaatggtggcgacaaccgctcccccaaagccgcgctatcgccgtaccgggtagttataacgatcagcttgccgatgcagagatccgcaactatgtcggcaatgtctggtatcagctcaacgtccgcatccccaaaggctgggagcatcaacgcatcgttctacgttttgatgccgtcacgcattatggaaaggtatgggtaaatgaccacgccgtgatggaacaccagggaggctatacacctttcgaagcggatatcagccacctggcggcagccggagagagcatacgtatcacagtatgcgtcaataacgagctgagctggcagactatccctccgggggtggtgacccgtgatgaaacggggaaaaggcagcaatcatacttccatgatttctttaattacgccggtatccaccgtagcgtcatgctctacaccacaccaaaaacgtttgttcaggatattacggtgacgacggaggtcgcgaacgatctctcccgggccacactgagctggcgggtggaggccaacggtgaagtacgcgtagaactgcgggatgccgggcagcatattgtcgcctacggcgaaggggcaaagggcgaattacagatagcagcgccacgattatggcaaccgggcgaaggatatctgtacgagctgcgggttatcgcacagcatcaggacgaacgtgatgactatccgcttcgggtaggaatccgtagcgtagcggtaaaaggcgaacagtttctgataaatcataaacctttttattttaccggcttcggtcgccatgaagatgccgatctacgagggaaaggatttgataacgtgctgatggtacacgatcacgcgctaatgtcgtggattggtgccaactcttatcgcacgtcgcactatccttacgccgaagagatgctcgactgggcggacaagcatggcattgtcgtcattgatgaaacagcagctgttggtttcaatctctctttaggtatcggctttgattcctgcgaaaaaccgaaggcgctatacagcgaggaaggcgtcaatgatgaaacacagcgggcgcatctcaaggctattcaggaattgatcgcccgcgataaaaaccatcccagcgtggtgatgtggagtatcgcgaatgagccggatacccgtccagaaggcgccagagactattttgcgccactggcgcaggccacgcgcgaactggacccgacccgccctataacctgcgtgaacgtcatgttttgcgatgtggaaaccgacaccatcaccgacctcttcgatgtggtgtgcctgaaccgctattacggttggtatgtacaaagcggcgatcttgcgaaagcagaaaaagtgctggagaaagagttactggcctggcaggagaaactccaccgccccatcatcatgacggaatatggcgtcgatacgctggcagggctgcattcgatgtacagcgacatgtggagcgaagagtaccagtgcgcctggctggagatgtatcaccgagtattcgatcgcgttagcgccgttgtcggcgagcaggtctggaactttgccgatttcgcgacttcacagggcattatgcgcgtcggcggtaatcgaaaagggatttttacccgcgacagaagaccaaaatcggcggcctttatactgcaaaaacgctggaccggtatgaccttcggcgaaaagccacagcagggagagaaatcatga

SEQ ID NO: 374036 - DNA, 474 bp, Salmonella enterica
atgagccccggcacactctatcatcacttcccctctaaagaggccctgattgaagccattattttagaagatcaggaaagagcactaacccattttcgtgagccgctggagggcgttgggctggtggattatctggtggagtcaactattgccgtcacgcgtgaagactgcgcgcagcgggcgttggtcgtagagattatggctgaagggatgcgtaatcctcaggtcgcggaaatgctaaccaataaataccacactattatcgcctcgctggttgcacgttttaacgatgcgcaggcgaagggggaaattggcgccgatgtggataaagaaatggcggcaaggctattattagctaccacgtatggtgttttatcggatagcagctctgctgagaatgcccggcacgtcagttttgcgacgacgttaagaactatgttaaccgggctactaaaatgcaactctgcaagctag

SEQ ID NO: 374037 - DNA, 924 bp, Salmonella enterica
atgggatatttaaaattacctgagggtaaaaggattgcggtcaatcttggtgtcgatgtagatgctcagtctttatggctgggcggatttaatcgaccgtcgccatcctttatgtcacgaggagagtttggtgcacaagttggcgtaccaaggcttctgaaattgttcaaagaaaataatatcaaaaccaccttttttattcccggacacactgtagacaccttcccggaaatcagtaaagcgatttttgatgccgggcatgaaatcgctcaccatggctactatcatgaaaatccgacgctggtgaatcgtgatacagagcgccgacttatggatctggcgttcgcctgttataaaagacatttcggcatacgtcctgtgggataccgttctccctattgggattatagcgagaatacgctggatcttctggaggaagccggttttctctatgacagtagcctgatggcgagagatcttgtgccttaccatcctcaacgttggcaggtgaattgggagacgggaaatatcgcaggcccggccagcgcgattctggaaattcctgttagctggtatctggatgattttcccgcactggcgtataccggcaaccaggaggggatgagcgatactgacggtgttctgcgacgctggaaggatatttttacctatgcttataaccatcaggaaaacggtttatatgcgatggcccttcatccgcagataatcggtcatgggcatcatatgatgatgttgtcacgcttgattgaacatattaaagggcatgatggcgtatggtttgcaacctgtgaagagatagccagtgtctgggtggatgacgaagaggatcgacaaaaaatgctccgtcctgatgttcgtggcgtagcgccggttccggatgattatggctggccaggcaaatga

SEQ ID NO: 374038 - DNA, 456 bp, Salmonella enterica
atgcgccgcctgcgggaaaatctcgcccaggcgaacctcaagctcgatagacattatccggagccgaaactggtgtatacgcaacgcggcacctcggcgggcaccgcctggctggagagctacgaaatccgcctcaacccggtgttactgctggaaaacatcgacacctttattgcagaggtcgtgccgcatgaactggcgcatctgttggtgtggaagcacttcggacgcaaggctccgcatggcaaggaatggaagtggatgatggaaagcgtgctgggcgttccggccagacgtactcatcaatttgcgctgcaatccgtacggcgcaatacctttccctaccattgccaatgccagcaacatcaactcaccgtccgccgtcataatcgggtagtacgcggcgaagcggtttatcgttgcgttcactgcggcgaaccactggtcgccgggtag

SEQ ID NO: 374039 - DNA, 1992 bp, Salmonella enterica
atgtcctcacgtaaagagcttgccaatgctattcgtgcgctgagcatggacgcagtacagaaagccaaatccggtcacccgggtgccccgatgggtatggctgacattgccgaagtcctgtggcgtgatttcctgaaccacaacccgaccaacccgtcctgggccgaccgcgaccgctttgtgctgtccaatggccacggctcaatgctgatttacagcctgctgcacctcaccggctatgacctgccgatgtccgaactgcagaatttccgtcagctacattcaaaaacccctggtcacccggaagtgggctacaccgctggtgttgaaaccactactggcccgctgggtcagggtattgccaacgccgtcgggatggcgattgccgagaaaactctggcggcgcagtttaaccgtcctggccacgacatcgttgaccacttcacctacgtctttatgggcgacggctgcatgatggaaggcatttctcacgaagtgtgctctctggctggtactctgaaactgggcaaactgatcgcgttctatgatgacaacggtatctctatcgatggtcatgttgaaggctggttcaccgatgacaccgcgaaacgttttgaagcctacggctggcacgttatccgtggcattgacggtcatgatgccgacgccattaaacgcgccacggaagaagctcgcgccgtgactgacaaaccgtccctgctgatgtgcaaaaccatcatcggtttcggttcgccgaacaaacagggtacccacgattcccacggcgcgccgctgggcgacgcggaaatcgcgctgacccgcgaacagttgggctggaaatacgcgccgttcgaaatcccgtctgaaatctacgcccagtgggatgcgaaagaagccggccaggcgaaagaatccgcatggaacgagaaattcgcggcttatgagaaagccttcccgcaggaagctgctgaattcacccgtcgtatgaaaggcgacatgccggctgacttcgatgcgaaagcgaatgaattcatcgctaaactgcaggctaacccggcgaaaatcgccagccgcaaagcgtcccagaatgccatcgaagccttcggtccgctgttgccggaattcctcggcggctctgcagacctggcgccctctaacctgaccctgtggtccggttctaaggctatcaacgaagacgcagcgggtaactacattcactacggtgtgcgtgaattcggtatgaccgctatcgccaacggtatcgccctgcacggcggtttcctgccgtacacctccaccttcctgatgttcgtcgaatatgcccgtaacgcagtgcgtatggcagcgctgatgaaacaacgtcaggtgatggtgtacacccacgactccatcggtctgggcgaagatggcccgacgcaccagccggtcgagcaggtggcaagcctgcgcgtaacgccgaacatgtccacatggcgtccgtgtgaccaggtggaatccgcagtggcgtggaaatatggcgtagagcgtcaggatggcccaaccgcgctgatcctctcccgtcagaacctggcgcagcaggaacgtactgaagagcaactggcgaatatcgcccgcggtggttacgtactgaaagattgtgcgggccagccgcagattatcttcattgcgaccggttcagaagttgagctggcggttgccgcttacgaaaaactgactgccgaaggcgtgaaggcgcgcgtggtttccatgccgtccaccgacgcgttcgacaaacaggatgcggcttaccgtgaatccgtgctgccgaaggcggtctctgcgcgtgtggcgattgaagcgggtatcgctgactactggttcaaatacgtcggcctgaacggcgctattgtcgggatgaccaccttcggtgaatccgccccggcagagctgctgtttgaagagtttggcttcacggtggacaacgtgatcgccaaagcgaaagcgctgctgtaa

SEQ ID NO: 374040 - DNA, 444 bp, Salmonella enterica
atgcggttaatagattattttcctgaagcatctattacaataagaccattggcacaaaattggcaggaagctgttgatttttccatgtcatcccttttggctaatcgttatataaatgaaaattatattcaggctatcaaagattcaacaatcagtaatggtccttactatattctggcacctggtgtcgcgatgcctcatgctcgccccgaatgcggcgcgttaaaaaccgggatgtcattaacattgctcaggcaggatgtgcagtttaccgacgaggataacggcataaaattattaatcggcctgtcagcagcagattcagattcacatattggcgctattcaggcgttaagcgaactattatgtgaagaggatgttttagcggcgttattagctgcgaaatcagaaaaagagctggcggatattatagctcgcgcataa

SEQ ID NO: 374041 - DNA, 1380 bp, Salmonella enterica
atggaacacaagtctgctcgtgcaaaggtccaggcttttgggggatttttgaccgcgatggtcattcccaatatcggcgcttttattgcctggggttttatcactgcattatttattccaaccggatggatgccaaatgagcatttcgccaaaattgtcggcccgatgattacttatttactgccggtgatgattggttctaccggtggacatctggtcggtggaaagcgtggcgccgtgatggggggaattggcaccattggcgttatcatcggtgctgatatccccatgtttcttggctcaatgattatgggacctctcggcggtctggtcattaaatatattgatcggttgctggaaaagcggattcccgccggttttgagatggtgattaataacttctcgctgggtatcgccgggatgattttgtgcctgctgggttttgaagtgattggtccggcggtacttattgccaataactttgtgaaggagtgtattgaatcattggtacatgcgggctatctgccgctgttgtctttaatcaatgaaccggcaaaaatcctctttttgaacaatgccatcgatcagggcgtttattatccgttgggaatgcaacaggcgtcggaaaccggaaaatccattttctttatggtggcctctaacccggggcctggcttaggtttgctgcttgcctttacgctattcggcaaaggaatggcaaagaaatctgcgcctggcgccatgattatccatttcctcggggggattcatgagctctatttcccctatgtgctgatgaagccattaacactcatcgccatgattgccggcgggatgagcggaacatgggtgtttaacctgctggatggcggcctggttgcagggccaagcccggggtcaattttcgcttacctggcgctgacgccgaaaggttctttccttgctacgattgctggcgtaacggcgggaacggcagtgacctttattatcaccgctttcattttgaaaatggaaaaaagtagcgaagccgacagcgaagatacttttagtgattccgctaaagcggtgaaagccatgaagcaagaaggcaaattttcatatcgcgacgtgaaacgtatcgcctttgtctgcgatgcggggatgggctccagcgcaatgggcgccacaacgttccgccgacgtctggaaaaggcgggcctgactatcgacgttaaacattacgctatcgaaaatgtaccggatgatgccgatattatcgttacccacgccagtcttgaaggacgtgttaagcgagtcagcgataagcccttaatacttattaaaaactatattggcgatccgtgccttgatgatttatttaaccatttgacatcgaattaa

SEQ ID NO: 374042 - DNA, 1275 bp, Salmonella enterica
atgaaaacgaaagtagctgctatatatggcaagcgggatgtccgtatccgtgagtttgaattacccgacattacggagaatgaactgctcgtaagcgtaatttccgacagcgtatgtctctctacctggaaagccgctttattaggcagtgaacataaacgagtgccagatgatctggaaaatcatccagtcattacggggcatgaatgtgctggaattatcgtcgaagtaggaaaaaatctgactgataaatataaaaaaggacagcgttttgttttacaaccggcgatgggcctgccgagcggttattctgctggctacagttacgaatattttggtggtaacgccacgtacatgataatcccggaagtagcgattaatctgggctgtgttttaccgtatcacggctcatattttgccgcggcatcgctggcggaaccgatgtgctgcattattggcgcttataacgccaattaccatacaacaccttatgtttatgaacatcggatgggagtcaaacccggcggtaatatcgcgctcctggcctgtgccggaccgatgggcattggtgcgattgattatgccattaacggcgggatccagccggcgcgagttgtggtggtcgatatcgatgaagcccgcctggcgcaggctaaaaaactgctgccggtcaaacaggccgctgagaagggcattgagcttatctatgtgaataccgcgggcatggctgatcctgctgcgcaacttcggacattaaccgatggcgcaggatttgatgatgtctttgtttatgccgccgttccgtccgtcgttgaaatggctgacgatcttctcgccgaagacggttgcctgaatttctttgccgggccgacagatagccagttcaaggtaccgtttaatttctacaatgtgcattacaacagtacccatgtcgtagggacatctggcggctccacggaggatatgaaagaggctattacgttaagcgcaacaggacagcttcagccttcattcatggtgacgcatattggtgggctggatgcagtaccggacaccgtactcaacctgccggatattcccggcggtaaaaagcttatctataacggcgtcaccatgccgctgacggcgattactgatttcgccgaaaaaggaaaaacggatccgttgttcagggagctggcgcgtctggttgaagagacgcacggcatctggaacgaaaaagcggaaagatatctgctggcgcaatttggcgtggatatcggggaggcggcatga

SEQ ID NO: 374043 - DNA, 972 bp, Salmonella enterica
atgatgtctctggcatggccgctatttcgcattacggagcaggcagcactggctgcctggccgcaaacgggatgcggcgataagaacagaattgatgggctggctgttaccgcgatgcgacaggcattgaatgatatcgccatccgtgggcggatcgtcatcggcgagggggagatcgatcatgcgcccatgttatggattggcgaggaagtgggtaacggcgaggggccggaggtggatatcgccgtcgatcctatagaaggtacccgaatggtcgccatgggacaaagtaatgcgctggccgtcatggcgtttgcgccccggggcagcttgttacatgcgcccgatatgtatatgaaaaagctggttgtaaatcggcaggcgaaaggcgtgatcaatctggcgttatcgttaaccgataatctgcgaaatgtcgccagggcgctaaataagccgctggaggatctgcgtatggtcacgttagataaaccgcggctgaaaccggccattacacaggcgacgcaacttggggttaaggtattcgctctccccgatggtgatgtagcggccagcgtcctgacctgtttgcaggataacccttatgatctgatgtataccattggcggcgcgcctgaaggcgtaatttccgcctgtgcggtaaaagcgctgggcggtgatatgcaggcggagctgctcgacttttgtgaagcgaaaggggacaacgctgacaaccgcctggtggcgcaacaggagcgtcaacgctgcgaagaaatgggcgttgcggttaaccgtgtctactcccttgatgagctggctgccggtaacgacattctctttagcgcgacgggcgttacgggcggcgatctggttaacgggatccaacgggttgcgaacggtgtgcgcacgcaaactttactgattggtagcgcagatcgaacgtgtaatattatagactctctgcattcatggtga

SEQ ID NO: 374044 - DNA, 576 bp, Salmonella enterica
atgaaggacggtggcaagtccacgcccacctgtagcttgaaagacgatgagtatatcgggacacaaatgacgacgctgacagaagacgatgtgcttgagcaactggatgctcaaaataatttactttcgtttatgacgacggcacataacattttgctccagggcattaagcgctttctgccgtcgctgtttgtcgataatgatgaagaaattgtggaatatgcagtgaagccgttactcgctcaaagcgggccgcttgacgatatcgacgttgcattacgtctgatttatgcgctggggaaaatggataaatggctctacgctgacatcacccatttttctcagttttatcagtacctgcatgaacaggacgcgattcccggttttgccgacgacattacctgggacttcatcagtaacgttaactgtattacccgtaatgcgcccttatatggcgcgctggagtcgatgaagtttgccgacttcgccgcgtggtctgaagtgcgttttaccggtatggtcaaaacggcgatggcgctggcggtaacgacaattttaaaggaattaacgccgtga

SEQ ID NO: 374045 - DNA, 717 bp, Salmonella enterica
gtgaaaatcgcattaacggttaatgggctgcacgttgaagcacattatcatgatgatgaaatagagaaggttcacaagcccttactgcaacaactggctaaaatacatgccgctaaacctgagcgccgtaccatcgtttttcttagcgcgccgcccggcacaggcaaatccacgctgaccaccttctgggaatatctctctcgtcaggatgctggcctgccggaaattcaaacgcttcccatggatggctttcattactataaccgctggctggaggcgcatcatttacgtgcctgtaaaggcgcgccggaaacctttgacgttgataagctggcggaaaatctgcgtctggtgcgggctggcgaagcgacctggccgcagtacgaccgacagcggcacgacccggtggaacacgctgttgtggtcacggcgccgatcgtgattgtggaaggaaactggctcctgcgtgatgacgacagatggcgcgcgttagcggagttttgcgatttctcattatttattcgcgccccggcggaaaccttacgcgcccggttgattggacgtaaactggcgggaggattatcacaggcggaggcggaaaccttttatgaacgcaccgacggcccaaatgtgcgccgggtgctggaaagtagcctgccagccgatctcatgctggaaatgacctctacgggcgaatatcggatggcgtgtccttaa

SEQ ID NO: 374046 - DNA, 708 bp, Salmonella enterica
atgcatccgtttacctcgttaaccttatgggcgctggcggcctgcaccacgctgctactccctgcgcagaccgtgctcccggtttatagcgcggcggccttcctctgtctgctggcgctgaaatcaacgcggcggcgggcgaagtatgtcgcctggctgatgctgtctttagggtttgggctatggctggtacatggcggttggctaacggaatggataagcgggcagcctcgtgatccgcagcgctggatatatgccgttacgctatggctacgcctgctggcgatcgtgtcgacgtcgcagctatggatgcagtatgtgccggttcagcggtttattcgcgccctgttcgcttcacgtctgccacccggcatcgcttacctgttcgctggcccgctgctggtcgtcgaacaactcaaacgacaactgacgatcgttcatgaagcccagcgcgcgcgcggcgtaccgctggatgaaggctggtatcagcggctacgggcgatgcctgcgctgatcgtgccgcttacgcaaaatgcgcttaacgatctgacaatacgcggcgcggcgttggatatgcgggggtttcggctgcatcgcgcccgaaccacgctgtgggcgccgaaagatagcgtgttacaacgggttgcgcggtatggcatggtattgctaatactggcggaagcgggagtatggatatggttacgttag

SEQ ID NO: 374047 - DNA, 954 bp, Salmonella enterica
atgccagtcactttaagcttcggtaatcatcaaaattatacgcttaatgaaagtcggcttgctcatctgttaagcgcagataaagaaaaagcaatccatatggggggctgggataaagtccaggatcattttagagcggaaaaaaaggaccatgcgctggaagtgttacactccatcattcacggtcagggccgtggtgaacctggagagatggaagttaacgtagaggatataaataaaatttacgcctttaaacggctacaacatctggcctgcccggctcatcaggatctgtttactatcaagttggatgcctctcagacacaatttttacttatggtcggcgacacggtgatcagccaaagcaatattaaggacatcctcaatatatcagatgatgcagtgatagaatctatgagtagggaggagagacagttatttttacaaatatgcgaggtaattggtgcgaagatgacctggcacccagaattacttcaggagtcgatttctactctacgaaaagaagtgacgggcaatgcacaaatcaaaacggcggtttatgagatgatgcgtccagcagaggctccagaacacccgcttgtcgaatggcaggactcacttactgcagatgaaaaatcgatgctggcctgtattaatgccggtaactttgagcctacaactcagttttgcaaaataggttatcaggaggtacaaggtgaagtcgcttttagcatgatgcatccgtgcatctcctatttactacacagctattcaccgtttgcagagtttaaaccaacaaattctggttttttaaaaaaacttaatcaggattataacgactatcatgcaaaaaaaatgtttattgatgtaattcttgaaaaactatatctaacccatgaacgttctttgcacattggtaaagatgggtgcagtcgtaatatattactgacataa

SEQ ID NO: 374048 - DNA, 2700 bp, Salmonella enterica
atgacgcagatggaatatctgaactacctccggtattgggggaaaaccaataaatcaaacaaagatataacccccccttatcatttactggcataccattgccttgatgttgctgcctgtggttattacataattaaaaataatatttttgactctagaagtatcttagaaaaatgtggaataatcggtacaaatgcagaaaactggataatctggtttcttgccagccacgatatcggaaaattcgccagaggatttcaaaaatacgccgaattcccagactctcccttagtctctcccgttagcggtgtttccgcgtttgagagacatgattccttaggcttctatttatggggtaaattatttgaagcgtggagttcaggcagtaatgaaattatcgcaggtattgaaccagaaaatcgcgccaggtttgaaagcgctttaaatagctggatgcttattagcaccgggcaccatggcatcccgccggacaccatgaaaaacagaagctcgctggcattcaccgatgaagacattgtcgcagcaacgcattatctggaagcattaagtgaattatttcctttcactctacctcaggagtggaaaaccaaagcagggagaaaatgtttaaaacagcacagttggtttttcgctgggcttgtcacccttgccgactggatgggctcggatgaaagccagtttccactgctcagcagcgccatgccattgaaagattattggcctctcgcttgtgaaaaagcccaacaggccatcctccgaatgccgccgttatctcagcacagctattatcaagatcaccgggcattatttccgttcattcagacgctcactcctcttcaacaacgagcaagcgaactggatatttcagcacccggtgcacagctggttgtcctggaagacgttaccggagcaggcaaaacagaggccgcgctgattctgactcaccgcttaatgtcagccaataaaggccacggtctctacgttgggttgccgacaatggccaccgcaaacgccatgtatcagcgcctggcatcggcttatcatgcgctatttaccgatgagtccaggccatcgctcatcctggcacacggtgggcgagaaatgtcggactctttccgacaatccatctggcagccaacagaaaatatagctgaagattatgcccgtgatgatggcaacgcgactactgagtgccatacctggtttgcagattcacgcaaaaaagcgctgctggcggaagtcggcgtaggtacgctggatcaactcttaatggcggtgatgccttttcgccatcaatcgctccgattgctagggatgcgcgacaaaatcctgctgctggatgaagtgcacgcctatgatggttatatggttaaattgctggaaggtttattgcgcttccatgccgcccagggcggtagcgctattattctgagcgccactcttcccgccgctttacgggaaaaattacttaatgcgtttagcgatggcgcgggatttatgagcgctggtggtagcgataacgcgggttatccatggttaagccacctcacttcctccggtctgttagagcaaccactggccacacgtcccgaagttcaaaggactgtagccgttaattggatacagcagcgccaggaagcactggacattatttatcgcgttgtggcaaccggacagtgcatttgttggatccgcaacacggttgatgatgcgctggatacttaccagcagttgctacacgagggaatcgttccagagcaggatcttttgcttttccacagccgttttgcttttatcgatcgtattgctattgaaaataaaacgttaaactggtttggtaacaatgcccccgtttctgaacgacgtggtaaggtattaatcgccacacaagtcgttgaacaaagtctcgatctggactttgactggatgatcaccgatctggcgccgattgatttattgatccagcgcgccggtcgcctgcaacgccatatccgcgatgcccatgggcaacgaaaatctacgcttccggatgaacgccagccaccaatattgcatattctggcccctcactggcaggagcaggcagaagagggctggttggggcaagagctaaaaggtaccggctttgtttacaccgatcatgcctgcctgtggcgtacccaggcgctgctgcgtcaacatggtgagatccgtatgccggataatgccagagcactcgttgacggcgtatacgagcagaaaattgctgcgccagcaggcttgcagacgatctctgacgttgcctttggcaaagtccttagccaacgttcagtggctgcgcaaaatttattacgttacgatctcggttacgatcgagaagccagcgactttttatgggataaagatagagaattttctacccgtctgggtgaagagagtgttgatgtttatctcgcgagaaaagacattgatggacagctacgccctttagttgatgaaatagatttctgctgggaaaaaagtcgcttatccgtccgaaaatcatggtggcaaaaaaattctggtacattccaatgtccagatgaggaaacattatcctgtttcagaaaacgccaccatcgcccttccggacaggttgtgctggtatctgatgccggagaagctagctattatagtaaacgttttggattggttggataa

SEQ ID NO: 374049 - DNA, 1536 bp, Salmonella enterica
atgaatttaattacggaaaaatggcttcccgtcatattctcaagcggcgaaaaaacgagaatatcattacgcgatcttctggataaccgcattcaggatcttgcatacccccggcccgatttccagggggcagcatggcaaatgctgattggtattttacaatgtaccatcgcgccggaagataaagaagaatgggcggatatctggcatgacggtatcgaattcgaacaatgggagaaggcgttaaatacgatttctctggctctacagttcggcgagcaaaaaccttccttcctgcaaagttttgatcctctcgatagtgaatatggttctattgccgggctgctggtggatgcgccgggcggtaatacgctcaagctcaataaagatcattttgtaaaacgtggcaatgtggagcaaatttgcccccactgcgcggcgatagcgctatttgcgattcaaaccaattcacctgccggcggggcgggttaccgggtagggatgcgcggcggtggtccgctgactacgctggtggtaccgcaggaagaagataaatatccactatggaaaaaactttggcttaacgttttgccgcaggaagagccgccgaatgttacacagcatccactcatttttccttggcttgcgccgacgaaaaccagcgaaaaagcgggaaatgtggtcacgccggataactcgcacccattgcaagcctactgggggatgccgcgacgcatagaactggatttcactcacactgtggcaggtatctgcgatttgtgcggggagcatcacgaatcactgctactgcaaatgcgtagtaaaaattatggcgttcagtacgacagttggctacatcccttctccccatatcggcaggcattgaaagatccatccgcaccctggctggcgtttaaagggcagccgggcgggttaagttataaagactggctggggctgatgcttaatcgcgaggataaattcaacaaaatgcagcctgcgaaggtcgttcgtgccgccggacagcggaacaatatgagcctgtggtgttttgcatttgatatggataacgccaaggctcgctgttggtatcagcaccgaattccgctcattagcgtttcccatgaagagcaatttctcgctgcacttaacaccgtgctggtgctggcatcagaagcgctgtcactgctgagaaatgcgctaaaaagcgccaaattcgattgtccgaaagaagccaaaatggatttcagtatggtggatatcgccttctggcaggaaaccgaacccgcttttcgggcgttgcaagaggcgctggctgtcgatccgcttcggcaggatacgcagactcgtcacgcagtaagtcagtgggaggcggaattagcacactatctatttcacgtttttgaccgtgatgccctgaccaaccccgactgcccggacgatatcctgcagcgccagctgacggcccgacaggatttagccagcagttatcgtaaacataaagcgcgcaaggatgtgttggcgctggtcgaataa

SEQ ID NO: 374050 - DNA, 603 bp, Salmonella enterica
atgctgaacagcaataccgcagcgttatgcagaattctccaccccgatgcgcagaaggcgctacttgactggtttgctacgttgtctgagcgttatgagcgcaaggatggtaaacgagtcaacggtcgcgtctggcgggctgagttgaaaagaatggcgccgccatatggcgtaatgatatgtgaagggtatgacgctctccgccagacgctgcttaaacatatgcgactgcaacctcttgatgagatggctctggcgctgtttgtcagcgtcgctgtgcatattaagagtcataaggagaatattagtttcgctgcgcagttaggggaaaagcttaacggttctacgccgtgcgtttctgttctgcgttttgaacgtttgcaaaaagcgtccgacccggaaacattttgccagttgttgattcaggcagtgaagattcgcggtacggagggggtgaatgttctttcacttgccgatggcattttcctgtggatggaagagtggcaacgacgcgaaaaccatcagccggaattccgtaccccctttgaacgaaatcgcatccgttgggcgaacgaatatctttccacgtcgcgtggcaaataa

SEQ ID NO: 374051 - DNA, 1059 bp, Salmonella enterica
atgacaacttttattcaactgcatttattgactgcttatgcgcccgctaacctgaaccgtgatgactctgggcgaccgaaaacagcgtatatgggcggcgtagagcgtctgcgcgtatcatcgcaaagcctgaaacgcgcctggcgcgtatcggaaacctttgaaggcgcgatggatggatttatgggtaagcgtactcgtcggattggcgtggattatgtttatcgtccgatgattgccgctggcgttaccgggaaaatagcgaaaagcgcagcggagaaaattgctgcgcaatttggcaagttaaagagtgataaaaatgcgcccgaagaaaaaaatctcgaaattgagcagatcgttcacgtcagtaaccatgaaattagtttgattaaacaactggttgatacactgatcgctgacaaacgcgaacctaacgatgaagaagtgaagcttttgcgcaaagagcagcgtagcgtagatatggcgctgtttggccgtatgctggcgtcatcgcctgagttcaacgtcgaggctgcttgtcaggtatcccatgcgttgggcgtaagtgccgtgaccgttgagtctgattttttcaccgccgttgacgatctgaataataaagaggaagacgcaggttccgggcatatgggcgagcagggttttgcctcggcgcttttctatacctatgtctgtatcagccgcgatctgctggtggaaaacctgggtggtaacgaagaactggcgaagcgtactattgcggcactcactgaaacagcgttaaccgtctcgccaaccggtaaacaaaacagcttcgcttctcgtgcctatgccacctatgcgttggccgaagtcgggcaaaaacaaccgcgttctctggcgacggcatttttccagccggtacgcgataccgatcaaattcctgcggcaataacccgtttaaaacagcagcgcgccagcttcgatagcgtatacggaaactgtgcagacgattatcgcgagttgaacgttcaggaaggtacgggatctctggcggaattactggcctttgttagccagtaa

SEQ ID NO: 374052 - DNA, 726 bp, Salmonella enterica
atgaaggaatatctggtttttcagctctatgcgccgctggcgtcgtggggggaagaagcgtctggcgagattcgccactcagctacggttcccacgcgctctgcgctattgggtctgcttgccgcagcgttaggaattcgtcgcgacgaagaagcgcggctgaataactttaaccggcactatcatctggcggtgcacgcgttggcttcacaagatcgttggctgcgggattatcacacggttagcgcgccgcgagaaaacaaaaagtatcgttactacacgcgccgggatgaactgactctcgcgccggatgaagtggggacgcttatctcgcagcgagaatatcgctgcgacggctactggcatgtggcaataagcgccacgcctgatgcaccacattcgcttagcgaattgcgagaggcgctgctgacaccgcattttccgctctatctggggagaaaatcctgcccgctggcgttaccgttagcggcgcgtttaatgaccggcaccttaaaagaggtattcacccatgctgtggaggagatttccgcagcggaattaagtggatttaccctgcgtgagggtatttgttattgggatgatcctgatgaggagagtctggtctggcaacaaaagcagcatagcaataaccagccagttagccgccaacgctggcagtttggcggctacacccgcttcaatgggccgttgcaggagagaacataa

SEQ ID NO: 374053 - DNA, 708 bp, Salmonella enterica
atgtatctttctcgtattcaactccggtttaataatttgcgaccggagatgttggcaaagtggaattcagccaggccttatgccagccaccagtggttatggcagctctttccggaacaggaattgcgtcagtttctgtttcgcgaagaggcgcatggcggcttttttatgctctcggcaataccgccgttatcgcagcactccctgtttcttattgaaacaaaaccatttaatccgcaactgacaaatggtcttgagcttgattttcaactacgagctaacccggtgataacccgtaacggtaagcgcagtgacgtgatgatgaacgcgaaacatcaggcgaaggcgaatggtgtggagaaagaacggtggtgggagcttcaacagcaggccgcgcaggcgtggctggaacaacaagggcagcagcatggtttccggttgattgcaccggaacctgatgatttcgctatgtgggctggtgacgagtacagtgaattgcaggcgcattgtggatgcgtgcaagcgtatcagcagtatcgttttgtccgtaaagaccagcaaaaaccgatcactttcagtagcgttgattttagcggtgcgctctgtatcaccgatgcagcactgtttaaacaggctttattttccggattaggtaaaagtaaagcgctgggctgcggaatgctgatggtaaaaaggaaacgcagatga

SEQ ID NO: 374054 - DNA, 294 bp, Salmonella enterica
atgagtatgctggttgtcgttaccgaaaatgttcctcctcgtctgcgggggaggctggccgtctggttactggaaattcgagctggtgtgtatgttggtgatgtttccgcaaagatccgcgagatgatatggcaacaggtttccgttctggcagatgagggaaatgttgttatggcgtgggcgacaaatacagaatcaggttttgagtttcagacttttggtgaaaatcgacgtattccggtagatcttgatggactgcgattggtgtcgtttctacctgttgaaaatcaataa

SEQ ID NO: 374055 - DNA, 1047 bp, Salmonella enterica
atgttttccgcaacgcgccgctttgccgtcattctggcgctcggcgtaggctttatccttcctgcacaagcagcatcaccagggcctggtgaaatagcgaatactcaggcacgacatatcgccaccttttttcccgggagaatgacgggctcccccgccgagatgttgtctgccgattatttacgccaacaatttacccagatgggataccaaagcgatattcgaacgtttaatagccgatttatttataccacgaaggataatcgcaaaaactggcataacgtgacgggcagtacggtcatcgccgcccatgaagggcgcgtgccgcagcagatcatcattatggcgcatctggatacctacgctccgcagagcgacgctgatgtcgatgccaatcttggcggtttaacgttacagggaatggatgataatgccgcgggattaggcgttatgctggaactggcggcgcgcctgaaagatataccgacccattatgggattcgttttatcgccaccagcggggaagaagagggaaagctaggcgcggaaaatttactcaaacgaatgagtgacgctgagaagaaaaatacgctgctggtcattaatctcgataacctgattgttggcgacaagctctattttaatagcgggaaaaatacgccggaagcggtgcgtacactgacccacgatcgggcattagcgattgcgcgccgttatggtatcgccgccaacaccaatccgggacgcaatccatcctaccccaaaggaacgggttgctgtaatgatgcggaggttttcgataaagcgggaatatcggtgctttctgttgaggcgacgaactggaatctgggtaaaaaagacggataccagcaacgcgtgaaaaatgcctccttcccgaacggcaatagctggcacgacgtacggcttgataatcaacagcatattgacaaggcgctgcctgggcgaattgagcgccgtagccgcgatgtagtgcggataatgctgccgttggtaaaagagctggcgaaggcggaaaaaacgtcctga

SEQ ID NO: 374056 - DNA, 1440 bp, Salmonella enterica
atgaacaccatacttgcacaacaaatcgccaatgaaggcggcgtcgaagcctggatgattgcccaacagcacaaaagcctgctgcgttttttaacctgtggcagcgttgatgacggtaaaagtacgctgataggtcgtttgctacacgataccctgcaaatttatgaagatcagctctcttctctgcataatgacagtaaacgtcatggcacgcagggagaaaaactcgatctggcgctgctggtagatgggctacaggccgagcgtgagcagggcattactattgacgtcgcgtaccgctatttctccacggaaaaacgaaaatttattatcgccgacacgccgggccatgaacaatatactcgtaatatggcgaccggggcgtccacctgcgatctggcgatcctactgatcgacgcgcgtaaaggcgtgctggatcagacgcgtcgccatagctttatctccactctgttggggatcaaacacctggtggtggcaatcaacaaaatggatctcgttgactaccgcgaagagaccttcgcccgtattcgtgaagattacctgacctttgctgaacagttgccgggcgatctggatattcgctttgtcccgctttcggcgctggaaggggataatgtcgccgcgcagagcgcgaatatgcgctggtacagcggtccgacgctgctggaagtcctggaaacggtagacatacagcgtgcggtagaccgtcagccgatgcgctttccggtacagtacgtcaatcgcccgaatcttgattttcgggggtatgccggcactctggcgtctggtagcgtcaaagtcggagagcgcattaaagtgctgccgtctggcgtggaatccagcgtggcgcgtatcgtcacttttgatggcgataaagaagaagcctatgcgggcgaagccattaccctggtactcaacgacgacattgatattagccgcggcgatctgctgctggcggcaaacgagacgctggcacctgcgcggcacgccgcgatcgatgtggtatggatggcggaacagccgctggcaccgggccaaagctacgacgttaaacttgcgggtaagaaaacccgcgcgcgtatcgaggctattcgctatcagattgatatcaacaatctgacccaacgagacgtcgagagcctgccgttaaacggtattggtctggtggagatgacattcgatgagccgctcgcgctggatatttatcagcaaaatccggtgacgggcgggctgatttttatcgaccgactttctaacgtcaccgtgggcgcaggcatggtgcgggaactggatgaacgcggagcgacgccgcccgtggaatacagtgcgtttgagctggagctgaatgcgctggtacgccgtcattttccgcactgggacgcccgcgatttgctgggagataaacatggcgctgcatga

SEQ ID NO: 374057 - DNA, 135 bp, Salmonella enterica
atgacaaaaccagcatcaaccaccaaaaagctacgcaagcagcacacgcctgaatttcgtcaggaagccctgaaactggcggaacgcattggggtggacgctgccgcccgcgagcttaacctgtataaatcatag

SEQ ID NO: 374058 - DNA, 1023 bp, Salmonella enterica
atgcttaatattcaaaattattccgcttctcctcatccggggatcgttgccgaacggccgcagactccctcggcgagcgagcacgtcgagactgccgtggtaccgtctaccacagaacatcgcggtacagatatcatttcattatcgcaggcggctactaaaatccagcagacacagcagacgctgcagtcaacgccaccgatttctgaagagaataatgacgagcgcacgctggcgcgccagcagttgaccagcagcctgaatgcgctggcgaagtctggcgtgtcattatccgcagaacaaaatgagaacctgcggagcgcgttttctgcgccgacgtcggccttatttagcgcttcgcctatggcgcagccgagaacaaccatttctgatgctgagatttgggatatggtttcccaaaatatatcggcgataggtgacagctatctgggcgtttatgaaaacgttgtcgcagtctataccgatttttatcaggccttcagtgatattctttccaaaatgggaggctggttatcgcctggtaaggatggaaataccattaagctaaatgttgactcacttaaaagtgaaataagtagtttaattaataaatacactcaaataaataaaaatacgattttatttccctcgcaaactggcagcggagtgacaacagcaacgaaagcggaagctgagcagtggattaaagaattgaatttaccggccagctgtctaaaggcgtctggttctggttatgtcgtactggtggatacggggccactgagcaaaatggttagcgatcttaatggaataggatcgggttcagcccttgaactggataacgccaaatatcaagcctggcagtcgggttttaaagcacaggaagaaaatctgaaaaccacattacagacgctgacgcaaaaatatagcaatgccaattcattgtacgacaacctggtaaaagtgctgagcagtacgataagtagcagcctggaaaccgccaaaagcttcctgcaaggataa

SEQ ID NO: 374059 - DNA, 888 bp, Salmonella enterica
atggtattgccttcaatgaataaatcagttgaggccattagcaataatcaccttcaacagccgaacaaatttccattaataaatggattagctgacgtaagagactattatgtcgcaaactgcttattgtttaaacttaataaaggtagtttgcgaattgaaaacgaatttggggagttcatcgaacaatctgcgccgtgtttatttttattggaaaaagatcaaacaatcacgcttagtatgagcgaaatagaagggcatattgatttttcttcactggaagtttcctatgacttaatgcaaaaattctacaaagttttttacagtacaagaaactataatgatcgagagctatcattaaaaacgaaaccaaagtatttttttcatgcggacttgttgccagggatgagtgatacttttgactctattttgcatggtgtggcatgtccacgggtttgtagtaatgtgagtattgatgatcatgattattcatatttctcattgatgtatcttatatcggcatttgtacgtaagcccggtgggtttgatttccttgagcgagcaataaaaattacgacaaaagagaaagtttataacattattatcagcgatctcacccgcaaatggtcacaggctgaggtggcaggaaagctgtttatgagcgtatcaagtctgaagcgaaaactggccgctgaagaggtgagttttagcaaaatatacctggatgctcgtatgaatcaggctataaaattattacgtatgggggctggaaatatttcacaagtcgcgacgatgtgtggctatgatacgccttcttattttatcgctatttttaaacggcattttaagattacaccgcttagctttatgcgtacgatgaaccattga

SEQ ID NO: 374060 - DNA, 993 bp, Salmonella enterica
atgcagcgttcactcggtagtctggccggtatggctacatctgcttttggcgcggggacttatgctgctatgcggcaagccacctctcccaaaactattctggaacatatcattaacttttttacctgtggtggggtacgtcggagaaatgaaacacagtataaggaattgatagaggttatggctgatacattgaatagttcaatgcctggcagaggtgctccgttgccagaaaacattatactggaggatatgggcgggtgtcgtgtcgaatttaatcttcctggtgagaataacgaagctggacaagttattgtacgagtcagtaaaggcgaccattctgagatgagagaaattccgcttgcctcttttgaaaaaatatgtcgagctttactattcagaaccgagttttctctccctcaggattctgtaatattaactgcccagggaggcatgaatcttaaaggcgctgtccttcccggagcaaatctgacggcagaaaatttatgtgacgcagacttaagcggcgcaaatctatcgggagcattattaggcaacagtaacttaacgaacgcctgtctggaagatactattatgtgtggcgctatcctcgatcacgctaatcttactggcgccaatttacaacacgcgagtctgttaggctgtagcatggtagaatgtaattgttccggtgcgaatatgaatcacgctaatgtttcaggcgcaaaccttatacttgccgatatgagcggtgcgacattaaagggtgctactataatggctactgatatggaaggcgctgtcttaacccgggcaaacctgcaaaaggcgagtttcatttctactaacctgggcgaggttgatttgtccgaggctaatttaaaaaataccagttttaaagattgtacactaaccggttcatgtaccgaagacgccacaatgtctacaagtacacaagcactttttaacgaattttatagtgaagatatttag

SEQ ID NO: 374061 - DNA, 870 bp, Salmonella enterica
atgattctatctgagaaaacgcttgaaaaactgagggttttgatcaatgaggatacggagtatcgttccggtccaaagcttgttcagttctttaatgatcttggttttcaagatacatatgtacagggatttccttcaaggtggatgtataccgatgaaaagttgagcgtgataaatggtagtccgcagttagatcgttgtatcaagaaattgttcgctccaattaactttgttggcgatatacctcgattagacgccttgatcactgaatttaataaatatatggcatttgataaatggacggttaaacgagaaaatgctgagattgtttttgagaaaaaggataagatcgttgtagatactgagaatcaacggaaggattctgaagatgattttttgagaagagagttcaataatgttgaatttacttctgatttgattgatccatttgtggcagatgtattgaagggaagaatcaaagaaattgagaattgctatccggcaggcgcgtatctgtcagtgatatttcttgctggaagcacattagaaggttttttgctgggtgttgcttcgaaatatccaaaattgttcaatacaacaaaatcatcgcctaaagataagagtgggaaaataaaacaatttcatgaatggtcattgtcttcatttattgaaacggtcagagagttaggattgattgagtatgatacatatcgattcagtcatactctcagagattttagaaactatatacatccataccaacagctatcacatcaattcaatccgagagaacatacagccaaaatttgtttacaggtactaaaagcaagcattacggaagtaaatgatcatattgggaaattaaaatag

SEQ ID NO: 374062 - DNA, 384 bp, Salmonella enterica
atgggcgaaagtatttttattgggattttaacaggcattatcagcggggcctacacaggacttatactatctaagtatgtgcttttcacatcattacgacgggaaacactcagaattgtcaggcggattaattatatcgatggagaaggatactcaaattatgagtcgttatctgaattaatattaatatcttctgattttcttgcgttaaagcataagagggcaggggaggacgttatggccattttcaatgaactgaacttagaggtattgaactctaataagaaaactaatggtgataaaatagtagatgctcagcgaaggttaagaatgatgcctgtaaatatatggtctattattaatccactatcttttaggatgtga

SEQ ID NO: 374063 - DNA, 312 bp, Salmonella enterica
atgaatacggatgataaaaataggaagccaagaacagaaaaaaccattaagcaaaaaatagcatcagcgcagatgcgtctgaatcgtctcaagaccaaagagcaatctttatccaagagtgctgagacacgcttgaagatcatccttggtgctgaagtagttaaagccgtgggctgtaaagttgaagatgtcgataaagagtttgtattagggatattattacaaaattcggatattaatacggaggctaaagcgagagttaaattacgagggaaaagattccttgaggatatggtgggaaggcaagaataa

SEQ ID NO: 374064 - DNA, 216 bp, Salmonella enterica
atgaatgtcgcctatcctgacagtaatggagcattagtatttgatgataaactgtatattcaagatacgctttcagatgatcaacatttcgatacactttttagaaatcataaaatagaaaaacctaaacagaataacaaaacaaaaccacctttagtacatctccaaaaaatgcacattatccgtcagaagagatttctgtaccaacatgtataa

SEQ ID NO: 374065 - DNA, 204 bp, Salmonella enterica
atgttatctattgaagcaaccctagacaaaaatgaaaatgatctacctcaacttcatttaaaatattacgttcttgaacttgtcaatgatatactagggagtagccaaaataatgaaacggtaagatacaccattagaacatactctcgttattttaactctcacccgataagacaatcctacctagttaattcagacttttaa

SEQ ID NO: 374066 - DNA, 792 bp, Salmonella enterica
atggcattatacataaatgcttaccgtgattttggacaagtattaagtaactctattggaattaaagcagatttcaactttcaattaaatgaaattaaaagtggttcaatacttagtaaactctcagtgattcccggaaaaattgacgaaatattagccaatgcattttataactcaggtgatgagttatttagagagttaactgacattgaaaccaccgacactgaagaacaagtagaaactctagctgtaaatctagaaactgcattagcaaaaaatctaccacaacaaatagcggaccccaatatagacagacaaaatctatcatttgctctagaaaaattctcaactgcgaatcaaaaaataaagccaaatgaatcagtcattattactagcaatagcgataacaaccaaaactttaaatttaatacaaaatggcgttttggtggaaaaccaagagaaatgttcctagggagtactgaaagcatagaattaaatgataaactctatgtaaccgtctctgttaacgaaggtaattctgtgtggtcatttcgtagcataagtttggataagcgcttgagtggaagaataacacataaagaatggttggaaagatatcaagacggtttaattcctgcaattggaccaaaagatattattgatgctaaaattacttttgatatttacacaccaccaaaaggcaaaggccaaccccagattagaaacttaaaagtgataaacatcagcaatatccaacgaaataatgggttacagtatgaactcgacacttag

SEQ ID NO: 374067 - DNA, 1242 bp, Salmonella enterica
atggcaagacaaaccaaacctctattcgttaaggaaatcgaatctgctaaacccaaagaagcggactacgttctctatgatggcgatggccttgagctactcatcaaatccagcgggagtaaaatctggcagtttcgctacattcgtcctgtcaccaagaaacgagcaaagaagagcataggcccctacccgtcagttacccttgccgatgccagaaactaccgtgcagagtcccgctcactcctggctaaacagatcgatccgcaggaacatcagcaagaacaattgcgcagttcgctggaagccaaaacaaatactttccagctcgtagctgaacgtaggtggaatgtgaagaaagctagtgtgacagaggactatacggaagatatctggcgctctcttgaaagagatgtctttcctgcgattggcgacgttagcgttacagatattaaagctcatacactggttcaggccgtgcaaccggttcaggccagaggagcactggaaaccgttcgtcgcctgtgccagcgcattaatgaggtcatgatctatgcccaaaacacaggactgattgatgctgttcccagcgttcatatcggtaaagccttcgagaaacctcagaaaaagaacatgcccagtattcgaccggatcagctacctcaactgatgcagacaatgcgaacagccagcattagcctctcaacacgctgcctgttcatgtggcaacttcttactattacccgccctgtcgaagcggctgaagctcgctgggaagaggtagacatagaagcgcgagagtggaagattcctgcagcacgtatgaaaatgaaccgcgaccatactgttccattgtcagatgaagcaattgcgatactggagatgatgaagccgttaagtggaaatcgagaatttatctttcccagccgcatcaagccaaacaagccgatgaacagtcagaccgtaaacgcatcgctaaaacgcgcaggttttggtggggtgctcgtttcacacgggctgagatctattgcaagtacggcccttaatgaacaaggttttccacctgatgtcattgaggcagcacttgcacatgtggataagaatgaggtacgtcgagcttacaaccgcagtgattaccttgagccgcgacgacctatgatgcaatggtgggctgactttatagaagcagctgatgcaggaagcatattggctgggggcgtgagaggtattaagttagcggggtaa

SEQ ID NO: 374068 - DNA, 633 bp, Salmonella enterica
atgagatcaataaaggttggcaacgacagcggaggccgtgacgcaataaacaggctgattaaggcttacaattttagctcccggcaacagctgtgcgaccatctatccgtatcaaaaagcacaatggcaaacaggtacttacgcgatagtttccctgctgaatgggtaatacagtgcgccctcgaaacaggtgtttcgttgctttggcttacaactgggcaaggggataaaaatgatggtaatgggcaagaaaaaagttttgattttgtgaacccatctcacatcaaaccgttatctgaggtggtagctcctgagattgataaagccacgctagatggtggcgctttggtggatcacgggaaagtcatattggataacagcctgataccgcacaacatgacgaacccattacttatccatactgatgatggctcttacctcgttgaccgtagcggaacacctcccgttaatggtgtttggctcgtagatattgatggaataaaaacgattgcaaaactatcgcggatacctggcaaccgcttagtcgttcaacaaggtgactcatcttttgaatgctctttggacgacattgaaattgttgggcgcgctattaaatcaattaagagtgtttaa

SEQ ID NO: 374069 - DNA, 246 bp, Salmonella enterica
atgagcactgaaatttcaattcgtgtaccaaaagtgatagccactcctgctgagttcgcagagtgggagggatactcccgtggttcggtttatcagatgattcataacggtaaactggctaactacattgaaaagaaagaaaaaaataaaggtcgtgttttcatcctttacctcaaatataagaaggaacaggcccgcaagaacatggagcagtcagccttcaattacaacgttgttgtcggttag

SEQ ID NO: 374070 - DNA, 201 bp, Salmonella enterica
atgctgactaaagaaccatcttttgcatcacttctcgttaagcaaagtcctgcaatgcactgcggtcatggctggattatgggaaaggatggcaagcgctggcatccatgccgctctcaggatgcgctgctggctgaactgtccactacaaagcaggtgaaatcatggctattgaagacgctgcggcgactgttccattaa

SEQ ID NO: 374071 - DNA, 351 bp, Salmonella enterica
atggctattgaagacgctgcggcgactgttccattaagtcatggcgagcgacttgcaggacttaaccatataaacaaactaagagaaaaagtattcggtctgaatatagagccagaattggagcgatttttaaaggatatgcgagatccaagagatgtaaataataaacagaatgtcagggttttggcggcaatgttatttgcagcaaatattcctgctaggcgtcacaacataaccgtcagtgaaatgacggaagaggaaaagaataatttgaaagaaataataaacgcctttcgtgccgctgtaggtttgtttcctaaatggcctgcaattcctaaaaaacctgcctaa

SEQ ID NO: 374072 - DNA, 150 bp, Salmonella enterica
atggataaattacgctgtttagcaatctgcgttctgctgttccttgtagtggcagtggattttaccgggcgcattatgtctatgctggcagatggtgttttggtagcagggatcattgcagtggcgctacccatgtttaaaaagtcctaa

SEQ ID NO: 374073 - DNA, 234 bp, Salmonella enterica
atgcgaaatattgaaacccgtatcaccaaaacaggaccagatgatgctggtcttaaccagatgctggctgatgcacgtatggaagaacgccgggcacgtgccgcagcaatggcagcccgtcttgatagcctggcttgccatatcacgtcacgtcagcttaaccacgttgaagcggcggagctgttgcgtattgcggctgaaaacattcagaacgaagcacaggagatccactga

SEQ ID NO: 374074 - DNA, 297 bp, Salmonella enterica
atgactatgcgcatccatcagataaaaattgcacctaagtattttaatgccgtagtcgctggcagcaaaaaggcagagcttcgtaaagatgatcgcggctacaaagttggtgatgtcctttctctctgcgaatggaagcacggttcatatactggtcgggaatgggccgctgttattacccacactttgccgattaatgaagttgtggcagtggaagggcaatgggtaattctttctattcgctcattaacgccgcttgaggctctctcctatgtcatttcagggggagctatatga

SEQ ID NO: 374075 - DNA, 1743 bp, Salmonella enterica
atgagtacttggaaccaggcttacacagcaagagatgatttgaaaacatatggtgataatggattggctttgtttgctttagccttgcatttccgaattgatgatattgatagcgttgctgcagagtccattaccgatgggcatgatgataagaaatgtgatctcgtatacattaatgaagaagaagagtttgccgtacttgcgcagtgctatttctcaagcaaagcaagacaagaagcaccagcgaataaagctagtgaccttaatattgctttggcatggcttctacaaagagatttgctagacgtaccagacagaataaaatcttcagctcaacagatacgaacgtcaattaagcaagggaaaattaaaaccttatatgtttggtatgttcataatctgccatcttcagcgaatgtggtgcaagaattaattacagtgcagcaaacagccacaacaattttgaatcatgattttgaagatgctaaagtgcaagtccatgcaatggaagtcggtgccgaaaaattgacggaatggtatagtgagtctctttcaccaatactggttgatgagatattcaatataaaagtcagtgatggaggatatgaaattaaaggaagtaattggaattcattctgcaccaccatacagggaagggacttagcgagagcgtacaggaaacataaattaaaaatattttcagctaacgtaagagactaccttgggtcacgatcctctgattcaaatataaataatggaattcgcactagtgcagaaaattctgcgtcagatttttgggcattcaacaatggcgttactgtattggtgcatgagtataaatttgatgaagctgcaaagaatctcgaagttaaagggatgtcaatagtcaacggtgctcaaacaacaggtgctcttggaacattgcaaaggttgccttcggaatcagtcaaagttcaggcgagattcattaaagttaatgatgcggatgcggatttaatacagaatataattcaatataacaatagtcagaataaggttgaggcatcagattttagaagtacggacaaaatacaaaaacgacttaaaagtgaatttgcttctattcctgatgccgaatatgatggtggaaggcgtggaggtgcagaaagtgtcattcggcgaaaaaccaatctactgccatcttatactgttgggcaggccttaatgagtttccatggtgaaccaacagttgcttataatcagcgatctgctatttggactaatgatactcattattcaaagatttttaatgaaagcacaaaagcttcacatattgtatgtgcttactctcttatgcgatgcattgagaataaaaaaatagctttggcaaagaaagataatctttcaaaaaatgatagtgctcagttaggatatctaaggcatcgtggttcaatacctttactttgctcagctatcgctgaatgtctggagaattttttaggacgccctgttcctgatttatttagggtttcgtttggaaatgcaatttctccttctaaagctgaaagcatctgggaaccaattgttgatgtatgtctggctttaagtaatcagttgctacccgcattgatagatggcggattgaaaagtccaacaaaggtaaaagagtgtatatccaacttttcgcagttgataactgcaacaactcaaatgaatcaacctgtttatgaggtgtttgagaaaaaaatcaaatctgcattctaa

SEQ ID NO: 374076 - DNA, 726 bp, Salmonella enterica
atgcactcaaccccaactaacctcatgactaccgccagcctgcctgtagatcgccctttctttgcttaccagcatgaatggaacagtggcgcacgcagcagaaaccacgtgcttacaaaaatgcgtcaggctggcgcggatttcttttttgcctacgaagccctgaacgatgcactgcataccggacgcaaccagatttttctgggctgcaatccggcatcagccctgacagtcaaaaactatatgtcagcttttttaggtgaggccgcagcctggacgcatcttggggaaataaaatcaggtaaagcgcatcttgaactaccaaacggtgcggttatttattttatcgggccggaaagtctcgccgccgcgctccatggaaacgtctacgtgtcagagtatgcctgggctgactccccaaaaaatatgattgcgctcgccaaaagcctgtccatgcacgcgcgctatcacgctacctactacaccaccccaagccgcaatcccgaggcatggcaggaatacaagaagctgattgcccgcaacagcactacctgcatggcctttaccgctgatgacgctgcagcatccggggcaacgctcgcaaccggagccgcgctctttgatgatgaatggctgaatgacatgaaaaaagaattatcagcagaggactggaaaatgctgtttatgtgcgaatggccccagaatgacaaggagcaggcggcatga

SEQ ID NO: 374077 - DNA, 903 bp, Salmonella enterica
atgggttccaccagaaaagggatgctaaacgtcctgattgccgccgtattgtgggggagttcaggcgtttgcgcgcagtacatcatggagcaaagccgtatgtcgtcacagttcctgacgatgatacgtttgttattcgccgggctgatactggtgaccttctcctttatgcacggcgataagatattttcaattcttaaaaaccgcaaagatgcactgagtctgctgattttctccgtggtgggcgcgctcaccgttcagctaaccttcctgctcacgattgaaaaatccaatgctgccaccgcgacagtgctgcaatttttatcgccgaccattattgtagcgtggtttgcattagcgcgaagaacacgaccaggcattctggtcttaaccgccattcttacatcgcttatcggcacctttttactggtcactcacggcaatccaacatcgctgtcgatctcttcaggcgcgctgttctggggtatcgcctccgcatttgccgccgccttttatacgacctggccttccaggctaatcgcccaatacggcacactgccagtggtcggctggagtatgtcctttggcggccttattctgctgcccttctacgctaaagaaggaacgcactttgcggtgagcggcagtctgattctggcctttttctaccttgtggtgatcggtacgtcgctgacgttcagcctgtatttgaaaggcgcgcaactgattggtggccccaaggccagcattttaagctgcgcggaaccgttaagcagcgccctgctgtcgctgctgctgttggggattagttttaccttgccggactggctgggcacgctgctcattctctcgtcagtgattctgatctccctcgattcccgtcgacgcgcgcgggccgcttaa

SEQ ID NO: 374078 - DNA, 291 bp, Salmonella enterica
atgtctacacccgcgaattttaacggtcaacgccctgccattgatgctaacgacgcagtaatgctgctgattgaccaccaaagtggcctgtttcagaccgtcggcgacatgccgatgccggaattacgcgcgcgcgccgcggcgctggctaagatcgctaccttatgcaatatgccggtcattactaccgcatccgtaccacagggaccgaatggtccgctgattccggaaatccatgcgaatgcgccacacgcgcaatatgtcgcgcgtaaaggggaaattaatgcctag

SEQ ID NO: 374079 - DNA, 858 bp, Salmonella enterica
atgtcctgctacgcagccacagcatcagactatactcagtggtgtctattaaccctctccaactacgttatgttttggcatggtaacaatgcgatgttatggataattaacgataatattgaatttaatccagaaatgaatcgcctggcgtcattatcgaggccagatctcaacattattctgacaacgcccgccagccgctgcttgcgccttctgctggaaaacgccccctccgtcgtctcacaacaaacattctttcaaaaagtgtgggaagaagacggcatggtggtgtcggcaaatacgctttatcagaatatctccattattcgccgcggattacgtaccgttggcgaaaatgaagatacgctgataatcacggttccgcgtagaggctttcagattgagcctggtgtgagcctcatgactatccgcaaggacttcgctcagacaatagaaaaaaagggtgaggcgccgccgcgtacgtcagggcgttggtttaaacattatgtacctgtactttggatgaccgggacatttgctgtcggtattttgcttggcactatcagctggcaaaccgttcctgataaggatttttatgatcgctacacgctggttgaaacaactcagggctgtcattttttctcgcggaatgaagatatcgaaagcggtagccgctttgcaagctataagtcaatgattctaaaaaccggtatggattgtcagaaatacccatgggtctatttcccttccagcagtcgcaccccagcggttacggcattgatttgtcagcaaccttataaaacgcgcggtgatacaggctgcgtgacgctttttttccgcggggtgacacatgggtaa

SEQ ID NO: 374080 - DNA, 2853 bp, Salmonella enterica
atgccaactccccaaaattactcattcatcgccatagcggtatcagcagcattagcctctatggtatttccctcccaggcggcctgggttgacgttgatagtctgccatccagtgggctggttagtcagttgccgccggaattacaggccattattcccgctcaggccagtaccggtttcaccaaagtcggtaccatgcccaactacgtttatcagtggaacaccggcaccatcccggtttatggcaatggcctcacgcttaatgggccgggcgcggaggcgtttgaacacactgtcacggttattcaaaacagcgggacgggaagtccgggcgtgatttttggcaacgacctgaccattcggacgcagtcggcgaatgccgcgaataatggtagagacgtcgatggcatccgtactcacggcgcgaatactccggataacccggtgtttattattaccggtgaccgcacccgcatctacgtggatggtcaggatggtgacggtattaacgccggatataactcactgggccagggttggaccggatcggccaatatttacgtcggcgacgatctgtatatcaaaactaccggtagccagggacgtggaattacagccaacgccatgagggatgcgtcacgtgccaaaaatacgattgtcgtcggcaatcgtgcgcatattgttactaccggcgacagttcagaggggctgcgtaccggacaaagcggttcgttgattcgtctgggtgacgatgcaaccatcgaaacctccggcgcatcctctacggggatttacgcagcatcctcctccagaaccgagcttggcaacaacgctactattacggtgaacggtgccagcgcacacgcggtatatgcaactaacgctaccgttaatttgggagagaatgccgctattagcgttaacagcgccagtaaggctgcatcctatagtaaagcccctgccggtttatacgccctctcccgaggcgccattaatctggcaggcggtgcggctattactatggcgggcgataacagtagcgaaagttacgccatcagcacggagactggcggcattgttgacggttcttcaggaggacgtttcgtcatcgacggtgatattcgtgctgctggcgccaccgctgccagcggtacgctaccgcagcagaacagtacgattaagctcaatatgacggacaactcgcggtgggacggggcgtcgtacatcaccagcgctacggcgggcacaggcgttatctctgtacaaatgagcgatgcgacctggaatatgaccagcagctcaacgctcactgacctgacgctgaatagtggcgcaaccattaacttcagccatgaagatggcgagccatggcaaacgctcaccatcaatgaagattatgtaggcaacggcggtaagctggtctttaatactgtgctcaacgatgatgattccgaaacggacaggctgcaggttctcggcaatacttcaggtaacacatttgttgcagtaaataatattggaggagccggggcgcaaaccattgaaggtattgaaattgttaacgttgctggcaattccaacggtactttcgaaaaagcaagccgtattgttgccggagcctatgactacaacgtggtgcagaaaggtaaaaactggtatctgaccagctacattgagccggacgaaccaattattcccgatccggtggaccctgttattcccgatccggtagaccctgatccagtagacccggttatccctgaccctgttattcccgatccggtggaccctgatccagtagaccctgagccagtagacccggtcatccctgatccgacaattcctgacatagggcaatctgacacaccgccgataacagaacatcagttccgtccggaagtgggcagctaccttgccaacaactatgcggcaaatacgctgttcatgacgcgtctccatgaccgtctgggtgaaactcagtacaccgacatgctgacgggcgagaagaaggtcaccagcctgtggatgcgtaacgtcggcgcccatactcgcttcaacgatggcagcgggcagctaaaaacccgcatcaacagctatgtgttacaagtgggaggcgatctggcacagtggagcactgacggtcttgaccgttggcatattggtgcaatggcaggttatgccaacagccagaaccgcacgcagtcgtccgtgagtgactatcattcccgtggtcaagtcaccggttacagcgtcggcctttacggcacctggtatgctaacaatatcgatcggtctggggcttatgtggatacctggatgctgtacaactggtttgataacaaggtcatgggtcaggatcaggccgctgagaaatataaatccaaaggaattaccgcctcggttgaagccggttacagcttcaggttaggtgaaagcgcgcatcaaagctactggttgcagcccaaagcgcaggtggtatggatgggcgtgcaggctgacgacaatcgcgaagccaatggtactctcgtgaaggatgataccgccggtaatctgctaacccgcatgggcgtaaaagcctatattaacggccacaacgctattgataacgataaatctcgagagttccagccgttcgtggaagcgaactggatccataatacgcagcctgccagcgtgaagatggacgatgtcagcagcgatatgcgtggtacgaaaaatattggtgaactgaaagtgggcattgaagggcaaattaccccgcgcctgaacgtatggggtaacgtggcgcaacaggtaggtgaccagggctatagtaatacccaaggcctactgggggttaaatacagtttttga

SEQ ID NO: 374081 - DNA, 183 bp, Salmonella enterica
atgtggtcaaacctaatgtctatagatgtcgtcagtcacctcagaaatatccgcctcctggcagatatctttaaccgttcgtccggcttcgaccaacttaattacggcgatgttctgatgctcagtgagacgggctttacacatagagatttcttcgtcttcgtcagtagatcgattacgtga

SEQ ID NO: 374082 - DNA, 777 bp, Salmonella enterica
gtgattgtgatgccaaaacgcctgtctgacgagattgcctctcgcgtgcgggcgctgattgaagaacaaaacctggaagcgggcatgaaattgcccgccgagcgccagttggctctacagcttggcgtatcacgcaactctttacgcgaagcgctggcgaagctggtcagtgaaggcgtgctggtgagtcgtcgcggcggcgggacatttgtccgctggcagcacgaaacctggtctgaacagaatatcgttcagccgctgaaaaccctgctggcggacgatccggactacagcttcgacattctggaagcccgccacgccattgaagccagtacggcctggcacgccgccatgcgggccaccagcgccgacaaagagaagatcagactctgctttgatgcgacgctcagcgaagacccggatctcgcctcccaggccgacgtgcgctttcatctggcgatcgcggaagcctcgcacaatgtggtgctgttgcaaaccatgcgcggtttcttcgacgtcctgcaatcctccgtcaaacagagtcgccagcgtatgtatctcgttccgcccgtattctcaaagctgacggaacaacaccaggcggtgatggacgccattctggatggtaacgccgacggcgcgcgtaaagcgatgatggcgcacctcagttttgtccacaccacgattaaacgatttgatgaagaccaagcccgccaggcgcgtattacccgcctgcccggcgaccataatgagatgaccagggagaataaatcatga

SEQ ID NO: 374083 - DNA, 1692 bp, Salmonella enterica
atgagatacattaaatcgatgacgcagcagaaacttagtttcttgcttgcgctctatatcggtctgtttatgaattgcgccgtgttttaccgccgtttcggcagttatgcgcaagaatttaccatttggaaaggcctctccgcagttgtcgaacttggcgccacggtgctggtcactttcttcttacttcgtcttctttcactgtttggccgacgcgtctggcgtgtgctggccacgctggtggtgctgttttccgctggcgccagttattacatgaccttcctgaacgtggtgattggctacggcattattgcgtctgttatgaccaccgatatcgatctctcgaaagaggtggtggggctgcacttcgtattgtggctgattgccgtgagcgtgcttccgctcatctttatctggagtaaccactgtcgctacacgttgttgcgccagctacgtacgccggggcagcgttttcgcagcgccgctgtagtggtactcgcaggcgtaatggtgtgggcgcctatccgcctgctggatatacagcaaaaaaaggttgaacgggcgacaggtatcgacttacccagctatggcggcgtggtggcgaactcctatctgccttcaaactggttatctgcgttagggctgtatgcctgggcgcaggtagatgagtcgtcggacaataattcgttaataaacccggccaggaaatttacctatgttgcgccgaaggatggggatgacacctacgtcgttttcattatcggtgagacgacccgttgggatcacatggggattttcggctacgagcgtaataccacgccgaagctggcgcaggaaaaaaatctggcggcgttccgcggctattcttgcgataccgcgacgaagctttctttacgctgtatgtttgtacgggaaggcggggcggataataacccgcagcgtacgttaaaagagcagaatgtttttgccgtactcaaacagctcggattcagttccgatctgtatgccatgcaaagcgagatatggttctatagcaataccatggcggataatatctcctaccgcgagcagatcggcgccgagcagcgtaaccgcggtaaaacggttgatgacatgttgttgattgatgagatgcagaactcgcttgcccagaatccggagggtaagcatctgattatcctgcatactaaggggtcgcattttaactatacgcaacgttatccgcgcagctacgctcagtggaagcccgaatgtattggggtcgatagcggctgcacgaaagcgcagatgatcaactcttacgataactccgtgacctatgtggatcactttattaccagtgtgttcgatcagctacgtgataaaaaagcgattgtgttctacgcggctgaccacggcgagtcgattaacgaacgcgaacatttgcacggtacgccgcgcaatatggcgccgccggagcaattccgtgttccgatgctggtatggatgtcggataaatatcttgccagtccgcaacatgcgcagatgttcgctcacctgaagcagcaggcggagatcaaagtgccgcgtcgtcatgtggagctgtacgatacgataatgggttgcctggggtatacatcgccgaatggcggcattaaccagaacaacaactggtgccatattcccgatgcgcagaaagtcgccgcgaagtag

SEQ ID NO: 374084 - DNA, 1326 bp, Salmonella enterica
atgccgcaacctggccttactacgccggataacgatgcattaccctggcaaaccaccttacttttggcgcttcagcatgtgctggtcgttgccgccacccccattacctccgtcttcctgatcgccaaagcgctccactttaccgatacggtgaccgcctcggtacttagcgcgacctttctgatgtgcggtctgggcgctattctgcaaagcttgggtgtgaaaggggtgggcgcgcgtttgccgtttattatggtaccggggggcgcgccgattgcgattttcgttgcgatcgctttacagaccaatatccagaccgcgattggcgccgtaattctgacctcgctgttctactttatcgcgttgccgattttccgccgctgcctgcaccattttcccccctttatcattggcatcatgctgctaatggtgtcgattaaccttattcgcctgtacggcgggttgatcattggccagccagggagcgccgacttcgctcatccaaccagtatcattttatcgctggggactatcctgataacgctgattttcgcgctggcgtttagcggtattttgcgccagctggcggtgatgttcggccttttagcgggaacgttgctgggaatggcgctgggcagcaccgattttagcggtgttggtcacgggccgctgtttagtttcccacagcttttgccgttcggctggccgatttttgatctctccgcctcgctgccgttgctgatttacgcggtcatctctatggctgaagcaaccgggcaaacgattgcgaccgcggaaatagtcaattctacgcaaaatgtgcagcaggcgattccacgcaccattcgtggtgatgcggtaatgtcgctgctgggggggatttttggcacctccttaattatcacctccggcgaaaatattggggtggtacgcaccactaatgtgaaatcgcgtttcgtgactgcggctgccggagggttgttaatcctgattgccatattcgcgccgctggtacgtctggcgacctgtttgccaggttcggtggtgtgcggtacggcggtgattgtcttcagcattatcggggtcatcggcattgatatgattgcgcgtgagccactgcatacgccgggtaaaacctacgcgctggcgatggggctggccatgggaatgctacctatactggtacccggcctgtatcagaatttcccggcgggcgtacagatggtctttggcaacggcatggcagcggggacgttgacagcgattctggtgaactcgttgtttaactggagcgaaaagcgcacgcaggccagggtcaaaagttag

SEQ ID NO: 374085 - DNA, 912 bp, Salmonella enterica
atgactgcgtcggcaaaatattgcgacattctgctgcctgatttaatgccgaccgagcaggaagatctgatttcccacgaatccgcaggcaatatgggctatgtcattcttggtcagcccgccacctcgccgaaatttgaaagaaagcccatttactggacgctcagtgaagtggctaaacggcttggtccggacgtataccagaccttcacagaaggccgcacgcagcatgagtgggtcaaatacctgcacgcaaaaaccaaagcgcgtaacccggaaatgccggattacgaagagatgaaacagacagggattttcaagaaaaaatgcccggaggagcactacgtcgctttccgcgccttccgcgaagaccctgccgccaacccactgaaaacgccgtccggtaaaatcgaaatctattccgagcgtctggcaaccctcgccaacacgtgggagctgaagaaagatgagattatccatcctttacccgcctatacgccaggctttgacggttgggacgatccgcttcgtcagcgctacccgctacagctaaccggcttccactataaagcgcgtacccactccagctacggcaatatcgacgtcctgcaacaggcatgtccgcaggagatctggatcaacccgattgatgcgcaagcgcgcggcattcagcacggcgacaccgtgcgggtctttaaccagaacggacagatgctcattccggcaaaagtcacgccgcgcatattgcctggcgtcaccgctatcggccagggcgcctggttaaatgccgacatgtttggcgacaaagtcgatcgcggcggctccattaacattctgacgtcgcaccgaccttccccactggcgaaaggtaatccgtcacacagtaatcttgttcaggttgaaaaggcgtaa

SEQ ID NO: 374086 - DNA, 207 bp, Salmonella enterica
atgtccagaacctcgcttgtgaccactgaaaccggcgttaataactcgccaacccttatcaagcgtgatgtaacaaccgaagtcagccttgcagatggtgatattattttacttggtggccttgctgaacagtcggatggattattctggcctctgacgtgtcgcaggcagggattacaaccgtattgccagagatatggtaagtga

SEQ ID NO: 374087 - DNA, 204 bp, Salmonella enterica
atgggccagaagttttttgacatgcacgaatccagccgccttaacatgtcttttaaatgttctggttcatttaacataatatacattatgcgcattagaatagcagagggcgaaaagcagccccccagcgtgaatcagtcatacaaccagcgaccagacctggcagacgcaatgagcatacctatcgtgaactccggcacctga

SEQ ID NO: 374088 - DNA, 1452 bp, Salmonella enterica
atgagtgcatcacaaaacaagaagaaaacgctgtcattgggtttagcgctaatcccagtcatctccatgttgttattgttgattatcggttacggcatcatggggctacgtatcgaaccgctccttctgtgctctgcggcggtagcggcaggcattgcatggtggcaaggatactgttgggaagacatcatcaactcagtggtggataagctggctaaagcaatgccggttatcatgatcctgatctgcgtgggcggtttgattggcacctggatgtttagtggcaccattccctacatggtgtactgggggctaaaactcataagcccggaatatattttgattgcagccttctttttaaccagcgtggtctccgtctgtaccggtacatcgtgggggtccgccgggacggttggcgttgcgttaatgggggttgccgccgggctggacgtgtctcttgcagcagcagctggcgccgtcgtttctggcgcttatttcggcgacaaaatctcaccgttgtccgactcgactaactttgccgcgattgtcgcagacactactctgtttgagcatattcagcatttactttggacgaccctgccaagtttcctgcttgccgccgtggtttatcttatcgccggacacagtaatatgctgggcgaggtggccacgccgcagcgcgttacggacatcatccactcgctggagtcgctataccattttaatattgttcttattttgccgccggtgatcgtactgtggggcgcaattcgcaagaagcctgtcatcccattaatgttaagcgcctgcgtacttgccttgttcctcggcgtcatcatgcagggactgagcatcaaacagggactggacgctttcattgatggatttgatatcgccatgttcccacaaggcgctgaaggtgtcgtggccgatgttccgcgcctgctaaaccggggcggaatgttctcgatgatgggaacaatactgttagttttctgcgctttttcatttgccggagcgctaacgttaaccggcgcgttaacgatcatcattaaccgactgctgaccattattcatagcgttggtcaactcattgccgccactatcggcaccacaattttggtcacaggagcgaccagcgacggtaaactggcattgttagttcccgccgaactgtttaaagatgcctatcgtcgtatggggctggatactaaaaacctttcacggacgatagaagatgccggtaccgttatcgaacctctcctgccgtggacctcggctggtgtctacatggcgaccacgctgggcgttagcacgcttgaccttctgccctgggctatccagtgctatgcggcgatcttcttcgcattaatttatggttttagcggaattggtattgccagaactgcctccgcttcagaaaagtcgccgcaaacgtcagtgacgaaataa

SEQ ID NO: 374089 - DNA, 2076 bp, Salmonella enterica
atgacaacaaacagggcttttgaaatcagatcaggatacagccatacgcttggcgcgaattatgacggcgaaggcgtgaatttcgctattttttccgcccatgcggaacgcgtcgagctttgtctttacgatccgagcggggagcatgaaatcgctcgtctggagttaccggaatataccgacgaaatatggcacggctatgtcccgaagttgcagcccggcgcgctgtatgggtaccgcgtttacggtccttatgacccggaaaatggtcatcgttttaaccccaataagctgcttattgacccttatgcccgtgagctggtgggcgatattcagtggaacgatgcgcatttcgcgtatcaattacttcatgacgataaagatttgacctttgatgaccaggatagcgcgccatttacgcctaaatgccgggtgattgatccggctgaggctaactgggaggatagacaacggccttccataccgtggtcgaacgccattatttatgaaacgcatgtaaaaggctttacccagcttaattccgcgatccctgagcctctacgcggtacgtttgagggcatggggcataaagccagcgtggattacattaaaagtctggggattacctccgtcgagcttttacccgttcactggttcccggacgatcaacatctgctcgataaaggactgaaaaatttctggggatacaactcgctgggcttttttgcaccggcgacgcgctactatggtccaaaaggtattcagggattccgcgatatggtgcgcgctttccatgatgccggcatcgaagtgatactggatgtggtctataaccatacggcagaagggaatgagcttggtcccacgctgtcatttaaaggtatcgataacttctcttactatcgcaccatgcccgatcagcatcgctattacattaacgatacagggacaggtaataccgtcaatacctctcatccacgggtactgcaaatggtgatggattcgcttcgctattgggcggagtcaatgcatgtcgacggctttcgttttgatttgggcaccattcttggtcgtgagccggaaggctttgatcagagaggcggcttttttgatgcggtaacgcaagacccggtactggcaaaactgaaactgattggcgaaccctgggatatcggaccgggtggctatcaggttggcggttttccaccagggtggggcgaatggaatgataaataccgcgatacggtgcgcgaatactggaaaggtgacaacgtcacaaatgatttcgctgcacgcctgctgggttccggcgatctctatgatttgcgcggccgtcgcccctggtcaagcgttaactttattactgcccatgacggcttcacgctgaacgatctggtgtcttataacgacaaacataatgaagccaatggcgaagataataatgacgggcataatgataaccgctcctgtaactatggcgcagaagggccaaccgacgacgagggcatcaatgcgatacgcgagcgacagaaacgtaatttcctgaccaccttgcttttctcgcacggcacgccgatgttattagcgggcgatgagtttggccgcagtcagatgggcaataacaatggctactgtcaggacagtgaaatatcgtgggtccactgggataatttgccggaaaccgccaatgcgctacgggagtttacccgtcatctgattcaactgcgcgccacgcaaccgttgctgcgccgggagagctggcgtgacggtctggagatccgctggtttaacgccggcggaggggcgcagcaatccgaacaatgggatgagggatcgacgataggcgtatgtattagtcgaccagatcttcagccggaagcggggatctggcacgacgccttactgcttttcaatccgtttgaaggcagcgtaccgttccgtattccgatgtggggagaaggcggctgggtacttgaactgacgactgccgataacgcgcagcagggaatgcggattaccgaagaaatggatttcgatctggccgggcgcagcatcgtgttattcagacgcccctga

SEQ ID NO: 374090 - DNA, 2529 bp, Salmonella enterica
atgatcccaactgcaacgtatcgccttcagtttcgtaatggcatgaccttcgaccgcgctgcggcgctggtgccttaccttaaaaatctgggtatcagccatctttatgcctcacccatctttaccgccaccaaagcgtcaacgcatggttatgatgtcaccgatgcgaatgagattgagccttctattggcgggcgtgaaggatttgaaagactggtggctgaacttaaagcgcaaggtctgggattgatcatcgatattgtgcctaatcacatggccagctcgctggaaaacgcctggtggcgcgacgtgcttgaatatggcaaggagagccgttacgcgcgccatttcgatattgactggtcgcgccgactgacgctgccttttttaggcgacacgtttgacgccgtgctggaaaacggagaaattgcgatcaagcccgatcccgctacgggtaaacccgcgttcgcctattatgataactattatccgcttgcgccggcgacatggcaggggcgcgaggccgaaatactggcgcttaccgataaagccgctattgctgatttgcatgagcgccagccgtggaaattaatgtcctggcgcgatgccgctcgctcgctttcatatcggcgtttctttgaggtcacagggctggtaggaatgcgggtggaagataaaaccgtcttcgacgatacacatcggctgattctggagctggtcagaacgggggcggttgacggtttacgtatcgatcatatcgacggccttgccgatccgaaagcctatcttgcgcgtttacgtcaggaagtggggccggcgtgctatatcaccgtggaaaaaattctcgctaaaggcgagcaacttcctgatgactggccggtttccggcaccacaggctatgaattcatcgcctcgctggcggaggtgctggttgacgatgagcagatagacaatctgcgccaggcttacgagaccgttaaaggcgcgccagtggatatgcgggcggaattacgggcagctaaattgctgatggtcgatcgcaatttcgagggggaatttacccggctgctcgcgcttgcgctgtcgattgccagcgagctacagatcgcacaggaagagagcgtcgttcggcaggcgttacgcgagttattaattgcctttcccgtatatcgcacttacggcacggcagaagggctaccgccgaccgatatttgcctgttacatcgtattgtggaacgggtaaagacgcttgaaaaccctccgcagccagaagcgcttacatttctgagccgccttcttaccggcgatgttcccacctccagcctggaggaggcgacacagtttcgcgttcggttccaacaactcaccggtccgctgatggcgaaatcggtagaggatacgcttttctttcgtcaaaacatgggactggcgttaaatgaagtcggcgccgagcccgtcacgcatcacttctccattgaacgctttcaccatgagatgaaaacccgacaggcgcgacagcctgacgcgttatccggtacgtcgacccacgataccaagcgaggcgaggatgcgcgagcacggctgtatacgcttaccgaagcgccggaacagtggagcgaatgccttgcccgctggcggcagatgaaccagacccatgtcaaatttttgaatgatggcactgcgccaaaatcggcggatacgtggatgttatatcaggcgctgaccggcgtctggcccccgatgctacaaccacaggacgaaacaggtttaaacgcgctgaaaacacgctttgaagcctttgtggagaaagcgctacgcgaagcgaagctacgtaccgattgggtggacagtaatgaggcttacgaaacggcaatgcttgattacgcccgttatttactggcgccggataatcagacatttttgcaggatttttatcgttccttgcaacccttcatccgcgcagggctggttaacagcctgacgcagaccgttatcaaattaaccgcgccgggagtacctgatatctatcaggggagcgaggcgttgaattttagccttgtcgatcccgacaaccgccgcgagccggatttcgccacgctggcgcagcagttagaccaactgacgccgggagttttctcgcgcgaagagagttggctgaacgggcaggtgaatcagtatgtcacagccgcattactgcgtctgcgtcagcagaatcatgagctcttccgttttggcgactatataccgctgcgggctgttggtcagcgtgccgacaaggtcatcgcttacgccagagtcaatcatgatgatgcgctgattgttgttgcgccccgactggtgttcgccgaatgtgacggcttattgtcacaatcgcatagcggtttctgggcaggaaccgacattattatacccggacagcttaatcagcatcgttatcgcaatgtgcttacccaggagaggttaatgcctggtgaacacctgtcgttggcctcacatcagggcggcgtactggttttaatgagcgactga

SEQ ID NO: 374091 - DNA, 786 bp, Salmonella enterica
atgaaaattttaccgctggcactctttatcattccttttctggccggatgtggcgccaataatacgccgccgcaaacgcctattcccggggaaaaaacatctgccaaattacgtaccctggaaacaggcgcggcggctattcaatccagaccacctgtcgatgccatcagtacctaccttgacgggttccatttttatagcggtgataaaaacggacagatggaagcgcaccattacgttaccgtcctgaacgaagatgtcatgcaggcggtgatttacgacggcaatacgaaaaacgcgcgcctgatgggggtggagtacattatcagcgaacgtttatttaaaacgcttcctcccgaggagaaaaaactgtggcacagccaccagtacgaggtgaaatccggtagcctggtggcgcctggcttaccgcaggtcgctgataaggcgttgatgagtaagattgttaatacctatggcaagacctggcacacctggcataccgaccgggataaaaccctgccaatgggtatccctgcgctgatgatgggctttactggcgacgggcagcttgaccccgcgctgctggccgatcgggatcgccgtctgggaattgatacccaggccattaaacgcgagcggcaggatctgcctgaacatcccgttatcaagggggctaacgcctgggagcagggggaggttatccagctacagcgtgctcagggctctggcgaacacgggcgaggcgataccgcgcacttcggtacatctgagcaatcccgacaataa

SEQ ID NO: 374092 - DNA, 636 bp, Salmonella enterica
atgaaactatccgtaacattggcgtttttcggttacatgatggcatccagtttagcacaagctagcgatatcaatatgtggcgtgaaccaaaacctgttgtgaaagagggtaaatattacagcttaatcatggatcgtggcgagttgcagaaagcagtaaaaagcagcaataacaactatctcttttccgaaaaaggtgcaggagtgaaaccgctggtattgatcggctctccggtagagattagcgaatttatgttgcaaaataaaactcgcagtattgaaaaccacattaaaggtctacctgacatttatattggagtgacaaaatataaacccaaacaacgttttaccggcttatttccgctgcaggatatattgactcaaactgttgatcaggtatcgaaatttgtgcccggtaccgatatcaccgatgcggtgggaatccccgccgacctaaaagcattacagcaagctattttggctatgaagccaaaagataaaaccagcaacaatatactgtacgtcaaatttagctacttaccggaagatgggatggtgaaagtaggaagcaaaacagtttcttttggtcgtattctggagaaaatgcagcagagtaatcgtaccctgcgtagataa

SEQ ID NO: 374093 - DNA, 912 bp, Salmonella enterica
atgaccggaatatttgcagaacaaactgtagaggtagttaaaagcgcgatcgaaaccgcagatggggcattagatctttataacaaatacctcgaccaggtcatcccctggaagacctttgatgaaaccataaaagagttaagccgttttaaacaggagtactcgcaggcagcttctgttttagttggtgatattaaagttttgcttatggacagccaggacaagtattttgaagcgacacaaactgtttatgaatggtgtggtgtcgtgacacaattactctcagcgtatattttactatttgatgaatataatgagaaaaaagcatcagcccagaaagatattctcatcaggatattagatgatggcgtcaataaactgaatgaagcgcaaaaatctctcctggcaagttcacaaagtttcaacaacgcttccggaaaactgctggcattagatagccagttaaccaatgatttctcggaaaaaagtagttatttccagtcacaggtggatagaattcgtaaggaagcttatgccggtgctgctgcaggcatagtcgccggtccatttggattaattatttcctattctattgctgcgggcgtgattgaagggaaattgattccagaattgaataacaggctaaaagcagtgcaaaatttctttactagcttatcggctacagtgaaacaagcgaataaagatatcgatgcggcaaaattgaaattagccactgaaatagcagcaattggggagataaaaacggaaaccgaaacaaccagattctacgttgattatgatgatttaatgctttctttactaaaaggagctgcaaagaaaatgattaacacctgtaatgaataccaacaaagacacggtaagaagacgcttctcgaggttcctgacgtctga

SEQ ID NO: 374094 - DNA, 1011 bp, Salmonella enterica
atgaaagctgctgttgtcacacaagatcatcaggttgatgttactgagaaaacgctgcgtccccttcgccacggtgaagctttgctaaaaatggagtgctgcggcgtatgccataccgatctacacgtgaaaaacggagatttcggtgacaaaaccggcgtcattctgggacacgaaggcattggcgtcgtggcggaagtcggtcctggtgtcacctcgctgaaacccggcgatcgcgcgagtgtcgcgtggttttatgaaggatgcggacactgtgagtattgcaatacgggcaatgaaaccttatgccgcaacgtgaaaaatgccggttacacggtagatggcggcatggccgaagagtgtattgtcgtcgcggattatgcggtgaaagtaccggaaggtctggactctgcggcggcaagtagtattacctgcgcgggcgttaccacgtataaagcggtgaagatttctcatattaaacctggccagtggattgccatctacggtctgggcggtctgggtaatctggccttgcagtacgcgaaaaacgttttcaatgcgaaagtgatcgccattgatgtcaatgatggacagctgaaactggccgaggaaatgggcgcagatctgaccattaattcacgtacggaagatgcggctaaaattgtgcaggaaaaaaccggtggcgcgcacgcagcggtggttaccgcggtcgctaaggcggcgtttaattccgcagtagatgccgttcgcgccggaggccgcgtggtggcagtcggactgccgccagaagccatgaaccttgatatccctcgcctggtgctggatggcattcaggttgtcggttcgttggtggggacacgccaggatctgaccgaagccttccagttcgcggcggaaggaaaagtcgtgccaaaagtcgctctacgtccgcttgaagatatcaacgctatttttaaagagatggaacagggacaaattcgtggccgtatggtcatcgatttccgtcgttaa

SEQ ID NO: 374095 - DNA, 1833 bp, Salmonella enterica
atgcgtataacagtaagtgatatatcaaccagagaatcacagcagacggtacagatacaagctatcagaagttgggataccataccgtacctttcaatgttggatggactttatcaggacgatatctttcatgagcaaatatctaatttaccagaagaatatattaagctggatgagatggccaaagatgaaggaaagaacagcttaaatatttatgacttcttctttgagccaacacatgaaattgtatgtgaagaaatccaatcaacattggatttttattattcaaatagcgcaaccttccgtaggctggttaattatatagtagagcgcagtatcaatgacgatgtagacaccaataaatgcgaggtaaagatatctctaaattacagttacgaaaatattgatgggggacgaggatatttatcgcttccatttgataagtacggctatccaatttcccctgactttcacaactgtctaaatggaattacatcagaaaaattgttgttagatctatttctaaaacatattttgcacgatcatttaaatgcaaacggtgaagttacaaacgtttacgccaatgttatttataaagagattgatcccgctgcaattgcacatacatcgtcgtgtttttctcaggtaacgatgagtggtgaacatgagctatttaatgtagatagcgtaactgttccacctaaaagcactgagcaaattatatttgagggaaaggaaattcaaaagcaaattttcttatcttctcatagccgcaatcatcttcagccagtaaccattcataaaatggacaggagtattaaaaacattgcagtaactggtttgttattatcatcaagattagcagtaacatctggtgattataggataaaaaatggtaattcagagggtgagaatgattttttacccgttaaagaattacagaaatatgaaagggctctcccggaggatcatcctgccccaactacggagcctaacctggcaggtaaggtgttagatggcctatttgaacacgttacatctatggcagggggatgctacagaaaacaagcctcatatccaccgctgtcatcggaagcgcctaatacgataaaatatggcgacagagagctcgttttaactaaagaacccggttcagaaacgtatcgggcaacctattcggatagcggaaaagattcagccatgatattttaccgatcttctgatggaagattttatcaggcgtctgggctgaaaggtggggggcttattcgccatattgataagccttattcagagttaagagaaggagacgcgggttatgatgaagaacttctggatattacggatgattcccccctactggaagacatactgtcctccctgtcagaagatttataccctacatcagaagaaaatgtacaaggtatttataagaaataccagagtggggatgctgcagcaggggagaccgaagtggtattatgccgaggtacaataggtccgcaggctgaaaatattgttagttttaaaacagcaggcggtattgaggggggcgatgtagaggtattgcctgtctctgctgaaatagccaaagagcaggttcgaagtggaagaatcgtacctgaatataccaccgatcttagtgttgcagacaggttcagcagggaacattatcttattatcgttagggtaaaagtcaaatatcttacacgaggtagcgtcagtgaaagcggctgggttatgccaaaaaaaacaccagtggaccctgttggtataattgacaggacatatggtaaagcagaaaatacggggcaggcaaacgcttctaagtaa

SEQ ID NO: 374096 - DNA, 1155 bp, Salmonella enterica
atgttgagaaatatcagcgtcaggacatgcattattctatttatggtatgtacgtttcttttggtggatactttacaaatagcttttctgcacgatctccctattttaattacgtgtaatatcatttatctgatctcggcattactgctttggtggtatatgacctgctatctggtagtgccgattaataccgtgaagaaaagtattgaagaggtcgcagcaggaaacttgtctattcatatctccgaatttggcaataattgcgccggacgactcatccccgggattaatagcctgtcggagaatatttccgcgctggtacgtgaaatcagatcctcttcgcaaacggcaatgaccctttccgaacaactggcggcgcgcagtatgtcgctatccgtaaagacggaacagcagtcggcctcgttaattcaaactgccgccagtatggatgaaatggcggcgagtaccaaaaacaatgcggataatacccgaatggcgagcatacaggcggattgtgcaacccaatgcgcccgtaaaggcggtgaattaatggggcgggttacagaaaatatgcgttctattaccgactgtgcctcgcagatgacggagattatttcattgattgacggtatcgcattccagactaatattctggcgcttaatgcggcggtagaggctgcgcgggcgggcgatcatggaaaaggtttctccgtggtggccggggaagtgcgtaatctggcgcatcgtagcgccgaggcggcaaaaagtatcaaggcgctgatcgacgttacgcatgacaatgtgcggcagggggccgccatagtgcaggaggctgaaaaaaatatgcaggagattgttggcggctccgggcaattaaacgtgctgatgaatgaaatttccaccaccacgcgggagcaggaaaagggcattaaccagataaccctggcgttgagcgatctggaaagcgcaacccatagcaatgtcttaatggttgaagcgctatctgcttcttcggatgttttaaaggcgcaggtgatcgagttacagactaaaaccgacaaatttcgtttaagccagccgggttacagtgaacatgcgctgacgcgctctcatgtatcatctctttcgaccatcaccaggcgcggccaggcctga

SEQ ID NO: 374097 - DNA, 825 bp, Salmonella enterica
atgtcgaaacataatcttattatctatagcctgcttctggcggctgcgccgataagcgtcttggcggattcgtcgacaacgtccgcggcaaccgtcgggatgttttctcctcctacggcgccgagcgttgggcacaggcctagttcgccgttgagtgattatgggttggaattgaatgggtattatggatattttgaatcatatatacctataccaggcatgcttttaaaagcaagaatggttgggagagtcagtgatcttgattctgaaaaatatcaagctaatgaaacggctaccacagtatgtacgtattatcgcgttgagaaagatgactcacagcatgagcttctacgtgaaaagccgtgtaaatatgaaattgttatcagcgaggataatgtaggttcgaagataagaattgagcattataacgaaacagatatggtctcagcaccaggatatacgcctgtgccgatggtttctgaactccattctattgaaacaaaacgtatagttaaattgagtaaagatttatctgtcattagtgcagataaatctttactgatgccaggagagagtgctgttgtgaaaattattgttaaagatataaataataaccccatatctaatctcaatctccagtgtgggcatttttcaacaggaagttggaatagtcgatgcgatatcaaagccgggggtaatcccggagagtatcttcagacggtaacttataatggaggttcaaatggagagttgaaattgacatataaatattttggggaattgattaaagataaatttactatctccgggacaataaaaaagtag

SEQ ID NO: 374098 - DNA, 165 bp, Salmonella enterica
atgaaagaagaatcgccccattggcgtcgacgtgtctatgctgctgtcggtcaggctgtggaaattaacgccgcgttcgcgcaattcttctaccagaacgaccagatgacgcatactgtgacccaggcgatcaagcttccatacaaccagtgtgtccccttctga

SEQ ID NO: 374099 - DNA, 426 bp, Salmonella enterica
atgaaaaagaaattaaaggttctgactcttgctcttgcgtcattatccagtgtttgttatgcagctatggctgattatgatacgtatgtgagtaatgttcagattaaaaacctgtcttatggtgtgtatacgtcaggggataaggaaactcagtttttttgtatcgaactgaagcgcgggagtgaggctattagtgtcaatgccgtgtgtaaagtggatgtgtacgggaatcataaacaggggtttgataacatgctaaatatagcaaagtattattatacaacagggggggatgtaaggatatattataaagagaatgtttggcgcgaccccgatttcaaaagtgcattctcttccagggaattaattgcgataactacttgtagctcatcaagttattgtatggggcctatgttgacaaattaa

SEQ ID NO: 374100 - DNA, 165 bp, Salmonella enterica
atgccacttctcaatgacctgctcgatttcagcgaccatccccttatgccaccgccttcagcgcagatgtttgcggaacatcttcctgctgagtgtatacaacactgcctgacgctctctaagcatgcaaccgttcggctttatccgcctggtgtttatccctga

SEQ ID NO: 374101 - DNA, 174 bp, Salmonella enterica
atggctaaattaccgcgccgtaaatgcaaagtttgccgggaatggttttctcctgcttacagcaacgttgtctggtgctgtcctgaatatggcgctatctacgcggtggaactgcgtgccaggcgtatcagggataaacaccaggcggataaagccgaacggttgcatgcttag

SEQ ID NO: 374102 - DNA, 684 bp, Salmonella enterica
atgctgggacaacaaatatccagagttttttctgggaagcacttatatcctggtgtttttataagtaaagacgcagcgtccgagtttgaaaaaacaatcagcactcattataaaactctttcgggtcacattgatctgcaacaatacactaatgatgtaaattgcggagcagttgtaggtattgttgcacagcagcaagaaaacctcatactagatgagatcacattaagcgcgtttaaaaaggtctatattaccggtcatggtgcagcaggcactaatgttctagccagtggcgactctgttttttctgcaaaacaactggttgatattctggttgctaataaagttttagaggttataaaggatataaggattagtagttgttattccgcagataaaagagagcctaatagttttaaaaaggaggacatagataaagcgaatagaaatgctggtttctttgaacgaatggtgtttggagaacgtgatacttttatagagagggttgctaatgagatctggagtcgaggctacacagatgtcaaagtttctggttatcatggtgctggtgtattttatgctggtgaaatcccatttacacatcttagaagcacgacgatcccgccaactatcactgtaaaaagaaagtccgtaagagtaacgctggaaagtcctatagattaa

SEQ ID NO: 374103 - DNA, 267 bp, Salmonella enterica
atgcaaaatgtgtacactaatgtgtatatcctctcatggagtgtacacattgcttgccgatacaaaattaagaaaggctcctggcaaaaaaagagaccaaatcaaggtcatctcagacgctcatggtctcaatgtcaggctctctacatccggcagtataacattcttttaccgatacagatggaacgggaacgctgctcaactgacgattggcgattatccaaccatatcactatctcatgccagggaacgccgtcagtactttag

SEQ ID NO: 374104 - DNA, 909 bp, Salmonella enterica
atggctgcccttaattcgaaagtcaaaaaagccgttatcccggtcgcgggattgggaaccaggatgctgccagcgaccaaagctatcccgaaagagatgctgccgctggttgataagccattaattcagtacgtcgtgaacgaatgtatcgctgctggcattactgaaatcgtgcttgtgacgcactcgtctaaaaactctattgaaaaccactttgataccagttttgagctggaagcgatgctggaaaaacgcgttaagcgtcagcttctggaagaggtccagtctatttgccctccgcatgtcactattatgcaggtacgtcaagggctggcaaaaggcctaggccatgccgtattgtgcgcgcatcccgttgtcggaaacgaacctgtcgctgttattctgccagacgttattcttgacgaatatgagtccgacctgtctcaggataacctggctgaaatgatccgccgtttcgacgaaaccggcaatagccagattatggttgagccagtagaagatgtgactgcatacggcgtggtcgattgtaaaggcgttgagctggcaccgggcgaaagtgtgccgatggttggcgtggttgaaaaaccaaaagcggatgtcgcgccgtctaaccttgcgattgtcgggcgttatgtgttgagcgcggatatctgggcgttgctggcgaaaacccctccgggcgccggggatgaaattcagttgaccgatgctatcgatatgctgatcgaaaaagaaacggttgaagcctaccacatgaagggtaaaagccatgactgtggtaataagttaggatatatgcaggcattcgttgaatatggcatccgtcataattcgctgggtgctgaatttaaagcctggcttgaagaagaaatgggtattaagaagtaa

SEQ ID NO: 374105 - DNA, 555 bp, Salmonella enterica
atgaattcacgcattatcattactggcgggcccagcgcgggtaaaactacgctgattacggctctggaaaaaagtggtttccactgtcagcccgaatccgggcgtgctgttatcaaacaacaaatggacataaacggcgatgcgctgccgtggcgttctccggcgcgatttgcagaagccatgcaggcaatggatattaatgcctggtatcaggccgaacagtccgatcgtcccctcttctacgaccgtgcgctgccggatattgcaggctatctcacgctggtgggcgaaccaatacccaaccggttacatcgtgctattaaccaatttcgctatgccactgacgttattattctcccgccatggaaagcgatatataagcaggataacgaacgaacacaatcgtgggaggaagcggtacggacatatgaggcaatgagagaaatatatccacgttatggttatcggctccacttgttgatgcctgcatcaattcaggagcgcgtaaatcggcttctggggcttattaacgtcatattacccagccgaaaataa

SEQ ID NO: 374106 - DNA, 3744 bp, Salmonella enterica
atgagtaaattcctggaccggtttcgctacttcaaacagaagggcgaaacctttgccgatgggcacggccagcttctcgaaacaaaccgggactgggaggacggataccgccaacgttggcagcatgacaaaattgtgcgctcaacccatggggtgaactgcaccggttcttgtagctggaaaatttatgtcaaaaatggtctggtgacctgggaaacacagcaaaccgattacccgcgcacccgtcctgatatgccaaaccatgaacctcgcggctgcccgcgcggggcaagttactcctggtatctctacagcgctaaccgactgaaatatccgctaatgcgcaaacgtctgatgaagatgtggcgcgaggcgaaaaaactgcatcgcgatccggtagaggcatgggcctccatcattgaagatgccgataaagccaaaagcttcaaacaggcgcgtggtcgtggcggctttgttcgctcctcatggcaggaagtgaacgagctgatcgccgcctccaacgtgtacaccgtgaaaacctatggccctgaccgcgtcgcgggcttctcacccattccggcgatgtcgatggtttcctacgcttccggcgcacgttatctttcgctgattggcggtacctgcctgagcttttacgactggtactgcgacctgccgccagcctccccgcagacctggggcgagcagaccgacgtgccggaatccgctgactggtacaactccagctatattatcgcctggggctctaacgtgccgcaaacccgtacgccggatgcccacttctttaccgaagtacgttacaaaggcactaaaaccgtcgcggtgacgccggactatgctgaaatcgccaaactgtgcgatctgtggctggcgccgaagcaggggaccgatgcggcgatggcgctggcgatgggccacgtcatgctgcgcgagttccacctcgacaacccgcgccagtacttcaccgattatgtccgtcgctataccgacatgccaatgctggtgatgcttgaagaacgtgatggttattatgccgcaggtcgtatgctgcgcgctgccgatctctttgattcgctggggcaggaaaataacccggaatggaaaaccgtcgctatcaacagcaacggtgaaatggtggcgccaaacggttcaattggtttccgctggggtgaaaaaggcaaatggaacctcgaacagcgcgacgggactaccggtgcagaaactgaattgcagctcagcttgctgggcagccaggatgagattgctgacgtgggcttcccgtatttcggcggcgaaggttcagagtactttaatcatgtggcgctggataacgtcctgctgcataaactgccggttaaacgtctgcaactggccgatggttctaccgcgttagttactaccgtatatgacctgaccatggcgaactatggtctggaacgcggcctgaacgatgaaaactgtgccgccagttatgacgataccaaagcgtatacgccagcatgggccgagcagatcactggcgtgccgcgggcgcagatcatccgtatcgcacgggagttcgccgataacgcggacaaaacgcacgggcgttcaatgattatcgttggcgccggtctgaaccactggtatcacctcgatatgaactatcgcgggctgatcaatatgttggtgttctgtggttgcgttggtcagagtggtggcggctgggcgcactacgtcggccaggaaaaactgcgtccgcagaccggctggcagccgctggcgtttgcccttgactggcagcgtccggcgcgtcacatgaacagcacctcttacttctataaccactccagccagtggcgctacgagacggtgaccgccgaggagttactgtcgccgatggcggacaaatcccgctatagcggtcatctgattgacttcaatgtgcgcgccgagcgtatgggctggttgccgtcggcaccgcagttaggcaccaacccgctgtatattgcgcgtgaagcggaaaaatccggtatgacgccggtagattataccgtcaaatccctgaaagagggttcgattcgctttgccgccgagcagccggaaaacggtaaaaaccacccgcgtaacctgttcatctggcgttctaacctgcttgggtcttccggtaaaggccatgagtacatgctgaagtatctgctgggtactgagcatggtattcaggggctggatctgggtaaacagggcggtgtgaagccggaagaagtggagtggcgcgacaatggcctggacggcaaactggatctggtggtgacgctggacttccgcctgtcgagcacctgcctgtactccgatatcgtactgccgaccgccacctggtatgaaaaagacgatatgaatacctcggatatgcatccgtttattcatccgctgtctgccgccgtagatccggcctgggaatcgaaaagcgactgggaaatctacaaaggcattgcgaagaaattctccgaagtctgtgtaggccacctgggtaaagagactgacgtcgtgactctgccgatccagcacgattctgccgctgaactggcgcagccgctggacgtgaaagactggaaaaaaggcgaatgcgacctgattccagggaaaaccgcgccgcacatcatgaccgttgagcgtgattatccggccacctatgagcgatttacctctatcggcccgctgatggagaaaatcggcaacggcgggaaagggattgcctggaacacgcagagcgaaatggacttgctgcgtaagctcaattacaccaaagcggacggtccggcgaaaggccagccgatgctcaacacggcgattgacgcggcagagatgatcctgacgttagcgccggaaaccaacggtcaggtggcggtgaaagcctgggcggcgctgagcgagtttaccggtcgcgaccatacgcatctggcaaccaataaagaagaagagaaaatccgcttccgcgatattcaggcccagccgcgcaaaattatctccagcccgacctggtctggtctggaagatgagcacgtttcttataacgccggttataccaacgttcacgagttgattccatggcgtacgctgtctggccgccaacagttgtatcaggatcaccagtggatgcgcgacttcggcgaaagtttgctggtgtatcgtccaccgatcgacacccgctcggtgaaagcggtgatggggcgtaaatccaacggtaatccggagaaggcgctcaacttcctgacgccgcaccagaaatggggtatccactcgacctacagcgataacctgttgatgctgaccttgtcgcgtggcggcccgattgtgtggatgagcgaaaccgacgccaaagatctgggcattgaagataacgactggatcgaagtcttcaacagcaacggcgcattgaccgcacgcgcagtggtcagccagcgtgtaccggcgggcatgaccatgatgtaccacgcgcaggaacgtatcgtaaacctgccggggtcggaaattacccagcagcgcggcggtattcataactcggtgacgcgcattacgccgaaaccgacccatatgatcggcggctatgcgcagttagcctacggctttaactactacggtaccgtcggctccaaccgcgatgagtttgtggtggtacgtaagatgaagaacattaactggttggatggcgaaggcaatgaccaggtacaggagagcgtaaaatga

SEQ ID NO: 374107 - DNA, 1101 bp, Salmonella enterica
atgacacatgcctgtgaggcggtgaaaacccgccataaggagacttcgcttattttcccggttcttgcgctggtagtgctgttcctttggggaagcagccagtcactaccagtggttattggcatcaatatccttgcacttattggtattttaagcagcgcatttagcgtggtccgtcatgccgatgtattagcgcaccgactcggcgaaccctacggatcgcttattttaagcctgtccgtcgttattcttgaagtgagtttaatttcagcgctgatggccaccggcgatgctgcgccaacgcttatgcgtgatacgctctactctattattatgattgtcaccgggggactggtcggtttctcgttgttgttgggcgggcgtaaattcgcaacgcaatatatgaatttattcgggattaagcagtatcttatcgcgctgtttccgctggcgattattgtgctggtttttcccatggcattgccgcaagccaatttctctaccggtcaggcattattggtcgcgttaatttccgccgcgatgtacggcgtatttttgttgattcaaaccaaaacgcaccagagcttatttatctatgaacatgaagatgaaggcgatgatgacaatccacaccacggtaaaccctccgcgcacagtagcggctggcatacggtctggttactcattcatttaattgcggtcattgccgttaccaaaatgaatgccagcccgctggaggcgttgttgaccagcatgaacgccccggtcgcctttaccggtttcctggtcgcgctgttaattctctcgccggaaggactgggcgcgctgaaggcggtactgaataatcaggttcagcgggcaatgaatctgttcttcggatcggtgttggcgacgatttcattaaccgtgccggtcgtcacgctcatcgcctgggcgacaggtaatgatctggtgtttggtttaggcgcgccggaaatggtagtgatggtagcctcgttagtgctgtgccatatttcgttctctaccggacgcaccaacgtgctaaacggcgcggcgcatctggctttatttgccgcctatctgatgacgatttttgcctga

SEQ ID NO: 374108 - DNA, 1518 bp, Salmonella enterica
atggcacaagtcattaatacaaacagcctgtcgctgttgacccagaataacctgaacaaatctcagtcctcactgagttccgctattgagcgtctgtcttccggtctgcgtatcaacagcgcgaaagacgatgcggcaggccaggcgattgctaaccgcttcacttctaatatcaaaggtctgactcaggcttcccgtaacgctaacgacggcatttctattgcgcagaccactgaaggcgcgctgaatgaaatcaacaacaacctgcagcgtgtgcgtgagttgtctgttcaggccactaacgggactaactctgattccgatctgaaatctatccaggatgaaattcagcaacgtctggaagaaatcgatcgcgtttctaatcagactcaatttaacggtgttaaagtcctgtctcaggacaaccagatgaaaatccaggttggtgctaacgatggtgaaaccattaccatcgatctgcaaaaaattgatgtgaaaagccttggccttgatgggttcaatgttaatgggccaaaagaagcgacagtgggtgatctgaaatccagcttcaagaatgttacgggttatgacacctatgcagcgggtgccaataaatatcgtgtagatattaattcaggtgctgtagtaactgatgatgcagcaccggataaagtatatgtaaatgcagcaaatggtcagttgacaactgacgatgcggaaaataacactgcggttaacctattcaagacgactaaatctgctgctggtaccgatgaagccaaagcgatagctggtgccattaagggtggtaaggaaggagatacctttgattataaaggcgtgacttttactattgatacaaaaactggtgatgacggtaatggtaaggtttctactaccatcaatggtgaaaaagttacgttaactgtcgctgatattgccactggcgcgacggatgttaatgctgctaccttacaatcaagcaaaaatgtttatacatctgtagtgaacggtcagtttacttttgatgataaaaccaaaaacgagagtgcgaaactttctgatttggaagcaaacaatgctgttaagggcgaaagtaaaattacagtaaatggggctgaatatactgctaacgccgcgggtgataaggtcaccttagctggcaaaaccatgtttattgataaaacagcttctggcgttagtacattaatcaatgaagacgctgccgcagccaagaaaagtaccgctaacccactggcttcaattgattctgcattgtcaaaagtggacgcagttcgttcttctctgggggcaattcaaaaccgttttgattcagccattaccaaccttggcaatacggtaaccaatctgaactccgcgcgtagccgtatcgaagatgctgactatgcaacggaagtttctaatatgtctaaagcgcagattctgcagcaggctggtacttccgttctggcgcaggctaaccaggttccgcaaaacgtcctctctttactgcgttaa

SEQ ID NO: 374109 - DNA, 1047 bp, Salmonella enterica
atgaaagaaatcaccgtcactgaacctgcctttgtcacccgcttttcctgttctggctcggcctgccgcgatcactgttgtaagggctggaaaatcacgctggataagacgacggtcaaaaagtaccttaccagcaaggatgtaaccatcagagagattgccaaaaatagtattattcttttaaagaaagacccaaataactggggggagattaaattaccatctgggacaggaagctgcccttatctggatgacgatcgtctgtgcaaggtacaaaaaacactgggggctaaagcattaagttatacctgcactacgtttccgcgggtgttccatacttataaaaacgaggtacgacattctctaagccttgcttgcccggaagtgactgcgcatattttaaacgatgctgatgcggtaacactcaatgaaaaggcgatcattcagcagaagtacaataccgcgccgctattctccccacagcaaaaactacttaacttgttttgcctgagtttgattaaccatgctgccagcaatccggatgcggcattatacgcgttgatcaagtttgtaatgtacgtgcagaagtttccccggattgatgacgctgcattaggggagattgagcaagtgtatggcacgttagtttcccagttgcagtccggttcgttaactcaggaactcgctaatattacgccggataagaaattcaaaacatccctggtattgttgatgcaggattatttcagggctctcccaccgagcagaggaagctatgtcctcgatcactatatccagtgtcttctgcgggtgctgacggcggaagagggcgtttcaatggagcagaaggttagcgatattgagtcctcattagcgcgctgtttacaggcggatgagcagcagaagaactgggtgaagcggcgcacgaaaaacgcgaaagcgtttcacgataaatgcgaaaactttagctttcgcgcttcaaatgaaacagcagtattaattactgctttttattcattacatggggatcacttagggtatggctga

SEQ ID NO: 374110 - DNA, 696 bp, Salmonella enterica
gtgggaaaagagaaaaaatcacgcattctgacgaaaccgtgcgttattgagtatgaaggccagattgttggctatggttcaaaggaactgcgcgttgaaaccatatcctgctggctggcccgcacaattattcagacaaagcactattcccgccgttttgtgaataactcttacctccacctgggagtattcagcggacgcgatctggttggcgttctccagtggggatatgcccttaaccccaactcaggtcgtcgtgtcgtgcttgaaacggataaccggggctatatggagttgaatcgcatgtggctacacgacgacatgccccgcaactctgaatcacgggccatcagctacgcgctgaaagttatcagattactgtatccgtcagtggagtgggttcagtcatttgctgacgaacgctgcggacgcgcaggcgttgtgtatcaggcgtcgaattttgattttattggcagccatgaaagcacgttctacgagctggatggtgagtggtatcacgagataacgatgaacgcgattaagcggggtggacaacgaggcgtgtatttacgggctaataaagagcgtgccgtggtgcacaaatttaatcagtatcgctacatcagattcctgaacaagcgagcaaggaagcggctaaataccaaactattcagggttcagccataccctaagtga

SEQ ID NO: 374111 - DNA, 189 bp, Salmonella enterica; identical to SEQ ID NO: 14298

SEQ ID NO: 374112 - DNA, 582 bp, Salmonella enterica
gtgctgattggctatgtaagggtatcaacaaatgaccagaatacagacctgcaacgaaacgctcttgtttgtgcaggatgtgaacaaatatttgaagataaattaagcggaacaaggacagacagacctggattaaaacgcgctttaaagcgtcttcaaaaaggtgacacactggttgtctggaaactggatcgcctcgggcgaagcatgaaacatttgatttctctcgtaggggaattacgagagcgagggattaattttcgcagtcttactgacagtattgatacgtcatctccaatggggcgttttttcttccacgttatgggtgccctggctgagatggaacgagaactaatcatcgagagaacgatggctggacttgctgctgccagaaataaaggccgtatcggtgggcgaccacctaaactaaccaaagcggaatgggagcaggccgggcgtttattagcacaaggaatcccccgcaagcaggtcgcattgatctacgatgtggccctgtcaacgctgtataaaaaacaccccgccaaacgaacgcatatagaaaacgacgatcgaatcaattga

SEQ ID NO: 374113 - DNA, 543 bp, Salmonella enterica
atggctgtaacaccctatcagacggcctttctgcaattactgccgtcagggcttgcctggaataaaagccccgacagcaaattatctgcgctggcgcaggccatcagtgacgtgattgccactgcggcggatgatgcgcggcaaatgctgcgggagcgtttcccgtccacatcccgctggtatctgggggagtgggaatcatttctggggttgccggactgtacaagcgaaaacggcaccctgtccgaacgccagtgggctgccgcgaataaaatgcgtatgaccggcaatctgagtcggcgcttttatgaatggctggctgcgcagtacggttttaccgtcaggctgacggattccacagaaggccagtgggttacgcaggtcaatatttacggtattaaaaattatcgcaacgcaacggtgctggataatgttctgacgccgttacgtgtttatgaatcgggtgcgctggaatgtttactggagaaatataaacccgcacatcagatttataaatttgtttaccatgacggagataactaa

SEQ ID NO: 374114 - DNA, 1083 bp, Salmonella enterica
atggcttattcaccaccgacattatcatcgctgattgcccgtacagaacagaatattgaacagcgcctgccgggtagctggcctcaggcccgtgaaaaaacgctgagtgccattgcttatgctcaggcgggccttgctgccggttgtcacgagcatatttcatgggttggacggcagattatcccgtcgacagcagatgaagatgagttgctggagcactgccggttctggggggtgcgccgcaaacaggcgacagccgccagcggcccgctgactgtcaccacatcggcagcgaccaccattcctgccggtacacgctggcagcgtgctgatggtgtggtttacagcctggctgatgccattgtgattgaccgtgcaggaacgacggaaattaccgttaccgcactggctgccggtgaggcaggaaataccggtgagaatacccttttaacgttgatcaccccggttgcctgtgttgtttccgatgccatcactgtaaaagggttttccggtggagctgatattgagagtgcagcggagctgctgtcacggctggaatatcgtgtccagtatcctccgttcggcggtaatcagtttgattacgtccgctgggcacgtgaagtcagcggcgttacccgtgcctggtgttttccgacatggaaaggcggtggcacagtcggggtgacgtttgttatggataaccggagcaatatttttccacaaccggcagacgtggaacgcgtggcggattatatcgccggtcatactgacccgatcaccggtctgattgtcggacagcctgacggtgtaaatgtcactgtatttgcgccaaaggcaaagccggtaaatccacggatttatatatcaccgaagacagccgaactgaaacaggctattacccacgccattaataccatgttttttaatgaggtgacgccgggcggcgcacttgccacctcccgtattatccgtgcggtggcaggtgttaccggtctggatgattttgaagtgcgtttcccgacagagatccagcgttcggagaatacggaactgttaacaccggggacaattgaatggctgtaa

SEQ ID NO: 374115 - DNA, 438 bp, Salmonella enterica
atgaccgatttagccattatctggacgaacggacgcggcgatattgcacaggatggcattgatatgctgaccgacgacagcctgacaaccgatgtgacaatctccctgtttaccgaccggcgctcgctggattctgacacgctgccggatggttcagatgatcgccgtggatggtggggtgacagttaccgcgaccgccccatcggttcgcggttgtggctgttatcacgtgaaaaagccacaccggatacgctggaacgcgccagagggtatgccgaagaggcgctggaatggctgaaaacagcgggccgggtaagtgcgattaacgtcagggcggaacagttacatcagggctggttatacctctacattgcactgacattaccggatggttccgttattccttatgagtttaaagcagcatttaacggggtttaa

SEQ ID NO: 374116 - DNA, 594 bp, Salmonella enterica
gtggaaagagtaaatgatttcgccatgaaccgcctgctgacaccgctgatgcgtcgtgtgcgtctgatgcttgcgcgtgccgttgttaacgtgattaacgacgggcgaaaggttcagaacctgcaggtcggtctgctggatgatgaggaatctgatgaagtggagcgcctgcaaaattacgggcatttcagcgttcctctgccgggcgcagaggcgctgattgcctgtgtgggtgcacaacgtgatcaggggattgccgttgtggtggaagaccgccgctaccgcccgacaaatcttgaaccgggtgatgctggcatttaccaccacgaggggcatcgtatcaggctgacaaaggacggacgctgcatcattacctgtaaaacggttgaggtttacgctgatgaaagtatgaccgttgacacacccagaaccacgtttaccggcgacgttgagatccagaaaggtctgggcgttaaaggtaaaagccagttcgacagcaatattactgccccggatgccatcatcaatggcaaatcgacggataagcatatccaccgtggcgatagcggcggaaccacggggccaatgcaatga

SEQ ID NO: 374117 - DNA, 1140 bp, Salmonella enterica
atgagtaataccgtcacgctgcgaacggatggcaggctttttaccggctggacgtcagtctctgtcacccgctccattgaatccgtagccggatattttgagctgggggtgaacgtgccaccgggcacggatttatccgggctggcaccggggaaggcgttcacgctggaaatcgacgggcagattgtctgcaccggttatatcgattcgcggcgacgccagatgaccgctgacagcatgaaaatcactatcgccggacgtgacaaaacggctgacctgattgactgtgctgccgtttacagtggcggacagtggaaaaaccgcacactggagcagattgcgcgtgacctgtgcgctccttatggcgttaccgttcgctgggagctttccgataaggaaagttcggcagcttttcccggcttcacgctggaccattcagaaaccgtttatgaggcgctggtgcgtgcctcccgcgcacgcggtgtactgatgaccagcaatgccgcaggagagctggtattcagccgggctgccagcacagcaactgatgagctggttctcggagaaaatctgctgacactggattttgaggaagacttccgcgaccggttcagcgaatacaccgtcaaggggtatgcccgcgcaaacggtgctgagggtgatgatattgatgcgaaaagtatcgtctcccggaaagggaccgccactgacagtgatgtgacccgttacagaccgatgatcatcattgccgacagcaaaattacggcgaaggatgcacaggcccgcgccctgcgtgagcaacgccgcagactggcaaaatccatcacctttgaggcagaaattgacggatggacacgcaaggacgggcaactctggttgccgaacctgctggtcactattgatgcctcgaaatatgccatcaaaaccacagaattactggtcagcaaagtcaccctgatactgaatgaccaggacgggctgaaaacccgcgtcagccttgcaccacgcgaaggctttctggtgccggttgaaagcgaccgtaaaaacaggaaaagcggcgacagtaacggcggtattgatgcgctggttgaagattattatcgcagacacccggagaaaacgccgccgtggaaagagtaa

SEQ ID NO: 374118 - DNA, 1488 bp, Salmonella enterica
atgtttgaagatgctttaaatgccgttaatgctgtccgggataaaaccggtggaggcaggaaaacaaccggcaaaggcacgttccgtaacgtgccgtttctcgtcatcgaggagcaaaaacaggctggcggacgtcgcctggttaaacgcgagtacccgttacgtgataccggcggcgtcaatgacctggggaaaaagcttcgctcccgtacattcagcgcctgcattctgaacagcaacgcagaaacagccagagatgaagcgggtgcgctgatggatgctcttgatgctccgggtagcggtgagctggtacatcctgatttcggcactgtggacgtcatggtggattcatgggaatgccgcactaaagcggatgaactgaattattacgcgttcaccgttaccgtttatccgtcgttgcaggatacagccccggacgcagagacagacaccagtgcagccgtaccggcacaggccgttgctgtaaccggttctctgggagatacgctgtcctctgtctggcagactgtaaaagatggcactgcggcggcaaccgccgtgatggaagctgtaaccggtgtcatcgatgatatcagtgatgcggtggacaatctgggggttacgcagactgtcagcggtctgatgggatcgctttctgcgatgaaaggctctgtgaccagcctgattaaccagcctgccatgctggcctcctcgctgatgggggcgctgtccggcgtttcatcgttatgcgatacccggacagcattttccacatggaaccgtctggcgcagcgattcgaacgtcgccatgccgccaccgcaggcaaacaggggacaatcacaacctcgtacaacagtccggttgcagaaaaaaatattgccacactgaactacgtcatgctggcagcggcgcagacataccgggcagaagctgccagccaggcactgactgcggcactggatttcagtcgccggatggataatgccgcccgtgcacctgtactggatgccccgtccaccacaaccggcacagccagcggggccagcagcacatctgctaccgtcacacagggacagttacagttaactgccataaccccggacggcggcttttcacaggtatccttttcagacagtggtacagccacgcccccggtatttgaaagtgtgtccgatatcggaaaaacagccgccatgctgggggctgcactggataccgtcattctgacggcatctgagcagggcttttcgacagacagtgttcagcttacgcaactgcgtctgctggttgttgccgacctggaaaaacgcgggctgcaactggcgggcagtgaaacgcaccgcctgccggagacgatgcctgcaatggtggccctgtaccgttacacaggaaacagccggaactggcaacggctggcccgcaggaacggtatcagcaacccgttgtttgttcccggtggtgtcagtattgaggtgattaatgagtaa

SEQ ID NO: 374119 - DNA, 2073 bp, Salmonella enterica
atgaccgggaaacgcttaaaggcgtctgtcattattgatcttaatggcaatctttcccggcgttcccgccagtattcgaaccagataaacgccctgtcccgtagcgggcaaagttcccttcgtgccctgcgtatggaggttgtgcgcgtttctggtgccattgacagaatgggttctctgtcaacccgtacattccgaatgctgtcagccggggcgctgggtatcgctggcgtgggttacaccgccaataaactgtttattggtgcagccgcccagcgtgagcaacagattatcgccatgaactcgctgtatcacggcgataaggtcagagcgcaggccatgatggcctgggcaaagcagaacgcgaaggacaccacgtgggggctgagtggtgttctggatgagatccgttcgtcaaaaggcttcggcatgacggatgaacagacgaaacagttcatcaccatgttgcaggatcagggggccatgcacggctgggatttacccactgcacagggtgcctcactgcaactgaaacagatgtttgcccgccagcaaatcacagcggcggatgccaacctgctgaccggttacggtattaacgtttaccagacgctggcggatgcactgggtaaagacgttaaggatatccgcaaacaaggtgaaaaaggcaagctgggcctgaaatccattctgacggtattcagaacgctgtcagaacagtcaaaaggtgcacaggccagtgcgatgaactcctgggacgggatgttcgcccagatggaagctaacctgcttgaatttcgcataaaggtggcaaacagcggcccctttgaagaaatcaagaacgagatgcgctgggtgcttaactggcacgacatggcggataaatccggggaacttgatgcactggcagaaaacattggtcagaaatttctgaccacgttcagaacggtaaaaatcgcggcacaggaattatggcgctggctgaaaccgggtaaagatgcgctggcatgggttgaccagaatattgtcagcctgaaaaaactggctgctgttctggtgtctgtctggcttgccaataaagccctgagagcaggctgggccgtggcaaaaccctcatggcaggttgccagttatccgtttaaaaccgggcgtcgtatgtggcgctggatgcgaaaccgcaaacgtgggcaggcagggctgccggtcccggatgccatgacgtctgagacgctgttgcagggtatcggcattcagcgtgtgtttgtcatcaactggccccgtggatttggtggctacgggagtggcggcggtcgtcgcgtacggagcggcggaagaatggccccgctgttaccccgccagccgttattgctgtccgggccacagccgctggcattacctgcaccacgccctgtactggcattacccccacccggcgtaccggtaacggcacggcctgcaccattacctttacccggtaaatccggtcttctgagcaggcttgcaggcagtgctgccgggcaactggttacgggaacggtcggaaagctggctgatgccgggcgtgccgctggcgggtggttttccggtatcggaaacaaacttgcaggcagtgcgatcggtcgggttgtgacaaaaggtgccggggcgctgggctggatggggaaaggtgccggtcgtgcgttgtcacgtctgggtggcccggtaatgggggcactccagcttgcccccgtcctgatggatgagcaggcgtcaacccatgaaaaagcaggcgcaattggcagtacagccggtgcatggctcggcggtgccgttggcagccttgccggaccgctgggtacggttgccggtgccacgctgggcagtgtcgccggggagtatctgggcggttttgtaaccgacctgtatcagaaatggacggccacggataaggaaccgcaggaacaaaaagtcaatgcggaagcctcgctgcgcgtcgaacttggcgaggggttacgtctgaccagttcccgcgtcaccgaggacggtatggggctgaatatttacgcgggcgataactacattacgggctggtaa

SEQ ID NO: 374120 - DNA, 435 bp, Salmonella enterica
atggacgaaatgaatttaagtcctgaagcacaggaactgcatgacagcattgtggctgagcttcagtccggtggtctgaaactgaaagacggcctgccgttcggcaccggtgacgagactgaaatgcagtatgacgtgacactgcgtgaactgaccgcaggcgatctgattgatgcccaggcggctgctgaaaagctggtaatgagcaaggaaggcccggtgctggtcagttccccgtcccggatgggactggaaatgctgcgccgacagattgccagcgtgggctgcatcaaaggcccgttatcgctggcgctgatgcgcaagctgtctgttgatgacttccagcgtctgtcgctggctacagagatgcacgacatggctgtggcggcatcgctgacgcaagaacgggggcgagtggctgcggtgccggaatga

SEQ ID NO: 374121 - DNA, 357 bp, Salmonella enterica
atggctggaaatcagcgtcagggggtggcgttcatccgtgtcaatggcatggagcttgaaacgatggaaggggcctccttcacgccttccggcatcacccgtgaagaagtgaccggctcgcgggtttatggctggaaaggtaaaccacgtgccgcaaagctggaatgcaaaattccgggcggtggtgatatcggtctggatgaaatcatcggctgggaaaacatcacggcagagtttcaggcagacaccggtgaaacctggatgatggcgaatgcctggcaggcagatgaaccgaaaaacgacggcggcgaaatttcgctggtactgatggcaaaacaaagcaaacgcattgcataa

SEQ ID NO: 374122 - DNA, 1488 bp, Salmonella enterica
atgagcgatatttcatttaacgcgatcccgtcagatgttcgcgttcctctgacgtatatcgaatttgataacagcaatgccgtcagcggaacaccggctccccgccagcgcgtgctgatgttcgggcaaagcggaagtaaagccagtgccgcaccgaacgtgcctgtccgtatccgttccggctcacaggccagtgcggcgtttggtcagggttccatgttggcactgatggcagatgcattcctgaacgctaaccgcgtggcggagctgtggtgtatcccgcagggaaacggcaccggtaatgctgctgtcggtgaaatctcactgtcaggaacggcaggcgaaaacggctcgcttgtgacctatattgccggtcagcgactggcggtatccgtcgcagcaggtacaaaaggggctgcgctggctgacctgctggttgcccgaatcaaaggccagccggatttaccggtgacggcagaagttcgcgcagacagcggagatgatgacacccatgcagatgtggttctgagtgcaaaatttacgggtgcattatctgccgtggatgtgcgctggaactattacgcgggtgaaaccaccccttacgggattatcacggcattcaaagccgcctccggtaaaaatggcaacccggatatcagcgcaagtatcgcgggaatgggcgatctgcaatacaaatatattgtgatgccctataccgatgaaccgaacctgaatctgttacgcactgaattgcaggaacgctggggaccggtcaatcaggctgatggctttgctgtgacagtgctgtccggcacgtatggggatatttccacgtttggtgtcagtcgtaatgatcatctgatctcctgtatggggattgccggtgcaccggaaccgtcatacctgtacgccgccacactgtgtgccgttgccagccaggcgctttccatcgacccggcgcgtcctctccagacgctgacgttgcccggaagaatgccgcctgcggtgggggatcgtttcacctggtcagaacgtaatgcgctgctgtttgacggcatctccacgtttaacgtgaatgatggtggtgaaatgcagattgaacgcatgatcacgatgtaccgcacaaacaagtacggtgacagtgatccgtcttatctgaacgtgaataccatcgccacgctgagttatctgcgttattcgctgcgaacccgcatcacgcagaaattcccgaactacaagctggcaagtgatggcacccgctttgccaccggtcaggccgtggtgacgccatccgtgatcaaaacggagctgctggcactgtttgaagaatgggaaaacgccggactggtcgaggatttcgacacgttcaaagaggagctgtatgtggcacgtaacaaggacgacaaagaccgtcttgatgtgctgtgcggcccgaatctgattaaccagttccgcattttcgcggcacaagttcagttcattctgtaa

SEQ ID NO: 374123 - DNA, 207 bp, Salmonella enterica
atgatgctgaaaattaaacccgcagcgggaaaagccatccgtgacccgctcacgatgaaattactggctccggagggagaagaaaagccccgtaacagtttctggatacgtcgccttgcagccggtgatgtggttgaagtcgggagcaccgaaaacacggcggatgataccgacgctgcgccgaaaaaacggagtaaatcgaaatga

SEQ ID NO: 374124 - DNA, 549 bp, Salmonella enterica
atgctggaagaaaccgaagccgcactgctggcgcgcgttcgtgagttgtttggggcaaccctgcggcaggtggaaccccttaccggcacatggactaacgaggatgtgcaccgtctctttctggccccgccatcggtatttctggcatggatgggctgtggtgaggggcgtacgcgtcgggaagttgaaagtcgctgggcattttttgtcgtggcggagttgctgaacggggaacaggtaaaccggcccggtatttatcagattgtggagcgactgattgccggtgttaacggtcagacgtttggcccgaccaccgggatgagactgacgcaggtcagaaatctttgtgacgacaaccgtatcaatgccggtgtggtgctttacggcgttctgttcagtggcactaccccgctgccgtccgtggtggacatggattcgctggatgattacgagcgtcactggcagacctggaaattcccggacgaaaccccggaatttgccgcacatatcaatgtgaatcaggaaaaggatcatgatgctgaaaattaa

SEQ ID NO: 374125 - DNA, 426 bp, Salmonella enterica
atgaattacgcgacggtaaatgacctgtgcgcccgctatacacgtacgcggctggatattctcacccgccctaaaacagcggacggtcagccggatgatgccgtggcagaacaggcactggcagatgcttcggcctttattgatggctatctcgccgcgcgctttgttctgccgcttaccgtcgtcccctcactgctgaaacggcagtgttgcgtggtggcctggttttatctgaatgaatcacaacccaccgagcagatcaccgctgcctacagggacacagtgcgctggctggaacaggtgcgcgatggcaaaacagatcccggcgtggaaagcaggacggcagcctcgccggatggtgaaaaccttgtgcaggtgcagtctgacgcgccggtcttctcacgaaaacagaaggggtttatctga

SEQ ID NO: 374126 - DNA, 411 bp, Salmonella enterica
atgtcaggcacttcgcttaattcacaacggctggacacttctcgcatcacttgcacggcgattattaaatgccttcgtccggtctaccgccgcgccggaatcgcctttacgcgtggcgaaaacaccgtggaagtcaccgaagaacaactggcgatcattcgtgccgacagcgtgctgtctgtggtatctgcatcgtcagcagaaacgatcgctgaggctggggggctggacgttctgggtgtgggcgatctgaacgcccgtatccgtgcgaccgttgccggtctggataaggcaaacccggaacactttaccgcaggaggagaacccaaagtgaaagccgtcagtgcggcgctgggggaaccggtgagcagtgcgcaaatcaaagcggcgctggctgaggcggatgcatga

SEQ ID NO: 374127 - DNA, 939 bp, Salmonella enterica
atgccaactccgattactcctgcgatgatcacctcgctgatgaccggctaccgtggcgattttcaggctggtatggcaatggccccgtcgcagtaccagaaaattgcaatgaccgtgccatccacgtcgaaatccaacacgtacggctggctgggccagtttccgcaattccgtgagtggattggttcgcgtgtcatcgagaagatgaaagcctatggctattccattgtgaacaaaacctttgaaggcacggtagccattagccgggatgacttcgaagacgacaatctcggtatttattctccactgttccaggagatgggccgagccgcagcggcacagccggacgaactggtgttcgcagctctgcgtgacggtgtgaaagtcgcctgttatgacggacagaacttcttcgataccgaacatcctgtttatccgaaagtggatggcaccggagatgtgaagaacgtcagtaataaatttgtggcacagactgccgaaaaaagcgattacaccggtcctgcctggtatctgcttgactgttcccgcgctgtgaaaccgctgatttatcaggatcgccgaaaggcagaactggttgcccagaccaaagtcgatgaaggccgggcctttacggataacgagtttgtgtttggtgcatcagcccgccgcaatgtggggtacggcttctggcagatggcttacatgatgcaggcaccgctgacgctggataatctctggctcggctggtcggccatgcgtgaatttacggctgatggcgggcgcaagctggggattaagcccacgcacattgtggtgcccacctctctggaaaaacaggcggtgcagttactggaacgcgaactgttcgcggatggcaataccaccgtctccaacgagatgaagggtaagctgcaactggttgtcgctgactacctgtaa

SEQ ID NO: 374128 - DNA, 1083 bp, Salmonella enterica
atgaaaaaacacgcgattggcattgccgcactgaatgcgctgtccattgacgatgacggctggtgccagctattgcctgccggtcatttcagtgcccgtgatggtcgtccgtttgatgtgacaggcggtcaggggtggttcatcgacggtgagattgccgggcgtctgattgaaggcgttcgcgcgctcaaccaggacgtgctgattgattacgagcataaccagctacgtaaggacaaaggattacccccggaacaactcgtcgcggctggctggtttaacgccgatgaaatgcagtggcgtgaaggtgaagggttatttatccacccacgctggacggcggcggcccagcagcgcatcgatgacggcgaatttggttatctctctgcggtttttccgtatgacaccgccaccggtgcggtgctgcaaatccgccttgctgcgctgaccaatgaccccggtgccaccggcatgaaaaagctgaccgcactggcggcagaccttcccgacatccttcaacaggagaacaaacccatgaatgaaacgctgcgcaagctgcttgcgcgtcttggggtgactgtccccgaaaatgcagacatcaccgatgaacaggcaacagcggcactgaccgcgctggacacgctggaaattaatgccgggaaagtggcggcgttgtctgccgaactggaaaaggcacagaaagccgccgttgacctgacgaaatacgtcccggtggaaagctacaacgccctgcgtgatgaactggcacaggcgactgcacaaagcgccacagccagcctgagcgccgttctggacaaggcggaacaggaaggccgcattttcaaaagcgaacgtacctatctggaacagcttggcggtcagattggcgtggcggcactgtcggcacagcttgagaaaaaacagcccatcgctgcgttatctgccatgcagaccaccacagcgaaaatcccgtcgcaggaaaaaccggcggtggcggtgctgtctgcggaagatctcgccgcagcccgtctgctgggtaaaaccgaagcagaatttctgaaactgaaagaggattcaaaataa

SEQ ID NO: 374129 - DNA, 471 bp, Salmonella enterica
gtgagtcttgatatgaacgttgccgtggatgtgcgacgtattcagcttgcactggatgaactgggaaccgtcacacgtgaccgcgccattccccgtgtgatggctgcggcgctgctgtcatccacggaacaggcatttgaacggcaggcagacccggatacagggaaaggctgggaagcgtggagcgattcgtggcaggcatggcgtcaggatcatggttttgttccgggcagtatccttaccctgcatggcgatctggcacgcagcattaccaccgattatggacaggattatgccctgattggttcgccaaaaatttatgctgccattcatcagtggggcggtacacccgatatggcaccccgcccggcaggcgttcctgcgcgtccttatatggggctggataagaccggggaacaggaaatttttgatgccatcagaaaacgtgtcagcgccgctctgaggcaataa

SEQ ID NO: 374130 - DNA, 1320 bp, Salmonella enterica
atgccgcagcagaccattgatctggcgtatgccgcacgcctcccgccaaaggaggctgtcgcgtatttccgcgccaaaggctacaacatcacctggaactggtacgaacaactggcagacgcgcacgcccgcgcctttaccgttgccaaagccacccggatggatgtactgaccacaatccgtgaggaagtggagcgggctgtcagtgaaggcatcacccgtgaggaatttacccgcacactggccccccggctgcaaaaactcggatggtggggaaaacaaatcatcgtggatgcagagggaaacgcaaaggtaatcgagctgggtagtccgcgtcgtctggcaaccatttataacgtcaatacccgtacggcgtatggggcaggacgttatgcgcagatgatgaataccgcagatttgtatccatactggcagtacgttgccgttatggatggcagaacacgcccggaacatgcgcggctgcacaatatggttttcaggtatgacgacattttctggcagacgcattacccacccaatggctggaactgccgctgtcgcgtccgggcggtgtctgcggcccgcatgaaagaactggggctacaggtcagttatggtgcgtcattcatgaatacccgcgaagtggacgccggtatggatgaaagcaccggagagattttccgcacatcgtcaaccacgtttgacaacggtcgggtaaaaatgacgccggatgtgggctggtcatataacccgggttcggcggcgtttggtacggatcaggcactgattcgaaaactggtggaaattcgcgacgcgcagttgcgtgagcaggttgttcagacgctgaataacagccgggagcgtcagcttgctttttccctctggcttaaacgcctggcaggatcacgtcagaccgctcatgaaatccgggcactgggttttatgacggaatcggtagctgaagccgtacatcagcgcaccgggaatatgccagcccgtctgcttgtgatgaactggaaaagtctggcgaccactgctgatgccgccctgaaaccggaggatttacagcatctgccgtcgctgatggcaaaaccacaggcagtattgtgggacagggagaaccaccagttgctgtatgttgtggcaacccgtgacggcatggcccggattgtggtcagaacatcacagacagtcggcaggcagaatgaccgtgcggatgtgctggtcagtatcagccgcgtatctgcacagtcgcttgaaaccgcgattgctgacgggatgattgacgtactggaggggcatgtggaggtgaataagtga

SEQ ID NO: 374131 - DNA, 1539 bp, Salmonella enterica
atgggccgtattctggatatttccgggcagccgtttgattttgacgatgaaatgcagacccgcagcgatgagctggcaatggtcatgaagcgcacgcaggagcatccttccagtggtgtaacgccgaaccgggccgcgcagatgctgcgtgatgccgaacgcggtgatctgacagcacaggctgacctggcctttgatatggaagaaaaggacacccaccttttttccgaactgagcaaacgccgccttgccattcaggcgctggaatggcgcatcgctccggcacgtgatgccagcgcacaggagaaaaaagacgccgacatgctgaatgaatatctgcatgatgcggcgtggtttgaagatgccctgtttgatgccggtgatgccattctcaagggctattccatgcaggagattgaatgggggtggcttgggaaaatgcgcgtgccggtggcgctgcatcatcgcgatccggcgctgttctgcgcgaaccccgacaatctgaacgaattacgcctgcgtgatgcgtcttatcacgggctggagctgcaaccgttcggctggtttatgcaccgggccaaatcccgcaccgggtatgtcggcaccaatggccttgtgcgcacgcttatctggccttttatttttaaaaactattccgtgcgtgattttgcagagtttctggaaatttacggacttcccatgcgcgtcggtaaatatccgaccggctcaacgaaccgcgagaaagccacgctgatgcaggccgtgatggatatcgggcgacgtgccggtggcattattccgatggggatgacgctggattttcagagcgccgcagatggtcagtcagacccttttatggcgatgattggctgggcagaaaaagcgatttcaaaagccattctgggcggcaccctgaccacagaggctggcgataaaggtgcgcggtcgctgggtgaagtgcatgatgaggttcgccgggaaatccgtaacgcggatgtgggccagcttgcccgcagtattaaccgtgacctgatttatcccctgctggcactgaacagtgacagtaccattgatattaaccgcctgccgggcattgtatttgataccagtgaagcgggtgatattacggcactatctgacgccattccgaaactggcggcgggaatgcgtgttccggtctcctggatacaggaaaaacttcatattccacagccggtcggtgatgaagccgtgtttactgctcaaccggttgtcccggataacggtccgcagaaagaggccgcattatccgctgaagatatcccgccggaggatgatatcgaccggatgggcgtctcaccggaagactggcagcgttcggttgatcccctgctgaaacccgtcattttttctgtgctgaaagatggcccggaagccgccatgaacaaagccgcttcattatatccccagatggatgatgcagaacttatcgacatgctgacccgtgccatttttgttgccgatatatgggggcgtctggatgccgcagcagaccattga

SEQ ID NO: 374132 - DNA, 1656 bp, Salmonella enterica
atgaacaccagagaaaacaatcttaaagcccttcatgccccccgcaaaatcgacctgcgcaaggaggccgaactgcttggcgtgaatatcgtgaccgatatcggggaagcgcagccccgcaatgaaccggttttcctgggctatcagcgccgctggtttgaggatgaaagccagatttgcattgctgaaaaatcccgtcgtaccggtctgacatgggccgaagcgggccgcaatgtcatgacggccgcaaagccgcgtcgccgtggtggtcgcaacgtcttttatgtgggttcccgtcaggaaatggcgctggaatacatcgccgcctgtgccctgtttgcccgcgcctttaaccagctggcaaaggctgacgtctgggagcagaccttctgggacagcgacaaaaaagaagaaatcctcacctacatgatccgctttccgaacagtggatttaaggtgcaggcgctttcaagccgcccgtctaacctgcgtggtttacagggggatgtggtgattgatgaagcggcatttcatgaagccctggacgaactcctgaaagcggcctttgcgctcaccatgtggggtgcccgcgtgcggatcatatcgacacataacggcgtcgataacctgtttaaccagtacattcaggatgcgcgcgaggggcgcaaggattacagcgttcaccgcatcacgctggatgatgccatcgctgacggactgtaccggcgtatctgttacgtcacgaatcagccgtggtcgccggaagcggaaaaagcctggcgtgatggcctgtaccggaatgcgccgaataaagagagcgccgacgaggaatacggctgtattcccaaaaaatccggtggcgcttacctgtcccgtgtcctgattgaagctgccatgacacccgcgcgggatatcccggttctgcgttttgaagccccggacgattttgaatcgctgacaccgcagatgcgccacggtatcgttcaggactggtgtgaacaggagctgctcccgttgctcgatgcgctgtcaccgctcaataaacacgtactgggcgaagactttgcacgccgtggcgacctgacggtgtttgtgccgcttgccatcactccagacttacgcaaacgcgaatgtttccgcgtggagctgcgtaatgtgacctatgaccagcagcgacaaatccttttattcattctgtcccgtttgccccgttttaccggcgctgcatttgatgccaccggtaacggcggttatatggcagaagccgcccgtctgatttatggcccggagatgatcgactgtgtgaatctgaccgcatcctggtatcaggagtggatgccaaaactgaaaggcgagtttgaagcgcagaacatcacgattgcccggcaccagaccacacttgatgacctgctccatatcaaggtggacaaaggtattccgcagattgataaggggcgcacaaaagatgaaggcggtaaaggccgacgacatggcgactttgccgtggcgctctgtatggctgtcagggcgtcttatatgaatggttttgttatcgacgaggacagcatacaggcgctgccaccacgccaccgtggtgatgatgttgataacgatgattttgatgattatcaccagtttgaacgagggggctggtaa

SEQ ID NO: 374133 - DNA, 576 bp, Salmonella enterica
atggacaggaaaacacggggccgggcttcaaaagtggatttactgccggaaaacgtacgtaaaacgctgcatgaaatgctgcgtgataaagcgatcccacaggcccgcattctggaagaaattaacgcactgattgaagacgcaggcctgccggatgagatgaaactctcccgttccggtctgaatcgttacgcgacgaacgtcgagcaggtaggccataacctgcgacagatgcgtgaaatgacgtcagcactgaccgcagaacttggcgacaagccaatgggagaaaccacaaagctgattctggaaatggcccgcagccagctttttaaggccatgatgcggcaaatcgaaaacccggaatctgacgtggatattgacctgctgaaaaatgccatgctggcggcacagcgtctggaatccacggcaatgtccagccaccggcgcgagaaagaaatccgccaggcattcgcagaagaagcggcaaacgccgtcagtgaagaactgcgcgggcaggatggcatcagcgaagagctggagcagcgtatccgtgatgtgctgctgggtaaggcatga

SEQ ID NO: 374134 - DNA, 291 bp, Salmonella enterica; identical to SEQ ID NO: 14323

SEQ ID NO: 374135 - DNA, 300 bp, Salmonella enterica
atggatttgatttcagttttagcgttatggccttacctgttgcctgttgtggccggtggggccgtctgggcaatgcgtcgtagttttgccagcactgagcgtgtggagcgtcttgaaaaccggatgaccgaaatggaaacccgctacgccagcatccctggcacagaagatgtacacgaaatgcgcctgcgtattgcagagctgtccggcgatatccgggtgctgtcccagcgggtgcagtcattttcccatcaactggagctgctgcttgaaaacgcagtaaaccggagtaattcatga

SEQ ID NO: 374136 - DNA, 195 bp, Salmonella enterica; identical to SEQ ID NO: 151122

SEQ ID NO: 374137 - DNA, 387 bp, Salmonella enterica; identical to SEQ ID NO: 14326

SEQ ID NO: 374138 - DNA, 516 bp, Salmonella enterica
atggcggggataccaaaaaaactgaaagccacactgctggcggcaacgattgccggtggcggtgtgggtggttatcaggaaatgacccgtcagtctctgatccacctggaaaatatcgcttatatgccttaccgcgatattggcggtgtgctttcggtctgtgtggggcataccgggccggatatcgaaatgcgccgttacagccatgcggagtgtatggctctcctcgacagtgatttaaaaccggtttatgcggcaatcgatcgtcttgtcagggtgccgctgacgccatatcagaaaacggcgctggcaacgtttattttcaacaccggtgttaccgcattcagtaaatcaacgctgctgaaaaaactcaatgccggtgattacgccggagcgcgtgaccagatggcccgctgggtgtttgccgcaggccataaatggaaaggactgatgaaccgtcgcgaagtggaaatggctatctggaatatcaggggggcggatgaccttcgccagtaa

SEQ ID NO: 374139 - DNA, 423 bp, Salmonella enterica; identical to SEQ ID NO: 14328

SEQ ID NO: 374140 - DNA, 231 bp, Salmonella enterica; identical to SEQ ID NO: 14329

SEQ ID NO: 374141 - DNA, 561 bp, Salmonella enterica; identical to SEQ ID NO: 14330

SEQ ID NO: 374142 - DNA, 390 bp, Salmonella enterica; identical to SEQ ID NO: 14331

SEQ ID NO: 374143 - DNA, 552 bp, Salmonella enterica; identical to SEQ ID NO: 14332

SEQ ID NO: 374144 - DNA, 267 bp, Salmonella enterica; identical to SEQ ID NO: 14333

SEQ ID NO: 374145 - DNA, 303 bp, Salmonella enterica; identical to SEQ ID NO: 14334

SEQ ID NO: 374146 - DNA, 309 bp, Salmonella enterica; identical to SEQ ID NO: 14335

SEQ ID NO: 374147 - DNA, 183 bp, Salmonella enterica; identical to SEQ ID NO: 14336

SEQ ID NO: 374148 - DNA, 531 bp, Salmonella enterica; identical to SEQ ID NO: 14337

SEQ ID NO: 374149 - DNA, 531 bp, Salmonella enterica; identical to SEQ ID NO: 14338

SEQ ID NO: 374150 - DNA, 525 bp, Salmonella enterica; identical to SEQ ID NO: 14339

SEQ ID NO: 374151 - DNA, 300 bp, Salmonella enterica; identical to SEQ ID NO: 14340

SEQ ID NO: 374152 - DNA, 420 bp, Salmonella enterica
atgaacgtcaaaatccgaaatgaaattcaggcattaatccgaattcaggaacgcaataacaacggtggtgaattacgcgagtttatttgcgcccggaaagttgatgattgtggtgaaaagacttacctgattactttcgaccattacagcatctgtgcgcgttattgtggcgaaagcatatcccgcgccattgcgtctggcgatgcgtttaacgtggatttatgggagtacgtcatggaccgtgaatacatctgtgtatcagacccgaaagcccgtgaaatgtggcagcgtatctggcgcgattaccggttaatggcaaaaggctgggcgcgctgctgttattcctcgcttgccctgaaagcggttcagttatcgctgcggcatattccggcatcactgcgcgagcctctgctgtactga

SEQ ID NO: 374153 - DNA, 270 bp, Salmonella enterica
atggcaaaggttatctttgagtttacatggctggaaagtagtgacggttgcaatgggcgcagagaagttctggatgcaaaagcatgtcttgcagatatctcgccaacggaaaataccgggcctcatgatttactggcaaatatcgtcctgactatggctcctgaaattattaaaaaggccaaagatgagatgctgaccactatgaagaaagtgggtatggaagctgaatgtgatttagtaccacatccggtgaatgcggttaaacattaa

SEQ ID NO: 374154 - DNA, 231 bp, Salmonella enterica; identical to SEQ ID NO: 33204

SEQ ID NO: 374155 - DNA, 228 bp, Salmonella enterica
atgatggcccgaaatataaaaatggcaacggatgcgcagaactggttacaggcgcgcgggagtcatgtaaatgaatcatatctcggtgtggcgcgtccgattcttgaaatcacttacccaccggtggaactggtaaaaagcgcggtcagaattatggagcataagtccggggtggcccgttctgtatggacggcccgtcttaatggttgccagattatctggagataa

SEQ ID NO: 374156 - DNA, 939 bp, Salmonella enterica
atgaatatttccgatattcgcgcaggactgcgcacgcttgtagaaaatgaagaaaccacctttaaacaaattgctcttgagagcggactttctaccggaactatcagtagttttatcaatgataagtacaacggggataacgagcgtgtttcacaaattctgcaacgctggctggaaaaatatcatgcagttgcagaactacctgaaccgccccgctttgtggaaacgcagacggtaaaacaaatctggacaagtatgcgttttgccagcctgactgaaagtattgctgttgtatgtggcaatcctggtgtgggcaaaaccgaagcggcccgtgaatatcgccgcaccaataacaatgtctggatgatcaccattacgccatcctgtgccagcgttctggaatgtcttactgaactggcgtttgagctgggaatgaatgacgcaccacgccgtaaagggccgctctcccgcgccctgcgacgtcgccttgaaggtacacaggggctggttatcatcgacgaagctgatcatcttggtgccgaagttctggaagaactccgcctgttacaggaatcaacccgcactggccttgtgctgatgggaaatcaccgggtttattcaaatatgacggggggtaacagaacggttgaatttgcccgtctgttttcccgtattgcaaagcgcactgcaattaataaaaccaaaaaagccgatgtaaaagctattgcggatgcctggcagattaacggcgaaaaagaactggagttattacagcagattgcgcagaaaccaggtgcgcttcgcattctgaatcattcacttcgccttgccgccatgacggctcacggtaaaggtgagcgtgttaacgaagattatctgcgtcaggctttccgtgaattagacctggacgttgatatttcaacgctgctgcgtaattaa

SEQ ID NO: 374157 - DNA, 2001 bp, Salmonella enterica
atgcaaccacaatgtaatgattggttttctgcaaagaaattagaagggctgataggtcttccaaaatcctctagcgcgatctctcgtaaagcaaggttagaacagtgggtgtttcgacagatacacggggtaagaggagtagcctatgagtttcatatctcatctttaccaaaggaaacgcaagctgcgttattgcttagacaaggagagattgaaacaagcatgggccgttttgaaatcgcccgccccacgctggaagcccacgattatgatcgcgaggcgctgtggagcaaatgggataacgccagcgattcccagcgcagacttgctgaaaaatggttgcctgcggttcaggccgcagacgaaatgctgaaccaggggatttcaacaaaaacggcttttgcgaccgttgcaggacattaccaggtcagcgcatccactttgcgtgacaagtattaccaggtacagaagtttgcgaagcctgactgggcggctgctcttgttgatggacgtggtgcatcccgtcgcaatgttcacaaaagtgaatttgacgaggatgcctggcagtttctgattgcagattatctgcgaccggaaaaacccgccttccgcaaatgttatgagcgtctggaactggcagcccgcgagcatggctggagtattccctcccgtgccacggcctttcgccggattcagcaactggacgaggcaatggttgttgcctgccgtgaaggtgaacatgcactgatgcatctgataccggcacaacaacgaactgtggaacacctggacgccatgcagtggatcaacggcgacggttatctgcataacgtctttgtacgctggtttaacggtgatgtgatccgcccgaaaacatggttctggcaggatgtgaaaacccgaaaaattctgggctggcgctgcgatgtgagcgagaacattgattcaattcgcctctcgttcatggatgttgtgactcgctacggtatcccggaggattttcacatcaccattgataacacccgtggtgctgcgaataaatggctgacgggaggcgcgcccaatcgctaccgctttaaggtaaaagaggacgatccaaaaggactgtttttactgatgggggcgaaaatgcactggacaagcgttgttgccggtaaaggctggggccaggcaaaacctgttgaacgcgctttcggtgttggtgggcttgaggaatacgttgataagcatccggcactggctggcgcatatacggggccaaatccgcaggcaaaacctgataactatggcgaccgcgcagttgatgcagagctgtttctgaaaacccttgccgaaggtgtggcgatgttcaatgccagaacaggccgtgaaacagaaatgtgcgggggcaaactctcgtttgatgatgttttcgagcgtgaatacgccagaacgattgtgcgtaagccaaccgaagaacaaaaacggatgctgttactgcctgccgaggcggtgaacgtttcacgcaaaggcgagtttacgcttaaagtaggcggctcccttaaaggcgcgaaaaacgtttattacaacatggcattaatgaatgccggcgtgaaaaaagttgtggtcaggtttgatccgcaacagctacacagcacggtttattgttacaccctggagggtcggtttatctgtgaagcggaatgtctggcacctgttgcatttaatgatgctgcggcaggccgtgaatatcgccgccgccagaaacaactgaaatctgcaactaaagcagccattaaggcgcagaaacaaatggatgcgctggaagttgctgaactgctgccgcagatagccgaaccagcagcaccagaatcacgaattgttggtattttccggccttccggtaatacggaacgggtgaagaatcaggagcgtgatgatgaatacgaaactgagcgtgatgaatatctgaatcattcgctggatattctggaacagaacagacgtaaaaaagccatttaa

SEQ ID NO: 374158 - DNA, 219 bp, Salmonella enterica
atggcgataaagaaaagtaaatgtgaagacaaaagcagatacgacattgttgctgatctgcgcaaaagaggaaaaagcctagcagctcttggtcgtgagaacggtctctctatctctacggtaaaaaatgccttggataaaccttaccctcggggggaaagaattattgccgatgcattgggagttgagccacgagacctctggccttcgaggtattga

SEQ ID NO: 374159 - DNA, 516 bp, Salmonella enterica
atgacacaagaatggttttcagctaaagagctacaaggggttgctggtcttccgtcttcagcaagtagtattagccgcaaagcaactaatgagggatggaaaaagagacagatcaaaggagtaaagggagttgcttatgaataccatatcagctcattacctgatgccactcaggcagaattaggaggggcgcagttattagatagcgataagccagcttataagttagcttctgtgttaatggctttggtcgcagagttagaaccagaggaaatccagagggcattaaagctacttagtaaaggcggacttggagcactaatgccaagtatctttgatcagactcaaatccaatctctgcacggcgtatcgcgtgagtgcatacaactagcccaaatgctagaaactttaccagcagatgcgcgcaaagagattttgtcagagtatggtattcatgaacaggaaggttttgtagctccttcacaagaaccacaagatgtaaaaaaagccgtataa

SEQ ID NO: 374160 - DNA, 204 bp, Salmonella enterica
atgcgcaaaagcccaccccgaacaaaactatgtcagaagatgaatcatcgacagatcgtcgccagtacgcaccgtttctatatggcgatgaaaattcgccgccacctcgctgttatgctggctgcgggagtgaaaactatacacaatattggtaacgtcatcccactcaagccgcccgcgctcatacacgctggctgccgttaa

SEQ ID NO: 374161 - DNA, 378 bp, Salmonella enterica
atgagctgcttcacaaccccggccattcttgaaatgcctggccactacctttggcgtgtacatgaaccttttgaattttacctcagcgacgacaacagcgacgtaatcagcgtaccagccggatttgtaactgatctcgccaccgttccacgcatcttctggtcagtcatgccgccagacggcaaatacgctaaagcggcaataatccacgactacctttacgacaatgcgccgcgcacgaaaaaagaagccgatttgatattccttgatggaatgaccgtgcctggcgtgccgaagtggaaacggattgtgatgtatctggcggtcaggtggtttggcaggggaatgtatgggaaagaacgtaaatactgtgaatga

SEQ ID NO: 374162 - DNA, 183 bp, Salmonella enterica
atgacaaaaccagcatcaaccaccaaaaagccacgcaagcagcacacgcctgaatttcgtcaggaagccctgaaactggctgaacgcattggggtggccgctgccgcccgcgaacttaacctgtatgaatcacagctctacaactggcgaagcaaaccgcaaaatcagctctcttccttctga

SEQ ID NO: 374163 - DNA, 165 bp, Salmonella enterica
atgccgcctttaaaaaaaattatgctgctcctgtttgtgggggcgatggtcgccacggtaacgacacctgcattggcgctggtttgccttgcatctcactcagctacagagtgtgctgaagcctgtggtgtcgatatgtggtttatgtttccgatatgtttttaa

SEQ ID NO: 374164 - DNA, 2634 bp, Salmonella enterica
atgagtcaggaaacgcccgcttcgaagactgaagcgcaaattaaaaccaaacgccgtatttcacctttctggctgctaccgcttatcgcgctaatgatcgcagggtggctagtatgggatagctaccaggatcgcggtaatagcgtgactatcgattttatgtcggcggacggtatcgtaccaggccgtactcccgttcgctatcagggagtagaagtcggcaccgtggaagatgtcagcctgagcaaagatctgcgcaaaattgaagttcgcgtcagtatcaaatcagatatggaagatgcgttgcgcgaagagacgcaattctggctggtgacgcccaaagcctcgctggcgggcgtttccggcctggatgcgttggtcggcgggaattacatcggtatgatgccgggtaaaggcaagcccagagatcatttcgtcgccctggatacacagcccaaataccggcttagcaacggcgatctgatgattcatctcaatgcgccggatctcggttcgcttaatagcggttcactggtctatttccgtaaaatccctgtcggacgggtgtatgactattcgattaaccctaacaaacaaggcgtgacgattgacgttctaattgagcgacggtttaccgatctggtgaaaaaaggcagccgtttctggaatgtctccggcattgacgccgatctaagcctgagcggcgcgaaggtgaaactggagagcctcgcggccctggtcaatggcgcgattgcgtttgactcgccggacaattccaaacccgccgcccaggatgacacgttcggcttatataaagatttagcccacagccaacgaggggtaatcgttaaacttgagctgcccagcggagacggtctgaaggcggaatctacgccgctcatgtaccagggactggaggtgggtgagctttctaaactgacgctcaaccctggcggtaaagtcaccggagagatgaccgtcgatcccagcgttgttccgctgatgcgggaaaatacgcgtattgagttacgcaatcccaaactgtcgttaagcgacgcgaatatcagttcgttgttaaccggaaaaaccttcgaactggtgccgggcgacggcgaaccgcgcagtgaatttgtggtggtgccgggtgaaaaagccttgctgcatgaggcgaatgccttaaccctgacgctgacggccccggaaagttacggcatcgaaccgggccagccgttaattttacatggtgtaaaaattggccaggtcatcgagcgcaacttatccagtaaaggcgtgtcattcaccgtcgcgattgaaccgcagcaccgggatttggtacagggcgacagtaaattcgtggtcaacagccgggtggatgtcaaagtcggccttgacggcgtagagttcctcggcgccagcgccagcgagtggattgacggcggaattcgtattttacccggtacgagcgggaagatgaaatccacctacccgctctatgctaacctggaaaaagcgctggaaaatagcctcagtgacttaccgactaccaccttaacgctgacggccgaaacgttgccggatgtccaggcaggttccgtcgtgctgtatcgaaaatttgaggtaggcgaagtcatcaccgttcgcccacgcgccaatacctttgacatcgacttgcatattaagccggaatatcgccacctgttaaccagcaatagcgtgttctgggcggaaggcggcgcgaaggtgcaacttaacggcagcggcctaacggtacaggcctcgccactctcccgcgcgctgaaaggggccattagttttgataacctgagcggcgccagcgccagccggcacaaaggcgataaacgcattctttatgcttcagaaacctccgctcgcgcggtaggcggacaaattacgctgcacgcgttcgacgccggaaaactggcggaagggatgccaattcgttacctcggtattgatatcggccagatccagacgctggaattgatcaccgcacgtaatgaagtgcaggcaaaagccgtactttatccggagtacgtacagacatttgcccgcgccgggacacgtttttccgttattacgccacaaatttccgcggcgggcgtcgagcatctggatacgattctccagccctatattaacgttgagccaggacgcggcgcggcgcggcgcgactttgaactgcaggaagccacgattaccgactcacgctatctggatgggttaagcatcgtcgtagaggcgccagaagcaggctcgcttaatattggcacccccgtcctgttccgcggtatcgaagtgggaaccgtcaccggaatgtccctggggtcgctctccgatcgcgtgatgatcaccttgcgcatcagtaagcgttaccaatatctggtgcgtaataactccgtattctggctcgcctccggctatagtctcgactttggtctgaccggcggcgtggtgaaaacggggacatttaatcagttcatccgtggcggtatcgccttcgctactccaccaggtacgccgctggcgccaaaagcgcaagccggtaagcatttcctgttacaagagagcgaaccgaaagagtggcgtgaatggggcaccgctctgccacgttaa

SEQ ID NO: 374165 - DNA, 738 bp, Salmonella enterica
atgaaaattttatttattggcgaatcctggcacattcatatgattcactctaaaggttttgatagctttacatcgagcaaatatgaagaaggcgcagactatttattatcctgcttacgccagggtaatatcgatgtggactacatgcctgcccatattgtgcaaactcgttttccacaaaccgccgaagcattagcctgctatgatgcgatcgtcatcagtgatatcggtagcaatacgttcctgctacaaaacagaaccttttataatatggatattattcctgatgcattacaacttatcgcggattatgttgctgagggcggcggtctgttgatgatcggcgggtatttatcctttacgggaatagaagcaaaagccaattataaaaatacggttctggcggaggtattgccggttgatatgctggatgtagatgaccgcgtagaactaccgcaaggatgtaaagcagtaaatactgcggtagagcatgttattacccagccatttagcgaatggccgccgctgttgggctataacaagcttatcgccaaagaaaatagtcaggtccttgctgaaattaatggcgatccactgttagttatgggtacttaccataaagggaaagtatgttgctttgccagtgattgttcgccgcactggggaagtccgcagtttctgcaatgggaacattacgccaccttctggtgtaatgttttacacacaataaaaaaataa

SEQ ID NO: 374166 - DNA, 1344 bp, Salmonella enterica
atgaaaaaagtcaaaaaattgtctcttaccgatttagtgctttatggtctggtgtttatggtgcctatcgcgccagtctctctttatggcgtcgtttataatctttcgcacggtatggttgcgctggtttatattattggcgcgatcgcgatgttttttaccgcgtacagctactctaccttatcgcagcatatctcctcgtcgggttcggcctatgcgtatgctggcgtatgcattaatcccgccgtagggtttctgaccggatggatattactgttggattatcttttgttccctacgctcgtggcagtgctgggcggcgtcgcggtccacgctattttaccgcaaatcccggtctgggtctggccgttgatttatgtggctattggcaccggagtcaactatctcgggatacagcaaacggcgaaatttgataagttactggtctttattcaactcggtattctggcgattttcgttctgctcattgtccgtctgttgatgctggacagtagtcagataacgctttccttccggccttttttcgattcacagtggttcaccccagggctcatcgcgacggcgatttcggtggctgcgctgaactttctcggctttgacgctatcagtacattaagtgaagaaagcgaaggcgggggacgcgccgtcagtaaagcaacgctgttagcgttagttttggcgacggtactgtttattatcgttgtggcgtttgcggcgttcgccaccggtaatgttgaccgcttcgcggaaggtaatgcgacgaatgaagcatttttcaccattgccggcaacgttggcggtatctggctcaaagtggcgttttccatcattgtggcgtttgtgtgcgccgtcggcaacattattaccgcgcaaacggcggtgtccagagtgctattttcaatggggcgcgaccgaatgttgcccgccttcctcgctcacgtccataccacgcgtaaaacgccggattatgccattctgtttaccggcggcgtcaccctgctgctcagctacctgttttccggcaagattgaatctatctccacgctggtgaactttggcgcgcttttcgctttttttgtcgtgaacctgtgtgtgtttattctgttcaatttccggatgaaagcccagcggcgcattttcgcccatgtcatttcgccgatcatggggatgatcgtcatcggctacgtctgtttaaacatgaacattcacgctctgatactcggaattagctgggcggcgatcgggatagcgattctgtgctatcgaaaagcacacaaccaaaacatcgccatcgacctggaaggcaaaaagttgctcgattga

SEQ ID NO: 374167 - DNA, 1002 bp, Salmonella enterica
atgaaacgtgcgtctttcattacgctaactattatcggcgcgtatagcgcgttacaggcagcctgggcggttgattatccattaccgcccgaaggcagccgtcttattggtcagaatcaaacctataccgtacaggaaggtgataaaaacctgcaggctatcgcccggcgttttgatacggcggcgatgctcattcttgaagcgaacaatacgattgcgccggtgcctaagcccggtacgctaattaccattccctcgcagatgctattgccggatgcgcccagggaaggcgttatcgtcaacctcgcggagctacggttgtattattatccgccgggagaaaaccgcgttcaggtatatcccatcggcatcggtttgcaggggctggaaactcccatcatggacacccggatagggcaaaagatccccaacccgacgtggacgccgacggcgggcatacgccaacgttcgcttgagcgggggatctcgctgccgccggtgatccctgccgggccaaataacccgctgggacgctatgcgctgcgtctggcgcacggtaatggggaatatctcattcatggcaccagcgcgccggatagcgtgggtctgcgcgtgagttccggttgcattcgcatgaacgcgccggacatcaaagcgttatttgcgcaggtcagaacggggacgccggtaaaagtgattaaccagccggtgaaattctctgtcgagccgaatggcattcgttatgtagaggtacacaggccgctatcgccggaagaagagcaaaacgtgcagacgatgccctacgtgttgcctgcggaatttaccgcattcagaaacgcgcaaggggtggatagtcgcctggtcgataaggcgctataccggcgagccgggtatcctgtcagtgtgagcgccgggcagacgccagcggtaaatacgaccgcagtcgaatccgctcagaacggttttgtcggggaagaggggcaaacgcgcgcgacgcagtag

SEQ ID NO: 374168 - DNA, 759 bp, Salmonella enterica
atgaaaaccgtcaccgtaaaaaatcttatcattggcgaagggatgcccaaaattatcgtgtcgttgatgggaagagacatcaatagcgtgaaagcggaggcgctggcctaccgcgaagctacattcgatattctggagtggcgcgtggatcactttatggatatcgcatcgactcaatccgttcttaccgctgcgcgtgttatccgcgatgcgatgcctgacattccgttactgtttactttccgcagcgccaaagaaggcggcgagcagacaataaccactcagcattatctcacgcttaatcgtgccgcaatcgacagcggcctggtcgatatgatcgatcttgagctatttaccggtgatgctgacgttaaagccactgtcgattatgcccatgcgcataatgtttatgtcgtgatgtctaaccacgattttcaccagacgccgtccgcagaggaaatggttctgcggctacgtaaaatgcaagcgctcggcgcggatattcccaagattgccgttatgccgcaaagcaagcatgatgtattaacgttactcactgccacgctggagatgcagcaacattacgccgaccgtccggtaattactatgtcaatggcgaaagagggtgtcatttcacgtctggcaggggaagtgtttggctctgccgccacgtttggcgcggtgaagcaggcttcagcgccggggcaaatcgccgtaaatgatctacgcagtgtattaatgattctgcacaacgcctga

SEQ ID NO: 374169 - DNA, 2379 bp, Salmonella enterica
atgtccaacaatggctcgtcaccgctggtgctttggtataaccaactcggcatgaatgatgtagacagagttgggggcaaaaatgcctccctgggtgaaatgattactaacctttccggcatgggcgtatccgttccgaatggttttgcaaccactgccgatgcgtttaaccagtttttggatcaaagcggcgtaaaccagcgcatttatgagctgctggataagacagatattgatgatgtctcccagctggcgaaagcgggcgcgcagatccgccagtggattatcgacactcctttccagccggcgctggaaaacgccatccgcgatgcctatgcgcagctttcgtcggatgatgaaaatgcctcttttgccgtgcgttcctccgccacggcggaagatatgccagatgcttcgtttgcgggccaacaggaaacgtttcttaacgttcaaggcttcgatgcggttctggtggcagtgaaacacgtatttgcttctctgtttaacgatcgcgccatctcttatcgcgttcaccagggatatgatcatcgcggcgtagcgctttccgctggcgtgcagcggatggttcgctccgatctcgcctcgtcaggggtgatgttctctatcgataccgaatccggttttgaccaggtggtctttatcacctcggcttggggactgggtgaaatggtggtgcagggggcggttaacccggatgaattttatgtccataagccaaccctggcggcaggccgtccggccatcgtacgccgcaccatggggtcgaaaaaaatccgcatggtttacgccgccacccaggagcacggcaagcaagtgaagattgaggatgtgccgcaggaacagcgcgacattttctcgctcaccaacgaagaagtgcaggagctggcgaaacaagcggtgcagattgagcagcactatggtcgtccgatggatatcgaatgggcgaaagacggtcataccggtaagctttttattgtgcaggcacgtccggaaaccgtgcgctcccgtggccaggtgatggagcgttatacgctacatgctcaggggaaaatcattgccgaaggtcgtgccattgggcatcgtatcggcgcaggtacggtaaaagttattcatgatatcggcgaaatgaaccgtattgagcctggcgatgtgcttgtcaccgatatgaccgacccggactgggaaccgatcatgaaaaaagcggcggcgattgtcactaaccgtggcgggcgcacctgtcacgcggcgattatcgcccgcgaattgggcattccggcggtagtcggctgcggcgacgccaccgaacgcatgaaagatggcgaaaaagtaaccgtctcctgcgcagaaggtgataccggttatgtttatgccgacatgctggatttcagcgtaaaaagctccagcgtagacaccatgccagagctaccgctgaaggtcatgatgaatgtcggcaacccggacagggcatttgactttgcctgcttgccgaatgaaggtgtaggtctggcgcgactggaattcatcattaaccgtatgattggcgttcacccgcgtgcgctgctggagtttgacgaccaggatgccgcgctgcaaaacgacattcgtgagatgatgaaagggtttgactcgccgcgtgaattttacgttggtcgactgacggaagggatcgcgacgttaggcgccgccttctacccgaaacgcgttatcgttcgtctgtctgactttaagtccaacgaatacgccaacctggtcggcggcgaacgctatgagccgcatgaagaaaaccctatgctgggcttccgcggcgcgggccgttacgtcgcagaaagtttccgcgattgttttgcgctggaatgcgaagcggtgaaacgcgtgcgcaacgatatgggccttaccaacgtcgaaatcatgatcccgttcgtgcggacggtcgaccaggcgaaagcggtcatcgaagagctggcgcgccaggggcttaaacgcggcgagaacgggctgaagatcatcatgatgtgcgagatcccgtccaatgccttgctggctgaacagttcctcgaatattttgatggcttctcgattggttctaacgacatgacgcagctggcgctggggctggatcgcgattccggcgtggtgtctgaactgtttgacgagcgtaacgacgcggtgaaagcgctactgtcgatggcgatccgcgcggcgaaaaaacagggcaaatatgttggaatttgtggtcagggtccgtccgaccatgaagactttgccgcctggctgatggaagaggggatcgacagcctgtcgctgaacccggacaccgtggttcagacctggctgagtctggcggaactgaagaagtaa

SEQ ID NO: 374170 - DNA, 261 bp, Salmonella enterica
atgttggcagatataaaatattgggaaaatgatgcacaaaataaacattacgcgattgcgcactttaacgtgtggaatgcggaaatgttgatgggagtgattgatgcggcggaagaggcaaattcgccggttattatctcctttggtaccggatttgtgggcaatacttcatttgaagacttctctcatatgatggtttccatggctaaaaaagcctctgtgccggtaattacccactgggatcatggacattatccataa

SEQ ID NO: 374171 - DNA, 1044 bp, Salmonella enterica
atgaaaaattcaaaagcgatattaaaaacgccgggcaccatgaaaattatggcggctgatattccagtaccaaaagaaaacgaagtattgatcaaagtggaatatgtcggtatttgcggttcagatgttcacggttttgaatccgggccattcattccgccgaaggatccaaatcaggaaattggtctcggtcatgagtgtgccggaacggtcattgcggtcggcaatcgggtaagcaaatttaagccaggcgatcgggttaatatcgagccgggcgtgccgtgcggccactgccgctattgtctggaaggaaaatacaatatttgtccggatgttgattttatggcgacgcagccgaattatcgcggggccttaactcactatctgtgccatccggaaagttttacgtacaagcttccggacaatatggacactatggaaggtgcgctggtggaacccgctgcggttggaatgcacgcggcaatgctggcggatgttagaccgggtaagaaaatcgtcattctcggcgcgggctgcattggtttaatgaccctgcaagcgtgtaagtgtctgggggcaaccaatatcgcggtagtggatgtgttggaaaaacggctggcaatggctgaacgactgggcgcgacaaccgttatcaatggggcgaaagaagatactgtcgcgcgctgccagcagttcaccgacgatatgggtgccgatattgtgtttgaaaccgccggttccgccgttacaactcagcaagcgccgtatctggtcatgcgcggcgggaagatcatgattgtcggcactgtcgcgggagattcagcgattaatttcctcaaaattaaccgtgaagtctccatccagacggtattccgctatgccaaccgctatccggtgactattgatgccatctcctccgggcgtttcgatgtgaaatcaatggtgacgcatatttacgattacaaagacgtacagcgtgcatttgaagagtcggtgaataacaaacgcgacattattaaaggcgttattaaagtttgtgattaa

SEQ ID NO: 374172 - DNA, 216 bp, Salmonella enterica
atgaaaaagttgaaagaaatggctgctatctcgctttttacattattggcggcgggtttttccgcatcggttatggcagacgaccaggcgcctgaaagagttccagcagctgaagttaagcccgttggtgaacatgtacactggtgtactctctttgatccagatggtatggagttgccgccgttgccaggcatggaatggccgtggtgtttgtaa

SEQ ID NO: 374173 - DNA, 969 bp, Salmonella enterica
atggaagttattaagatttggagatcctttcttaaacattttaaacagaaaaaattagattctgcggtgattgtctatggcgtgaacgcaatctatttaatcccctataaatttcctttaaaaagttacctggttgcatttctctttgtatctattctaatattctcttgcactcaagaaaatcgaattagggaatatatcagtttctttgtacgcacagacaatgatcatttattgactcggtttgctggtattctatcgctaactgcatggtcaatttttttgcttttgttgttgtctgctaatgtgtttgtcaacaccataacgtattggttagctattttattttcagtctctatcctcattagtagcattttgactattttagattttgccagaaataatacagcaaaaacctttaaggtaatcggcttggcggttaccgcattttcaggtgtttttgtttttactagtagttactctgccagcattttctggcaaatcagtaatctggagctatcctcttctccatggttagaatattgttggaaagccaccgcatttcttatgtttttcctgtggttatcacaacctatttgctatgggctatttctgcgttacggtgataaagcaaaagggtatcgaatctttacattaacaggtgcttttattatgtctatgtttttgtttctgcttgttcctatgttgattggtgatgtcgcttattttgtgctaaaaaagaccatcaaccatgaatggcgcaatgaagcaaagtgcggtgaattggaagtgaagaataaaaacgaaaaatattttggttttaatactgataaatatactgtgttttattcggataaaaatgataagtggggtttctatgagatcacctgcaaaaaagggagcgacaggagagatacttatagtgtggagcatttgccggagtataatatcccctcgtggttaaggtag

SEQ ID NO: 374174 - DNA, 2424 bp, Salmonella enterica
atggctgacctgaacctgagtaccctgacggaagcagacatcatcaccaaacgcgttatgcccgccatcctgaaagctggctggaacaacacaacgcaaatccggcaggaggtcaaactccgggacggtaaggtcatcgtgcgcggtaaagtggcggcgcgcagaacggtgaaatccgccgatatcgtgctctatcataaattaaacatgccgctggcggtgattgaggccaaagccaataagtatgaaatcggcaaagggatgcagcaggcgctgggttatgcgcacctgctggacgttcctttcgtcttcgctaccaatggcgatggctttatcttccatgataaaacggcaaccggcgcgattgagcgagaaattaccctcgacgaattcccaacgcctgacgaattatggcaaaaatactgcgtctggaagggttacacgcaagcccagctcccggtgattactcaggactactacgacgataacaccggcaaatcgccgcgctactatcagctacaggccatcaacaaaaccattgaagccgtctcagccgggcaagaccgcgttctgctggtgatggcgaccggaacggggaaaacctacaccgccttccagataatctggcgtttatggaaagcgaaaagtaaaaagcggatcctgttccttgccgatcgcaacattctggtcgatcagaccaaaaacaacgacttccagccgtttggcacggcgatgaccaaggtcaccgggcgcaccatcgatccggcatttgaaatccatctcgcgctgtaccaggccatcaccggcccggaagaagatcaaaaagcctttaaacaggtggcccaggatttctttgacctgattgtcatcgacgaatgccatcgcggtagcgcctcggaagacagcgcgtggcgcgaaattctcgactatttcagcgccgccacgcaaattggcttaaccgccacgccgaaagagacccatgaagtctccagcaccgattacttcggcgatccggtatatacctactcgctcaaagagggtatcgaagacggcttccttgccccttataaagtggtgcgcgtcgatatcgacgtcgatctccagggctggcgtcccaccaaaggccagatggataaaaacggcgagctgatcgacgaccgtatctacaaccagaaagattttgaccgcacgatggtgattgatgagcgtaccgaactggtggcgaaaaccattaccgattacctcaaacgtaccaatccgatggataaaaccatcatcttctgtaacgacatcgatcacgcagagcggatgcgccgcgcgctggtcaatctcaacccggaacaggtcaaaaagaacgacaagtacgtgatgaaaatcaccggcgatgacgacattggcaaagcccaactggataactttattaaccccaaaaagacttatccggttatcgccaccacttccgaactgatgaccaccggcgtcgacgcaaagacctgcaaactggtggtgctggaccaaaacattcagtcgatgaccaaattcaagcagatcatcggtcgcggcacccgcatcgatgaacgctacggcaagctgtggttcaccatcctcgatttcaaaaaggctaccgaactgttcgccgacgaacgttttgacggcatcccggaaaaggtgatggacaccacgccggaagatatcgccgacccggactccgactttgaagagcagttcgacgagcacgaagaagagactgaagatgacatcaccggtgccaatgaagatcccgcgccgtataccgtcaccggttcagacgatgtcggcccgctgccggaagatgacgagaacaaagtgcgcaagtttcacgttaacggtgtcgccgtgggcgtgattgcccaacgtgtgcagtattatgatgccgacggcaagctggtcaccgaatccttcaaagactacacccgcaaaacgttgctcagagagtacgcctcgctggatgatttcacccgcaaatggcaggacgccgagcgcaaacaggccatcatcaaggagctggagcagcaggggattatctgggaagtgctggcggaagaggtcggtaaagagctcgacctgttcgacatgctctgccacgtggtgtatggtcagccgccgttaacccgcaaagagcgagcagagaacgtgcgcaagcgcaactacttcaccaaatactccgacgccgcgcaggcggtgctgaatacgctgctggataaatacgccgacgcaggcgtgcaggaaatcgagagtattcaggtgctgaagctcaagccgttcgacagcatgggtacactgccggagatcattaaaagcggattcggcgaccgtaacgggtataatcaggccatcagcgagctggagagcgaaatctaccacttaccgccccgctccgcgtaa

SEQ ID NO: 374175 - DNA, 1470 bp, Salmonella enterica
atgtcaatcagctcagttatcaaatccttacaagacattatgcgcaaagacgctggcgtggacggcgatgcgcagcgtctcggccagctctcctggctgctgtttctgaaaatctttgacgcccaggaagaggcgctggaactggagcaggataactatcagtacccgatcccgcagcgctacctgtggcgcacctgggcggcaaacgccgagggcattaccggcgattccctgctggaattcgtcaacgacgacctgttcccggcgctgaaaaacctcaccgcccccatcgataaaaacccgcgcggctttgtggtcagacaggcgttcagcgatgcctataactacatgaaaaacggcaccctgctgcgtcaggtgatcaacaagctcaacgaaatcgacttcaccagcgccagcgagcgccacctgttcggcgacatttacgaacagatcctcaaagatctgcaatcggcgggcaatgccggtgagttttataccccgcgcgccgtcacccgctttatggtcgatcgtgtcgatccgaagctcggcgagtcgattatggacccggcctgcggcaccggcggcttcctcgcctgcgcgttcgatcacgtaaaaaacaactacgtgcagagcgtggccgatcaccagacgctgcaacagcagatccacggcgtggagaaaaaacagcttccgcacctgctggcgaccaccaatatgttgctgcacggcatcgaagtgccggtgcaaattcgtcacgacaacaccctcaacaaaccgctgtcatcgtgggatgaacagctggatgtgatcgtcaccaacccgccgttcggcggcaccgaagaagacggtatcgagaagaacttcccggcagaaatgcagacccgcgaaacggcggatctgttcctgcaactgatcgttgaagtgctggcgaaaaacggccgcgcggcggtggtgctgccggacggtacgctgtttggtgaaggcgtgaaaaccaagatcaaaaagctgctcaccgaggagtgcaacctgcacaccatcgtgcgtctgccgaacggtgtgtttaacccgtacaccgggatcaaaaccaacctgctgttctttaccaaaggccagccgaccaaagacatctggttctacgagcacccgtacccggcgggcgtgaagaactacagcaaaaccaaaccgatgaagtttgaagagttccaggccgagatcgactggtggggcaacgaggccgacagcttcgccagccgcgtcgagaacgagcaggcgtggaaggtcagcatcgacgaggtgattgcccgcaactttaacctcgatatcaagaacccgcaccaggcggaaaccgtcagccacgatccggatgaactgctggcgcagtacgcgaagcagcagcatgagatccagaccctgcgccaccagctgcgcgatattctcggcacagcgctctccggtaaggaggccaactga

SEQ ID NO: 374176 - DNA, 1770 bp, Salmonella enterica
atggcggtggaaaaactgattgtcgaccatatcgacacctggaccacggcgctgcaaccccgctccagcgccgggcgcggcagctcgggtaagattgacctgtacggcattaagaagctgcgcgagctgattctggagctggcggtgcgcggcaagctggtgccgcaggatccgaacgacgaaccggcgtcggagctgctgaagcgcattgcggcggaaaaaaccgagctggtgaagcaggggaaaattaagaagcagaagccgctgccggagattagcgaggaggagaaaccgtttgagctgccggtagggtgggagtgggtaactttttcacatttaggccatttttttggtggtaaaactccaagtaaaatgaaagatgaatattggggaggaactattccatgggtaaccccaaaagatatgaaaacgaatctaatagtcgactctgaagataaggtgactcctttagccattgaagatggtttaaccaaagtatctccaggaagtatactatttgtcgcgaggagtggaattctaagaagaatatttccagttgctataacatcgattgaatgtacagttaatcaagatttaaaagtattatcgccatttctcagtgaaatttcatactatatacgactgatgatgaatgggtttgaacgatatatagttgagaatttaaccaaaacaggaactactgttgaaagcctgttatttgatgattttatatcacacccattcatgattccaccattcgcagaacagaataggatcttaagtactgtaaaaaaacttatgtccctatgcgatcaactggaacagcactccctgaccagtctggacgcccatcaacagctggttgaaaccctgctaaccacgctaaccgacagccagaacgccgatgcactggccgaaaactgggcgcgtatcagcgaacatttcgacacgctgtttaccaccgaagccagcattgacgccttaaaacagaccattctgcaactggcggtgatgggcaaactggtgccgcaggatccgaacgacgaaccggcctctgagctactcaaacgtattgcgcaggaaaaagcacaactggtgaaagacgggaaaattaaaaagcaaaaaccgttaccacctattagcgataaggaaaaaccgtttgaagtgccggagggttgggaatggtgtaaatttggtttaatttctgagtttattaacggagatcggggaagtaactatcctaataaaaatgaatacgttgttcacggaatcccttggataaatacaggtcacatagagaaaaatggaactctatcaataacagatatgaatttcattactgagaaaaaatttaatgagttaagaagtggtaaaattcaaagcggagatttagtttattgtttacgcggtgctacattcggtaaaacagcattcgtaaaaccatatgaatctggtgctatcgcatcttctctaatgatcattagaccgtttattagagaaatgggagaatatatatataattatttaatcagtccatttggacgctcgcaaatttttcgttttgataatggttcagcgcagcctaatctatctgctaatagtgtgatgctttatgcttttgcatgtccaccattacaagaacaatttagaattcataaaaaaataactgagctatttcatatatgcgataatttgaaattacaaactcaatccgcccaacaaacccagctccacctggccgacgccctcaccgacgcagccatcaattaa

SEQ ID NO: 374177 - DNA, 321 bp, Salmonella enterica
atgactaccccgcattctattgcagaattcaccgatccagaagtctccccgacaaataaccgcgccgccaccgtcagttatgcgagccgctacccggaatacacccgtatccccgccattaccctaaaaggccagtggctggaagccgctggttttaccaccggcagcaaaatggatattaaggtgatggaaggctgcattgtactgaccgtgaaaccaccagagcctgagctggttgagtctttacggcaagtaagcaagctgtcagtacgtaaacaaaagcaagttcaaacgtttatccgcgtgatttcttctcaatag

SEQ ID NO: 374178 - DNA, 1854 bp, Salmonella enterica
atgagtacgtttgacacgacgaaaattgctttaaaagatatcctggggcagattactgatggacgggtacagttgcctgatttccagagagggtgggtatgggatgatgagcatgtccggtctttgctggtcagtattgcccgttcttttcccgttggtgcggttatgctgctggagactgggggagaagttcgcttccaggtgcgtccagttgaaaatgtagaattgcagaaaaccgagcctgagatgttgattctggatggccagcaacgtttaacgtccttgactcaagtcctgatgctggatacgcccgttaagacttttaacgagaaaggaaagcagatagaccgtttttattatattgatattgaggccgctctggacaataggcttgatgaagcttttatttctgttgaaaagtctaaaaaagtaacgatgaattttggtcgtgatataaaaaattttactaactcatttggggaaacggttgaaatggatttttctaccgtgcaaaaagagtgcgaagcattatttttcccttgtaaccaaattatcaactctgatgcctgggaaagtcatttatataagtgttcacaagaaaagtttttcacttatatgcagttccgtgaaaaaattctgaatgcctttaggaactatttgctgcctgttattaaattgggtaaatcaactagcaaagaggccgtttgcctggtgtttgaaaaggttaataccggtggtgttccactatccgtatttgaactggtgaccgccagttttgcggctgatgggtttaatcttcgggatgactggtttggcagtaatttgcgtcaaaaatttggccgccgaaatgtactgaataaagaagctatcctacagggcgtagagccgactgactttttacaggctatcagcatattgaatacgctaaaaaaacggcgtgccgatctggccgaagggaagacagggaaatcagttactgcagtaagtgctaaacgagtttcagtattagccctttctcttgaagattatcattgctgggccgacgatgtggaaaaaggcttcttacttgccgctaaatttctccatcatgaatgttttatgcactcatgggatcttccttatcgtacgcagcttgtgccgctggcggcagtattatcgaaattacaaggcaattggctggagcccaaaatttatgacaaactggcgcgctggttctggtgcggtgtcctgggggaactgtacggcggcgcggtagaaacacgtatcgcaaacgatgtggaagagttactaaactggattgagggggaaggtgaagagccccggacgatttatgaagcctcattccagccagggcgtttattgacgttacgttcccgattgagcgccgcgtataaagcgttaagcgtgttgatcctacgcaatggtgctcaagactttttctggaagtcgacgatccaaaagttagattatggtgagattgcactcgatattcaccatattttcccaaagatatggtgcgagaataataatattagtccagcagtgtataactctatcattaataaaacatcaatctcctataaggccaaccgaatgattggtgggagatctccggctgagtatctgtcgcagatccagacgcatccgcaggtcggtctggaggatgccgagatggatgcgatcctacgcagccactttattgagccttcgctgttacggcaggatagtttcgaggcattttttgccgatcgaaaaaaacaattgctgaaattgatcgaagcggcaatggggaaaaatattagtcaggatgatgttgctgaattagagacagcaacagacgagattgatgtctga

SEQ ID NO: 374179 - DNA, 927 bp, Salmonella enterica
atgagcgatatccagcttttccgcctcggtggcgggaaagtacaagaactgccgggcaaagccgcagccattgaaaaagatctgcaaatgctgatcgaatcccatatggaaacgttccttggcgtccgctttcttgagaccgaataccacacgggtaaaacccatcgtgggcgaattgattccctcggcctcgatgaaaataactgcccggtgattattgaatataagcgccacagcaatgaaaacgtcattaaccaggggctgttttatctcgactggctgctcgatcataaagcggaatttcagttgctggtgatggagaaaataagtaaaaccgcggccaaagccattgactggtccggcacacggttaatctgtattgccgccgattttaataaatacgacgaacatgccgttcagcaaatcaaccgcaatatcaacctgattcgctacaagctttttgccgacgacctgttaatgctggaactggttaacgccgtggtcgaaaatagccctcagtacatcatcgcgaacggttccgtcagcagcggtaacggtaagcgccatacccgcacgcagcgcgaacagctctcttcggcctcacccgcgctgctttcattatatgaacagctaaaaagttatgtgctgtcactcagtgatgaggttcagtttaaagagcttaagctctatgacgccttccgcctcattcgcaactttctgtgcgtagccgtttatcccgtgaccgacccacacctacgcctgtggctgaaaatcaatccacagcatatccagcttgaagaaggatttagccgggacgtcacaaacattggccactggggaaccggcgacgtcgaattgattgtgcgtaacgaacatgatctggataaagccaagctgctgatcgagaaagcctggcaagaaaattag

SEQ ID NO: 374180 - DNA, 300 bp, Salmonella enterica
atgtattgtccttaccggcacctttcttacgacgtatcccgtaactacgtggccccgcaggaatgtgactatacccactacgcattcagcattgcgccagaagattttgagccgttctcgtataagctgaaacaggcgggagtgacggtctggaaagacaataaaagcgaagggcaatccctctattttcttgacccggatggtcacaagctggagttgcatgtgggagatttagcatctcgactggcgcaatgccgggagaagccttactctggaatgcgtttcggtcctggaaaataa

SEQ ID NO: 374181 - DNA, 363 bp, Salmonella enterica
atgaaaacgactttgtataaagatttcacatttgaagccgcacaccgactacccaatgtacctgatgggcataagtgcggacgtttacacgggcactcgttcgttgttcgccttgagatcaccggagagatggataagcacgcggggtggattatcgatttcgcagaattaaaagcgatcttcaaacctacgctggataggctggaccactattatctcaatgatattcctggccttgagaacccaacaagcgaagttctggctcaatggatctggaatcaggttaaaccacaactcccgatcctgagcgcagtcatcgtgaaagagacatgctctgcaggctgcatctaccgtggtgaataa

SEQ ID NO: 374182 - DNA, 2172 bp, Salmonella enterica
atgtgtgcagactggctgaaaaattattacgctaaagataaatatctggattatgacaaggcgatggtggggggatacggcatcccacaaatgaacacgctgattcaacaggccgcagcgttacggatgccctgcatcgttccttcaacgcgaaagagaaaaacggtgttttatgccctggcagagaatgcaaaaagccttgaagaattacgacgtattctaaccgcggcgctgggttccgctgacactactcccgacattaaatcgatctttcaatctgacgatgacggggaacagttgctgctggagaaatccccggacggaatactggccttcgatttcttaccggtgccgtacggctcacctcagcaggtaaaagagtggcagatagcgcgaatgaagcgggtatacgccatgctgcaattggtgatggatctttatcgtcagcgacccattttacattcgctagtaagccggcaaaccggacggattctcagggatttctacacggcatgccacgcgcgcgacggcaagattgcagaacagtatctggaagagttacgcggtaatcaggcactgtcttctcttaatctcctgtttcttgaactacaggggatggcggcttcggcaagatggggcgagattctcaaccatcctcggctggaagtattgttgcgcggtcgtgtgccggagcgtatccagcgcctgttgttgcgatcctctggccatttaatgcttaacgccatccgcgatgcgcatttcccactggacaggcgtgatgacgccaggcgactggtactgggcttattgccactgtacaagcataagccccgctttgctcatcaggcgagtttccggcctgactggcaattgtggaccatgggggccgcgctgctggggatcgacgaatggcaaacggcgacgcctctgttagaaactgactggatacagcaggtcgaggggtgggcgacaggtgcaagttcgctgccagcatcggtagaagcggaagaacaggtgctgatccaggctcctgttatcatgctgataaaccttgaaaatgctaccgatttgttactcgaagccctactggcggacgctgagcgcgaaagtgagatatacgcgcaactggcggcgatgcctgaagcaacacgacaggcattggaaaaaatacccaaactatgggagacgtggcaggcgctgaaaaatcgctgcgaaccgcaggactatggctggagtcgttggcttgaagatttacaacaggctacggaatctgaacggtttgaatcactgcgccagcaggcgactgttcactacatggactggacaccatcaaccttcagcgaaacgcagtggcaggcgctgctagagcagcagtccaacgcccagttgagtaaagttttacgagacgtactgccaacctttctgaactggctggaagaatatgacgttcaggtatctgcctccttgtggccggactggcttatgctgctggctgttgaggatattcgctcagaagaagatgtgcgtctcggtgggatgattctggataaattcctttctggtaccttcacccgcgaggaatatgcgtccgcaattgaatcggtagcaatgctgtgctctgaaaacctgtcggtaagaaccttagactactcgcttgatattgctgaacttctttatgataaaatctccgctgacgacgccgccagattaggtttctgggtcacgttgcaggagttgctcaagcagcgctgggagcgtctggatgtcagtatgcaactttccgcgcgcatggtggaaagactctatctcggtgaacatgccggacacgttttcccgaaagaggacaatacgccgggcgtaacgtcttcgcttcatcgcgatctcgacggtaaaacgttggcaatttacagcctgatggaaggtgcggcgagacgcggaaaagaggctctacttaagttatatcctgggttgaatgtggaactcaatcacgatcacgtagctactccggcgctgataaatctggcggaaaaagctgactactttatctttgccagcggtagctcaaagcatcaggcgttctataccgtgactgattatcgcaaagagataatctatccctccggtaaaggggcatcgagtatgatcgcagccttcgtcagtgcgctggattga

SEQ ID NO: 374183 - DNA, 546 bp, Salmonella enterica
atgatcggacgtgcaaaacagcgccagatttttttacacggtgcctcagggcaacggcaattgcgggaagtactcagcgcccaacttatcgcactgattatgcagccagagccaatctggctagtgtcgccgtgggtgagtaacttctcactgttggacaatcgttcaggcaactgggacagcattgatcccgcgtggggaggcagggaggtagattttattgagctgttggcctgtgcggtgaataacggtgcgccgctttcgctggtgacccgcgacgaaccgatgaaccgtatttttgtaaaagcgctggaaaaacgtctgagcaactttgcaaactttcgtctggaatggcgtaatcatctgcatataaaaggttttctgacgcaaaatgtgttcctcaagggctcaatgaattttacccgcagcggcgttaatcgaaatgaagagtttgtcgaactgaactgcgattcgcatatgatcggtgaagcgataaccgaatttgaacgtcagtatctttttattggatcacaggaagcgttctga

SEQ ID NO: 374184 - DNA, 4518 bp, Salmonella enterica
atgaagggaatcgagctttcgcttttgcaacgcgtgctggatgcgctggaagaacaagaaaatgcgctcctggtatggggcgacacgggcggtttttttaatctggatgagctgttaagcactatcggacgggtgttacctgaagaagatgctgaaaaggttctggatgagatgctagacgccgccatgttgattcaggtgccgcacatcagtggcacgcctgtctggcgaacccgaatgggggaaacggtccatctcatgcgcaacctacgccagtggatgcatgagcaaaagctggaacagagcaaaacgctggtatcggactatcgctttattcgtcgaccgcgcagctatcccgatcgcgtttacgaaccggcaacgctgattaccggctggaaaaaacagctgaacttaagcgatcgctcctgtgacattatgcgccaggccctggcgtcagataagcccttcttgctggcgggttttcaggttcgcgcgaccgaacgcattatgcagtgctggctggaacatcaggtgaaaagcaatacggccagcgggacaatcgtctgtgctggcaccggtagcggtaaaacgttgtcgttttacctgcctgcgctaacccgccttgccgaagagatttgtaacaaccctgagcgcaaggtgcgcattctcgccatctacccgcgaaaagaactgctcaaggatcagtttgccgaaacgttttcacagtgccgcaagcttgacgaatttatgctgatggccgccggacgcaagattcgtatcggtgccttttttggcgatacaccggtgaaggcggaatggtcgaagaaagacgttaaggggaagattggtctaccgttcggcctaatgaaatgccagcagccccacccgcagtatcctaagcagacttgcggaggggcgctcatttggcgtcgtgaagacatctttgacgagcgtgaggtgcttacctgtacgcaatgccagcatcagctggatcagagtgaaatcatgatcacccgtaatgcgcagcaacatcgcggcgacgccccggacattctgtttactacgacggaaatgctgaacctccagatgaactccacttggagcaaccatctgtttggtgtcggtgaaggctatgggccaacgttggttctgctcgacgaggtccatacatacagcggaaccaccggcgcacaaaccgcgctgctgctgcggcgttggatgcagcgtaccgattgtttgccgcattttgttggactatcggcaacgcttgctgacgcgcagcacttctttgccaggctggtgggtgctcctgaagaggaggtagccctgatccagccctacgcggaagagatgatcgaagagggggctgaatacctgctggcactgcgaggcgatcctgtctctgaaacggcattactctccaccaccatccaggctagtatgctaatggcgcgcatgctggatagcaaagcgaacaagtcacaaggtacctgggggaagaaaacgttcatcttcactgataccctcgacggtaacaaccgattgtaccacgacctcagcgatgccgaaggctgggagacggggccaggacagtcgcgcattgatcattcaccgttggccgtgttacgtagtccttttgataaaatggcatctgagcggtcgaaaactgaactggggcagaactggaaggcggctatggatattggccacgacctcgcggaaaacaaagtcatttcccgaacgtcgagtcaggatgccggtgttgatgcatcagcagatgtcgtggtcgccacttcttctctcgaggtgggatataacgatccgttggttggtgccgttcttcagcataaggcgccgaacgatgtcgcctcctatttgcagcgtaaaggacgtgccggtcgtccaagaggcatgcgcccctggatgctggtggtgctctccgagtttggccgcgatcgtgtcgagttccagcgttatgaagggctgatgagcccggagatcaaacgtcagggcctgccgttgggtaaccagcacgtgcagaaaatgcaggccgcaatggcggccctcgactggatcagcaaagttggtaaattcaaagatctgtggggcatgctgaaaaaagctgagcataatcagctgaaatatgatcgaatgtatgccccgcttatccgactgattgaagaggtactgagcggtggaagacggctaaacgagttgacgcgctaccttcaggacgctctgcaattatctgacggtgcggtgcaaaatatcctttggagctcgccgcgctcaattatgtttgagtttctcccctccctactgcgtaacctcagaacgcgctggtcggttaacggcgtggagtgggccggtctgcgaccgagtcaaccgaatgacgagagcgaacaacatcggagcaattcacccgctccggaatatatcccgcaaaatctgttcagcgagttgaatttgccggaactggacattcgcctgaagcgtggacgtgatgacgaagaacagtgggaaaccctctcgttctggcaggggatgcgtgagtttgcgccagggcgtctgtctaaacgctacgccattaaatcgaacaaaagtacggattggctggttccacaaacctacgagccggtggcaggagaagggcggcaatatgttgatttccagataagcgatgcgttcggcgatagctggcaaaaagagtgtgaagtcgagtatcagggaaaaacgatcaaggttgttaaaccgtcaaaggtcatgaccacccgggctgatattcgtcgtataaatgataaaagtaatgcgcaactgcagtgggtactccacgtcattaaccctgcggttgcgacgcccgacgaggtgccaaagggaccctggaagcaaactctgcacgatatcacgttttacaaccaccagcatatgacgccgctggaactggttcgcttttctaccggatcgcaggcgtcgctccggttcagaaataaggaacgggctcacgttgatttcacttggatgaatggagaggaacaggttggcgtaggaagtcgtcaatgggtggatgcaatgcgtttgcgttttaacctctcgtgtgatgacgtgatgggcctgctgcatcaggcagaaatccagcgaggcatgcgccccgtttattttcaacatcttgtaaggcagtcatctgaatttgaatttgatagctttaacgcggactgggttattgaatgttttatggctcagcttgcggagacgttggcaagcggcgctcacacctcggttgagtcggcgctgcgagaaatggcttccgaaaaagggatgaaaaggctggctgatatcccggccagcctgttccagccggataccgaaaatgaggctggcactgaccaagcgctacagatcggcctccataaactccttgaaagaccggatatacagcaactgctgttgaactgcgcacaggcactctggaaacccttggctgagatcggcggctttgtcgaatgggcgcggcaggtattagcggacaccttggctgcgggtgtgcagcaaacgctgagtacgctacttccggatgttgatgagcgggcggtcgtgacagactcctgctggatgagcgatctccgcacgggagcagaatggctggaaatctggctctgcgagatggagtcaggcggaagcgggattttgatccgtttacagaagaagtgggctgaagaccctgtatccttcctcaatgtgcttgtgcgaaatctttcagccagcgactacgagcagatcgattacgatctgcgcaccgtgttgcagatgctgcaaacagattacgcgcttcgtatggcgatctctgccgttcgtgaagccagtaacatggacgcccggcgggaggcgaacaagaatcttcatttgctgctttcacagcgcggtttgcgcctttcccacagctttacaacggtgctgtactcgcggatcctgcgggcgggtagcggcgatgacacagacgcccagctttatcagctactgtcggactggtcgtctcttgaaacaagaatgggtattgagttcagtatgaataccatggcgcacgcactggcggtgaatgcgcttggcgtcaaaaccgatgcatccttagtgtttaacgcgcagtgccggaaccaaaacctgctctggccgcgtggttacacggtccggcaggcagaactcggtttttacaatatattttgctcgcgtaaaattacgactgagcgcctgcttgccggcgcgctatttagtgagcagatcgaaaagatctcccttgatgaggctgactggcttgggcaactgcatatggcgttgtgtaaagccggtcgagctgagctacaactcacgcgcgcgcagcgaaatcaattacatcaggtcattaacaccgtgcaaattgaacccgtcgatcatttaggactgctgctatatccacgtcttggtgaagttcgtcgcgaacaggatgtactcattttacgtattgagctgccggaggcgatgcaatga

SEQ ID NO: 374185 - DNA, 735 bp, Salmonella enterica
atgacaacgcttaagacccaatttacgcaactgcgggagcagtatcagataaaacagcaggttcagtcgctggaagaggtctacgatcggtaccgcaccatacgtgacggcttgctggatgttgccgaaccgctgcaaaaagcccaaaagaaatttgaggtgatcggcatgctaccggaaccacattccactatcgatttttcgcaagaggcggcgcttttcggcggtgccaaaacgcagttggatgcgttgacggcacgcttcaaagaaagtggcgataaaaccgagcagagcgttttttgggaaacggtgcgggttctgaagagtgtacaggaaagtgttgatgataaggtggatgcaacctggaaagcgtttgttgccgatcttgaagcacgcgcaatgctggattccgtctttctggaacaacagcgcacgctggggaacgtgttggtgtatgacgattatcgcaaagcgcgcgataactttaatcggcagaagttaagcggaccagacagcctgtcggtggtaaaaaacctgcagaagtatagtgatgagatggtcgcgcttaaacgttcaatggacccggatgcaccagacgatgttctgcgcttttttgaggcgttggacagacataatcatgcctcgcttacgctgctgacgccgtgcgtgattgcctggctggaagaaaaaggtatgctgccagcgtttaacgtgacacgtaagagaatgatttaa

SEQ ID NO: 374186 - DNA, 3153 bp, Salmonella enterica
atgagaatgatcgattactggccttccctgcaaaatatcaatgaatgtattcgcaccgaggcggaagagctggcggagtacaccttactggcagtgcatcaaccggtgaatttgctgcgtctcgataaagacggcaacaacctcggacatgcgaaagaagaagatttgctcaagcactttctggaaacgccgcgcccaattccgattgtgggcaaagccggagtgggtaaatcacacatcatccgctggctggatgcgaaacttcgactgcgtaaggagtacaaagacaagaagtggcatattgtccgtattccaaaaagtgccagcttgcgtgaggttctcacctctatgctggcgggcttggagggcgagatctttgacgaagcgcgggaagacatcaataaggtgtcggaaaaacgtacgcctcgcgagatcgctgaatggctgctgatgctgatggggcaagagctgcgtaacctgcatgaacgtaacaagcaggatatggaagcgctgaaaaaacagatggcgggtagtacgcctgagcagttaatagctatcaaaccacaggcgacccggctacagaaaatccacgtccacgctgaagataatgcattgccaacgctgattaacgatgcttacttcaagcagtttttgctgaaagaagagcattgtctctatcgccttgccaaccgtctgaccaacggtgcaaccagcagcgatcttgacgagggggaacagcaactccaggccaaagatcttgatttcagctttaatattaacgatctcagtctgcctgcgcgtcagtatattcagaaaagccgcctgaatacgcatgaggacgggcgcaaagatgcttcggagattctcaacctggtgctggttaaagcgacgcaggcgctgtttaaccagctcttcaacttccgtggccgcagtttctctgacctgtttacccagatccgtcaggcgctacatgaaaagcagatgacgctgatggtgctggtagaggatatgtcgctcatcaccgcgatcgaggatgtactgatcgacagccttgaaagggaagggatccgcgacgggaaagaagtgctatgcccggtgtgttcagctattgctgttactgacggttatcaggggtatgcccgccgtcgtcaggggatgctggatcgcgcgaagggtgaatgggtgatcgaagaggtagggagcgggcgcgaagagacgcgactgcgtattgtcgatttttgtggtcgatacatcaacgcggcccgctttgggggggaagccttacgccagcgttgggagcaatctgctgataaatcacactggccacctgactgggaagccagcgcaaacggcgacgaaatggctgaagtgtttggtcgcagcgagcaaggcttttcgctgtttcccttcaacacaaatgctatccatgcgttggcagagacattctgccgtgacgatcgcaacgaattaaaattcaacccacgtcagatcatcaaccagattctgttgcgtgtactgcagcactgtcgccgtgatgccgatgagggacgttttccgccgccgcatcttggcgatgttgcggcgccagcagggcttcgaagctggctgttccgtcagggcttcgccgacaccgagcgtgctgaatccgtggtcgcgctgtggggttatcccgccgattccgatggcactctggcaagcactctgccgcctgatgttgcccgcagtttcggtctggacgatctggcgcaggtgttggaaaacacaaaaagtgctccggtccatatgcagccggtggtgcctacgcgggtgaccaaagttgagccgcaggttaaaaaaactgttaagccagaacccacaacagttaaaccgaaagtgatagaagataaagatactttggctatccgagcgctggatgcggcggtgggtgactggatgctgaaaggtgcgacgcttgagatcgatcccgcgcgttatatcaaaagctccctggccttcttctttgataagcgcgtcgtggcggaatgggctggcagtacctatcggccaacactttggttaggtaaatccaactttgtcgccgttgagttacctaacgcacagggcaaccgtggcgtgcatgtggtgaaatttattcctcaggccgaatacgataagcgctcggtgcaactaacggatgccgcgatggcgttagcacggtttggctactacagagaaaactccttatctaaaaccgaggactggagctacgcagatggcaaaacggattacctgattattcagagcttctgcgatcgctgggttaactatgcgctgacggaactcgttaagcataagcgcaacgatctgccgctgctgctcagcgagcagattgcgctggccgacgcgctgggcgccattaaaacggcggatggttcgaaagaggtgcttgctcgactgctgcaaaacagcaaaacgctttctgtgcagtttcgttccgggatcacgaaggcaatcactgaactgcgggcagaggcattagcgaagtgggatgatgcccaagacgcatggctcagccttgtggcgctaaacgatcatgcgctggaaggcgatctcctgctaagtgcgatacaaaaggcattgaagaaacgctcaaaaaatacacatgccgccgtggtgaaaaagtcgctcagtgaaatccgccccatactggataccgctgctctgtttgccgattgtgaaaatgcggatgatttttccgaactcgtcaccggtttggctacgttagttaaatctcttggggacagcggcgattatcctgcggatatatccccggacagcagcacgctgacggattcactgaatgcgctaacggagggggggatctggatgacgatcctcaaattgcgaggcattaatcaatctgaagatccgctgcgtcaatggcaactactttgcgaactggacggtgttttaattaaccggctcatgatgacaatgcaaagctggcagcaggtacacaaacgtgtactggcgaatattaccgcctacaaccattcacacggtgggcatcagatcagcgaatttcgcacgcagattgaaagcacgttgcaggaacttcatcaggtcctcgacgccatgcagtccgttgcaggggaacagtatgacaacgcttaa

SEQ ID NO: 374187 - DNA, 900 bp, Salmonella enterica
gtggcaattaccaacaacgctgccgcaggaagccagatccgtctgctctgcatgatcgatcgggtgctgaatcggcgactcggagaggccatcccgatggcagatttgattgaattactgcgcccggagatgctgcccgtcagcgatggggcgagaaaacgcctgcctgccgaagtctctttctgggcaaaagaagggttatggaaaaatgagagcgctggcctcagtcaacagtcgccactttccagcgaacgtaatctgcccgcacgggttttgcgtacgctaattgacagtgagaaaacgacgccgctgctgaccggaacgcgcggccagcccttgctgatgtgcgttacctccatgctggcgcaggacaaatatacgatccgcggaagcacgccgctgacaaaagaggcggtgccgttggccgttggcccgatgattaacaataaattagccggtgaggggcgacgtaacctcaacgtctctaacgaagcagagccattcctcgattactcatatttcctcggttttacagaaccttatctggatggctgggtgatggacccgacccgcgccattgaaggggttttggataacctgtcgcttaccgccgcgatgccaattcagacattcctcagccaactggcagagcttctgccaatgctggatggaggggcctaccgccagcaggttgaaccgatgatctccgctgacaactggcaaccgctggagaaacatatgatcagcgccgcgttgagccaggcgctgctccggcttgaactgacaatgcagttggttttcaccactcgttccgatgaccttgacgccatggtcctgcaagctccggatggcagtctacgccgtatcagtaccgtgagcccagggggggcaagaaaatga

SEQ ID NO: 374188 - DNA, 2451 bp, Salmonella enterica
atggaaaatcaatggcaacaacttcgcgcggttctgaatggagaacatagcgaacgcgatgggctgagtggtcagttttttaaccgcctgctttactgtctggatgatgtacaggcgggagaatgcgaccgcctgcacgcattttatgatgcactgcaatgcgcacgggcatttgggctgatgccgttaaggctgccgtaccgacaccttaccgaaggcgtaatgctccagcattttggtttgagacgggatcgtgactacccaggtgaactgtttctgacgtgcgaagcggaagagattgatccctccctcttaccggtctggaaaggcgagcagcgccgttttctggaaaccccaccgctggatgtccttttgccctctgtactcaacgatccgcgttatacgcactacacatctgcagggcaacagcaggcggtacgcacggtgttgaccagcgacagagataaaacgctgctggtgaatctgcccaccggagccggcaaaacctttgtgattcactcccagatgctgacttcaccgcgcaggctcctgacgctggtgattgtgccaaccgtagcgctggcaattgaacaggctctgcgggcgcaagaggtgatgcaacaggccgggcaggatcacggtggcagctacgtctggcatagcggccagtcgattgaagaacggaatatgatgaagttgcggctggcatccggcgagcagcgagcgttattttgctctccggaagcagcgacaggcgggctcttgttacagctgttctcgcttgcggagcgcggactactgggcgccgtgatagtagatgaagctcaccttatcgatcaatggggggcggaattccgtcccgagtttcagctactggcacccctggtgcgaacgttgaaggctacctcttcagacggtgtcaaagtcgttctgctttctgccacgtttagtcaaagcaccctgaatacgctcaaagcgctctttgccggtaaacgacaggcatcagtgattgaagtgaacggcagttttctgcgtccggaacccgtgtggtatgtcagcgaagctgtcagccacgaggattaccttacgcaggtggaaaacgccattgctcgcttgccggcgccaatgatcctctacactaccgaagtggaacaggccaaattctggtaccagtatctacgtgagcgtggttatcggcgatgtggattattccatggtgcaacgccaatgcaggaacgtgaaggtcttatccacgcttggcgtaacgatgggctggatatcatggtggcgacgtcggcatttggcgtggggatggataaaaataatgtccgttccgttctgcatgtcgcagtgcctgaaaattttgatcgtctttaccaggagagcggtcgtggcggtcgtgatggtaaagcatcggtcgctcatattattttccatcacaaacaactacagatcgcacgcaacattaaccgaaccaaactgatcggggccagcaaaggatatttgcgctgggccaagatgcaccagttgcgcgagcagcatcaaccgggtcagttcaccgtcccgctatgcgcgaagcatgccgacattcgcatggattcgcagagcaatctggactggaatctgcgtaccttactgttaatgcagcgcgccggttttattgatatcacctatccaccgccggatcttagcgcaatcgccccggacgagcgtgatgagtccagggtccatgcgtggtttgaccattatttcaaccatattcagatttctgttctccgtgacggccatatggatgaagcgcagtggcagaaggagattcaggcccaccgttcgcatgaactggcgatgcgaaaacagggatttagcgcgttagaagggtggctcaatgaccccacaatatcgttgtgccagacgttagcgcaattttataccctcgatggctttgtgccggaaatatcctgtggcgggtgtccggcctgtcggagtaaagggtatcctccctttactccgacgctcggtcgtatagcacacgtgacgggcgagacgatgcggaacgtcatgggaaatgagcaacgcgtttattattctactacgctgacgaaccgattactgctgcgtcagtggagtgactggattgcccgactgctggccaatcgccagattcaggctatccgcgccagccagagcgtgctcgcccggcttggtgaggttctgcccgcaggtttgcctttctggtgttcacttgccgttgatgaagaaaacacctgctgggatgaactggtactagtgttgcccggcgaaacgatgcctgaactggatatcttcgccagcatcaatcgcattattgttgcaccggaacgtttacaagaaccgggctaccgcgggcgtcgctggtgggatgttgataccggtgccgtggcattagaacaatttcagaggaatatcagctag

SEQ ID NO: 374189 - DNA, 3057 bp, Salmonella enterica
atgactacacatactggcgcgttttccgaaggtgacctagtaacatcgtcattatttgacggtattgctaaaattgtgagcattctctctactgagcgtgcggagatagcttggttctactctcctttagaggtggaggttaaccgtcaggaggtggacattcacacactggcggttgctcctctatatgaggagagcaccatttacttccgctcaccagatagcggtatctggtgcaggggccgatatggcgggccacgaccggacaataagcatttgctgattatccgttcgggcgaccacgcggtcgttgatttggcggagatgtactaccccaactatgggcaagggcaggcaatgaaccccgctcattttctggcggcacgctcaaatgatgccccctatttctaccccctgcgggaaaaatttgtcagtgcgtggatcaaacagcgtgctgcctgtcggtcaatgtcgtcgttaatcagcagtcgtgtagagattgaacctcatcaaatagcggttgttcgccgcattcttcaggaccagaaccctaaatatctgctggcagacgaagtcggattgggcaaaaccatcgaagcgggactggtcatccgcgagcatattctggaatgtaaacgtgaagcccgcgtactagtggtggtgccgcaggtattgcaaggacaatggacgcaggaactggtcgatcgctttgctctacaggaagtaatgagcggagggcgaaacaaccagatccgcatgtgctctccggaagaactttgccagccagaactgatcggctggaagcccacaatgatggtaatcgacgaggcccatcaattagcccgacaggcatgggtcaatgatgaagacgaacaggcacagtatgccgcaatgactgcgttgtgccatcaggcccgcattgtgttgctcctatctggcacgccgatgcacggtaacgaacgtcacttcctggcaatgctgcactgcataaatccacaggcgtggcaacttaatgctgtgggaatcgaaaaatttatgcgccgcgtggcagagcgcgagcgtctggggggaatttacagttccttgacccctgaaacgccaaatggggtactggaagaggttatcgaagagttacgtcagctttttgctgatgatgagcaactgcaggcgcggattgatgtgctgagtcctctggtcgacttttttgctcctgatgaaagcgaagagcgaacagcggccattctggtattacgccagtggatcggcgagcgctaccgtctttttcatcgcttgctacgtaaccggcgtgaagatcccgcgttggaatatctctttcctgggctggccggcctggaaaaatgtgtctggcccgtcgcctcgaccgagctcacgctggatgaaacctttgatgcctggcgtgccgcagccttacgcaatcccgtgcaacaccaacatctagatgccacgacgcttgataaatgggtagatgcgctatttctcaacccgctggtgatgtcccgcctggctaaaaatgcactggcaaacgggactgccagcgaagaagagtccaattttcttgagcagattattgaaacgtcccagcaagagcagaaagccaaagatgcggtgctaatgaaggcgctgaccggttggtttgaaaaatgtcctgatggcaaagcggtcatcttttgcggtgaaagctctgaagccgccttcctatctaccaaactgcaaattcaggccccctgggcggtggttcgtcattcgccggacttgcgtaagcagagcgaacttccggatgacagttggcaggtactgatctgtgacaggcgcggtgaagacggactgaatctgcacggaaaaaatcgtcttgcggtccattatagtctgagccgcgactttaaccgttttgaacagcgattggggcgctttaaccgctattctggaaatctacgcggcgttaagcctgtgaaaagcctgattttactgccggagcgtgatgggctacgtgctgactgggtgaaactactggacgaaggcacgggattgtttcatcgaagcgtcgccagcctgcaatttgttctgtctgaacaattagagatggtatggcgtgattacgtcgggcaggggcttaccgtcttccatgaggcgcaacagcgcctttcgggagaaaacggcttcatcgcccaggaacgtaagcgcgttctggctcaggaaaacttgttatccatggagcaggaggtcatcgctgcacgcgagttttctgagcaactggccgaatctgaagatgaggctgaagcgcaggcaaaagatatgctgacctggatgcgcaaggcattagggtttaagcgagagcaatattctgaaggaggatttcgtctgcgcttcgagcgtggcgaatatcaacggcaaacgctggtggacgtaggaacgtttattgataactgcctgcttggtctggatttttcagaaggataccccccttccacagcgttgatgagcttgtctcgaacgaaagccggtaaccacaaacacgtttaccccttgcgctatggacagccttttgccgaaaccgtatggcaactgatgcagagcgatccgcgaggagcaagtatggcgctgcttcgggttctctccccagcggttgcgctgaagcaaccgcgcacctggttccatttccagtggctgagtgaagcgcaggttgaaggtgaaaaccagctagccgcgcagcgtcgtggtgatgagtgcttcagcccggaggttcataatttctggctggatgacggtggaaaagaggcggatccgcaggtcgttgtttccctgctggataaaccttacgatgaagatggtaatagcttgttccaggatattaatcttcgggaagaggcctggatgcgaatgccagattggtttgagccgcataactggaaagagaccgtacttgctgccgcggagcaggcccggagaaacgtggatgctcactatggcgatcgtcccgtccgccatcaattgcttgcaatgaaggcgattattctgtgtacccgcgacatgctgtaa

SEQ ID NO: 374190 - DNA, 1128 bp, Salmonella enterica
atgagtgagttccgtgtccccgctttgcgtatccggcagggtgagaagagacaactttttagtctggctattgaaggcaaacaaattaataaaattgccgccatttcacgtattcgacgtggagatgaaaacctggttgggtatcagcgtccggaagtacgtagccatattaaggaaatccagcgctacattgaaagctccaatccaatgattcccaatccagtcattattgcttttgaccagcgtgttcgttttgaaccgttgatggaaaacagtgatatggggcatctcgttattccgtattctgaagacgctaacttcgagaaaccggggtttattgttgatggtcagcaacgtaccgctgcgttacgagaagcggacatcaactcttttatgatgccggtctctgcgtttatcgctaatgatgcagaagagcaacgcgaacagtttatgctggtgaattccaccaaaccgctgccaaaaacgctgttgtacgaactggccccgcatacgcatggccgcttgccttccgatctgcaactgcgaaaattcccttcacttctgacacaacgtcttaactttggtgaggggccattggctgggcgtattaaaacggcgaccaatccggatggggtgattgctgataactcgatgataaaaatgatcgactcgagcttacgtgagggggcgttgtatcgcttccgcgatccggcgactggtttgggcgacgaagcgaagatggtgaagttgctgaataacttctggtcagctgtggaaacagtgttcactgatgactgggataagaagcctcgcaactcccgattgttacatggtgttggaattcttgctctcggtagtcttatggatgaaattgaccaggtgcatcaggattacaaaggtgagcctggctggaccgagatcccttcctatacccgttttgtcgaagagttacatcgtatcaaaccgctttgcgcatggagcagtggtgtgtggaatttaggcacagatattgatggtcagcctatcgtccgtaagtggaatgaagttcagaatttatcgaaagatatatcgttggttacagattatttggtaaccaattatattaaaacagctaatgctgatatttaa

SEQ ID NO: 374191 - DNA, 1251 bp, Salmonella enterica
ttgtcgaagctaaaatacttttttcccgatagtcaggattttatcgatcccagtttcgacttcgttcgcgaaacgcgcaacgagcatcgcgttcgtcagcgtgacgaccactatccacatgaggtcttcccacatccttacgatggtatgctggtatcaaaagcagtggttgacggtctgggcggtggggaaagtaaatacacccgagcacagcgtttacgctacttccgtaatggaatgaaacatttctttcgtctgcctgataatatgcagacgatgggtgactgtggcgcgtttacttatgtaaatcaggatgtcccgccgtatcgcgttgaagaagttattgagttctatgaaacatcccgtttcaactatggggtttcgctcgaccatattatttttggctacgaaaaaccgggggaatcgttctctggcgaggtgctggcagagtgtcgccgtcgtcaggatattaccctaactcttgcgcaggattttttagtgaaatcgcaaaagagttgtttcacgccgtttggcgtagcacatggttggaacaagaagtcttaccgacagtcagtagaagcactgttggcgatgggatataagaatatcaccatggggggtatggtaccgttgaaaacggcgcagatccttgaaactctggaagagattaaaccgcttctcaaaagcgacacccaagttcatctgctcggtattgcacgtccggagagctttgcggattttattcgtcttggcgttaccagtattgactctaccacaccgcttcagcaggcgtttaaagatcgcaaaaacaattaccacacgccagaaggtcgcgcctatacagctgtgcgcgtgccacagttcgatgctaacccaagcctcagccgtaagataaaatctggagtgatcgaccaggatgtggctcgtcatcttgagaaagatgctatgcatgcgctgtttgagtacgataacaacgctttatctctggagaaaacactggaagccgtgttggcctatgagcgtctgcactcaggagagaaagaggcagagaaaatccgagccgattacgaacgtactttgggcgatcggccctggcggaagtgcgagtgcaatatctgcagatccattggtattaacgtgattattttccgtggcgccgagcgcaatcgccgccgtggtttccacaatattcaggtactgtacaatcgcttgcagtacacattgtcattacgctcagaggataaatcatga

SEQ ID NO: 374192 - DNA, 957 bp, Salmonella enterica
gtgagccaaattaatctgataacaacatgtacaaatggtaagcacagtaacggttatccgatactgaatctcgcaacgtggtcaacttctctttccagttgccaaaatttaatccaggcatggtgtaaggtcgttaattcgactatttctgctggacatactttgcctgttgagaaactgtataaaggtggacactgggcgacagcaatctctatccatgagaaatatccagttgaattatgggtcctttctgctgggctaggactactaaaacgaggcgataaggttgtaccataccaggcaacttttgcggttggtcataatgactctattccattattcaatgaatcctataaaggaaaagaatttcatcagagatggtggtctgaattaaataaacattcaccatttcaggagaagcatcctgtttcgttgactgaactaatgaaggccaaaccaaatgagtactttattatttgtggttcgcccgattatataagtgccattgggccagatgtgacctctggtttatcttatctgcattcagcagaaaaacaggttttgataatatcttcctctcgagttaagtcgccattaaatcgttatttactggaaagtaacaagcgaattgctgaatggctaaattgcaacatgctgatgctgaatataaaaatcgcgcagtatgtaatagagcagtttactcgagaagaatatgaaaatttgggattattagccgataggttgaataaacagttttctacgttgccagcggcctgcaagaaacaaggcgtgcgcaggactccggaagaggtcgaagcctgggtattacaacatctcaaagaggtgcctgataccagtgcatcacgtgctctgcgtgtctttcgtgatagcggcaacagttttgaagagaagcgatttcgtgccttgttccacactgtgcagttgcgcaatcagtaa

SEQ ID NO: 374193 - DNA, 234 bp, Salmonella enterica
atgttgtcatttgatacgaaggccgcgttggaactgatctcacactctgctggtggctttagctatgacactcttgccagagcattgatttcagataaaaaagcacaaccttcccaacaccttttgtctgattgccgtgagttttgcgaatccctagagtcgcaggggattattcagcggtgtgcatcctgtcgcgaagttcaggatgtgtattacgaatatcgtgctcactag

SEQ ID NO: 374194 - DNA, 150 bp, Salmonella enterica
atgcccccacacaaaatccgccaggagtggctgacgctggacgagatgaccctggcccaaattcagtacagtgctaaatcagagatcttcgtctttctgaccctggccgaaacctcgagatacaaaccaccgccatcggccattttgtag

SEQ ID NO: 374195 - DNA, 765 bp, Salmonella enterica
atgaacgatcttttttcactggcagataaaaatatccttatcaccggagccgctcagggaattggttatttgctggcaaccggtcttggtcgctatggcgcgcgcattattgttaacgatattaccccggaacgcgccgaaacagccgtgacgaaacttcagcaggaagggataaaggctattgccgctccctttaatgtcacccataaacaggatattgaagctgcggttgaacatatcgaaaaagatatcggcgtcattgacgtcctgataaataacgccggtatccagcgccgtcatccgtttactgagtttcccgagcaggagtggaatgacgtcatcgccgtaaatcagaccgcggtttttctcgtctctcaggccgttacgcgccgtatggtggcgcggcaggcaggaaaagtgatcaacatctgttcgatgcaaagcgagctgggccgcgacacgattacgccatacgccgcgtcgaagggtgccgtgaagatgctgactcgcggcatgtgcgtggagctggcgcgtcataatatccaggtcaacggtattgcgccgggatacttcaaaacggagatgaccaaagcgctggttgaagatgaagccttcacctcctggctatgcaaacgtacgcctgccgcacgctggggcgatccccaggagcttattggcgcagcggtgtttctctcgtcaaaagcttccgactttgttaacggacatctgctgtttgtcgatggcggtatgctggttgccgtctga

SEQ ID NO: 374196 - DNA, 276 bp, Salmonella enterica
atgttcttccgtattttcccccttctggctggatttttgctcagcgtaaatacaatggcagccattgaaattgataatcgtcaggccagaaatatggacgatatacagagcttaggcgtgatttacataaaccataatttcgcgactgaaagcgaggcccgccaggcgctgaaagaagaaactgatgcgcgaggcgcaacgtactaccatccgattttgttacgggagcccggtagtaacggcaacatgcatgccagcgcggagatttatcgctag

SEQ ID NO: 374197 - DNA, 558 bp, Salmonella enterica
gtgtctatcaacggattgtttgttaaaactgacccacagcggcgtcggtatggagtagctgcgttaattggttttgcagcgggtattatttcagcatttgtaaaatggggcgcggaagttcctttaccgccgcgaacgttttccggcgggcgcgatgagtttaatccaccgtatatttttttgcgggattatttaggcattgacccaacacaaacggtttataccttttctgagcatgttattaaccctgtgatggtaactcacattatcttttcgctggtattcgcaataggttactgcgtcgtcgcggaaattttcccgaaagttaaattatggcaggggatactggcggggctgattgttacggttgtcgtgcatggcatattctgcccggcgctgaacttaacgcctccgcttacacaacttccttttgacgagtacgcttctgaaattctgggacatgtattttggttttgggtgattgaattaatgcgccgcgatctgcgaaaccgcataacgcatgagccggatgccgaagtgccattaacaacccgataa

SEQ ID NO: 374198 - DNA, 399 bp, Salmonella enterica
atggactgcattgtcgtaaaaatccgacaaaatgacagcgtcataaacaaaactgtcttcctggcgctgggtatcaacaccgaaggccagaaagctctgccgggtaggtggctgaccgaaaatgaaggcgcaacattctggctgaatgtgctggtggagctgaaaaatcgtggttttcaggacatcctgattgcctgtgtggacggcctgaaagactttccggatgcgataaacagcgtctacccgcagacccatatccagctgtgcatcatccatatagtacgtagcagcctgaaatacgtgtcctggaaagactacaaggcggtcaccagtggtctgaagacggtttaccgaagaggcggcgctgatgatgctgaatgtgttcgcgggcgtgtgtga

SEQ ID NO: 374199 - DNA, 291 bp, Salmonella enterica
atgatgctgaatgtgttcgcgggcgtgtgtgacgataaatacccgcagatcagcaaaagcaggcgtgcgcacagggaaaacctgaacacattattcagctacctgccggatatccgccaggcgatctacaccacaaacgctatcgaatcactgaacagtgtgatccgggccgagataagaaatgcaaggtattcccgggagacgactcagtgtggaaggttatttatctggcgatcaaagatgtctcaaaaaagtggagtatgccgatccagcactggcggctggcaatga

SEQ ID NO: 374200 - DNA, 1182 bp, Salmonella enterica
atgtctgctcgccaggtatgtcaaaattttttctgcggcgctttagctccgtttcacaaatatcgacaaaatgctttgctggacgccaccatcgcacttatcaatggcgcatctctgacgctgaccagtatcggacgttatttaccaggtactgctcaggtcaaaaataaaataaaacgtgttgatcgtttgctcggtaatgtgtctcttcatcacgatatccccctgattttcagaaatattatttccatgctgacgaaccgactatcactgtgcgtcatcgctgttgactggagcgggtatccctctcaggagtatcacgtactccgtgccagcctgatttgcgatggacgttcgctacccttgctgagctggatagttccttcggaaaaacagcaaaacgcaaaggtacagcaagcttttcttaatactcttttcgaggcggtaaacccaaaagcaagggtcatcatcgtcacggacgcagggttccaaaatgactggttccggcacataaaatctctcggctgggattttatcggacgcatcagaggcaatgtccggatgcgtttggacagcaagggggaatactggttccggcgtcaggaattgcaggccagtactaaaccggaatatctggggccgggaatgcttgcccgatcaaaatatacccgatgcgatggtcatttttatttgccgaaaggacggaaaaataaatgctctcgctgtggtatagccagaccatcacagataaaagatgcccgctcggcggcaaaagaaccgtggttaatattcagtagcacaaacaactttaagccgcgagaaatcatgaagttatacagtcgccgaatgcagattgagcaaaacttcagggatgaaaaaagtgaacgttttgggttcggcctgcgtgccagctacagccgttcggcagaaagagtgctggtactgagcctactggcaacactgagcacaatagtgctgtggcttatcggctatcacgctgaaaatcaagggttacatcttaggtaccaggccaatagcattaaaacacggcgtgtaatctcgtatctgacgttagcggagaatgtcttacgacactccccgctaattttaaaacaaacggtgctaagcaccgttcttaatcacctcgccagaacctaccagaatatggtgttggtttattag

SEQ ID NO: 374201 - DNA, 1455 bp, Salmonella enterica
gtgttaaataaaagcacggtggctttatatttgatcttctcattatgcgttttcgcgctttgcctttatatttccttcaataacccagttacatctgatggagcatctttatttttagaagcaaaagatatggcggatggaaacattctgctacgaggatggactctttctactgtatcgttttatttcactgaggcgatatggtatatgatagtaatcagggtttttggtgacagtatatacctgatgtatgtgttaccagccgtattctacacgattactattatgctggcctttgctctgtcacatacagatgggaaaatgaagtggtcaatcgcagcgctaattccatgcgtaatcatttcatctcctatggcgtcaaccatgacactagagacatgtgtacatgtaggaactatcatatttgctctggtgtgcttaaatatgcttaggtatgataaacatacaacaattaaactggcatgcgtcacgactctcactgctgcatctgtattcagcgactcgatattcaactactatatcactataccgatagttgttacttttattgttcatgtattgataaacaaagactttagcaagtggcgctatgtatttgcagttattgttggtgttgccatagcaaagtttcttgctttagtggcaaattattttggtctactaaacacccccgggactcaacctccagcatttgttaactacgagaatataccatctaacctcaatcttttcattgttggcatcatccagtatttcgacgccttcattttcggaaaacagctttctgcaagcaatgtgatgatatttagtagatttgcagtgatgatattttggttagctcttttagttgtagctattaaaaacaggtttaaagcttcgtttgttgatactgcattatccatttcctcagtattgctaccagccgcatatgtagcaagtaatatgcctgtagaccttggcactacaaggtatctggttttctcttttattactggatccgctctaattgcacgttatctaaattcacaagccgatcaaagactctatgcttttgcttcaactatcatactgatttttattttcatcccaagcggaagatacgaactaccgaattcgagagtacaagatattagtaactttgttcgtgataataacctcggtgatggttacggcacatactgggttgcgtctgccgtgactctgtttaaaaacggagacgtaaggccaatcacgtttactgatgaaaacaaagcggttaggttaaactggctgtccaataaagcatggtacggttttaaatcaagatatatcgtcacagagttcaagcatgatattgataaaatattaaaccagtatggacgggaggggcatataaaagagattgataacgcatatataatttactatgatgatgcaaggattgttatagagtag

SEQ ID NO: 374202 - DNA, 927 bp, Salmonella enterica
atgaaaatctcgttagtcgttccggtcttcaatgaagaagccacgatacctattttctataaaacggttcgcgagtttgaagagctgaaaccgtatgaagttgagattgttttcatcaacgacggaagcaaagatgcgactgaatcaataattaacaaaatagctgcatctgatccgctagttattccgctttcgtttacgcgaaacttcggtaaagaacctgctcttttcgcgggtctcgaccatgcaaccggggatgcggtcattcctattgatgtcgatttacaggatccgatagaagttatcccccatctcattgagaagtggcaggctggcgcagatatggtgctggctaagcgctcagaccgctcaactgacgggcgcatgaagcgtaagacagctgaatggttttataagctgcacaataaaatcagcaatccgaaaattgaagagaacgtcggtgatttccggttaatgagccgtgaggttgtcgaaaatattaaattaatgcccgaacgcaacttgttcatgaagggggtgctcagttgggttggcggaaaaacggatgttgttaaatatgcccgtgccgaacgcgtggccggtgattcgaaattcaacggctggaaattatggaatctggcgctcgaagggattaccagcttctcaactttccctctccgcatctggacgtatatcgggttagctgtcgcaggtgttgcattcctgtatggtgcctggatgatatttgacactctggcgttcggtaacgccgtgcggggatacccgtcacttctggtgtcgatactgtttcttggtggtatccagctaatcggcatcggtgtactcggcgagtatatcggaaggatttacattgaaaccaaagcaagacctaaatatattttgaaggggaagaatagtgttaaataa

SEQ ID NO: 374203 - DNA, 246 bp, Salmonella enterica
atggaatcccgccaattatccgccacggcgcatgagatgatgaataacggtgacgccttcgcgcatcagcaaatggctcagacacagaaacccagcgccccgactactgtggaaaatgcgacacccttttctgaaatggacgactatgaaaaagcaatggtcatccatcaatcgatgaataatgcccattctttcgcccacgagatccaggctgaggaacaccataaacagattaaacgcaattag

SEQ ID NO: 374204 - DNA, 192 bp, Salmonella enterica
atgacggtagcggtgattatcgccggtctgctgccttttttatggggggctggcgcgggttctgaggggatgagccgtattgccgcgccgatggtcggcggcatgattaccgcgccgttgctgtcgctgttcatcattccggcagcctacaagctgatgtggctgcgcaggcatcgtcgccttgcggcataa

SEQ ID NO: 374205 - DNA, 1929 bp, Salmonella enterica
atgaataagacgaaagatatagccgcatctcctctctgttttgtctctccttaccctcaactggcaaaggctgccgaggcgctggtcgcgcagttggattacgccgtcactattcatcaaacgacgcttaatcgtatcctggatgagctacctttattagagtcccgtgggcaccaggtactgattagtcgtggcggctgtgcggaaatattaaaaaagcacagtaaattaccggtagtcgaaattaaaatgtccggctacgacattcttgatgcgcttatcccttttaaaggacaaaaaggcactgtcggtattgtcggcttttccagtgtgatcaaaggatgcgcgcgcgtagcggaacagttaaatattaactataaaatttttaccttacagggaaatgataaagaaacgatttcttgcctgaagcggcaattagcgtccacgccattagattgcattgttggcgataccgtttgtcaggattatttttcaccgctgggctcgcaattccgtttacttgattccagccccgcctcaataaccgaagctctggaagaagcccgctcattatatcaggcttttcgcagccaattactggagcgccatcatctgcagctgattctcgatcagtttgataaagctgttatcacgcttgatgataccggcgcgttactgcattacaataaatatgcgagccaactttttaaagttaacgcctccggtgaaatttatgacgcgtctttcctgaaacaggtattgcaccaggagcggcatacattacgcgagggaaaaaccgtcagcgcgaaagtcgtcgatacgccgcaaggcgcgatggtggttaatctgtatccggtatttgcggccagacagttaagccgggtagtgttgacgatgcaaaccgtctccagtttacagggggcggaacatcatgttcgccgccaggaactgtctcgccgcggcttgagcgcccgctatcatttcgacgatctgcttaccgaaaacccggaaatgctgcgtcgtctggcgatcattaaaaattatgccggtacggacgcgactatcttaattaatggcgaaagcgggacggggaaagaggtgctggcgcaaagtattcataatgccagccaacgcgttaacggcccgtttgtcgccattaactgcggcgcgatggcccctcagattctggagagcgaactctttggctatgtcgccggcgcatttaccggcgcgtcgccgaaaggcaaaataggcctgtttgaattagcgcaccacggtaccatttttttggatgagattagcgaactggataaaccgctacagacgcgcttattacgggtattgcaggagcggcagattatgcggctgggctcagaccagatgatacctgttgatattcgcgtgattgcagcgaccaatcagacattaacgaagctcattgcggacgggacatttcgcgaagatctttactatcggcttaacgtattaaaagtgaccaccatcccgctacgcaaacgtccggaggatatcaaagccatcggcctgtcgctgcttaccagtttcagccagcattataaacgcccggcactaacgttaaccccggcgctgtggcaagagcttcagcgcttcgcctggcccggaaacgtcaggcagttaagcaatattatcgaacggctggtgctctctattgatcactccccggcaacgctggatgagggccgcctcttgctggacgatctggaagaggggagccgacgcgagccaagtacctgccacgactgccagatgctggctggcgattataaaacgattcgcctgcgtattttgagaaaattattagaggcggaaagggataataaatcgttagtggcgaaacgattaaatgtcgatcgtacctcgctgacgcgctggatacgcgagtcggcctga

SEQ ID NO: 374206 - DNA, 936 bp, Salmonella enterica
atggcactgcccattattattgattgcgatccgggtcatgatgacgcgatcgccctcgttctcgccctcgcctcccctgaactggaagtgaaagcgatcacctcttccgccggcaaccagacgccggagaagacgctgcgcaacgtgctgcggatgctgacgctgctcaaacgcccggatattccggtggcgggcggcgcggtgaaacctctcatgcgcgaactgattatcgccgataacgttcacggcgaaagcggcctcgacggcccggcgctgcccgagccgtcattcgccccgcaaagcggcactgccgttgagctgatggcaaaaacactgcgtgagagctcacagccagtcaccatcgtctccactggcccacagaccaacgtggcgctgctgctgaatagccatccggaactgcatacgaaaatcgcccgcattgtgatcatgggcggagcaatgggattgggtaactggacgcccgctgcggaatttaatatttacgtcgacccggaagcggcagaaattgtcttccagtcaggtattccggtggtgatggccgggttggacgtcacgcataaggcacagattcacgccgccgatatcgaacgctttcgcgctattggcaacccgatttccaccatcgtcgccgaactgctggacttctttatggaataccacaaagacgaaaaatggggatttgtcggcgcgccgctgcatgacccgtgcaccatcgcctggctgctgaaaccggagattttcaccaccgttgagcgttgggttggcgtggaaactcaggggaaatacacccagggaatgacggtggtggattattatttcctgacggggaataagccgaatgcaacggtgatggtcgatgtagtccgccagggatttgtcgatttgctggcggaacggctgaagttttacgcgtaa

SEQ ID NO: 374207 - DNA, 150 bp, Salmonella enterica
atgaaaaccgcaagtctctcgcagatgttaataaaactgtggttttgcctgcaaattctggcgccacctgattacacccggacattgtacagggatgggtgcgaaagttacaaatttgtagcaattattttgattggtcttgtctattga

SEQ ID NO: 374208 - DNA, 1641 bp, Salmonella enterica
atggcaatccacaaccgcgcaggacaacccgcgcaacagagtgatttgattaacgtcgcccaactgacggcgcagtattatgtactgaaaccggaggcagggaatgcagaacatgccgtgaaatttggcacttccggccatcgcggcagcgcaggtcgtcacagtttcaacgaaccgcatattctggcgatcgcccaggcgattgctgaagagcgggcgaagaacggcattaccggcccctgctatgtggggaaagacacccatgcgctctcggaaccggccttcatttccgtgctggaagtgctggcggcaaacggcgtagacgttatcgtgcaggaaaataatggctttacgccaacgcctgccgtgtcaaatgctatcctggtccataacaaaaaaggcggcccgctggcagatggtattgtcattacgccgtcgcacaacccgccggaagatggcggtattaaatataatccgcccaatggcggcccggcggataccaacgttactaaagtggtagaagatcgcgccaatgcgctgctggcggatggcctgcaaggcgttaagcgcatctctctggatgcggcaatggcctcgggccacgttaaagcggtagatctggtacagccgtttgtcgaagggctggcggatatcgttgatatggcggcgattcagaaagccggtctgacgctgggtgtcgatccgctgggcggctccggtattgaatactggaaacgtatcgcagagcattacaagcttaacctgacgttagtcaacgatcaggttgatcaaacattccgctttatgcatctggataaagacggcgcgatccgcatggattgctcctccgaatgcgcgatggcgggtttgctggcgctgcgtgacaagtttgacctggccttcgctaacgacccggactacgaccgtcatggcatcgtgacgcctgcagggctgatgaacccgaaccattatctggcggtcgccattaactacctgttccagcatcgtccgctgtggggcaaagatgttgccgtcggtaagacgctggtctcttccgcgatgattgaccgcgtggtgaatgatttgggacgcaagctggtggaagtgccggttggcttcaaatggtttgttgacggtttgttcgacggcagctttggtttcggcggggaagagagcgcgggcgcttcgttcctgcgtttcgacggtacgccgtggtctaccgataaagacggtatcatcatgtgcctgctggcggcggaaatcaccgccgttaccgggaaaaacccgcaagagcattacaatgaactggcagcgcgttttggcgcgccgagctataaccgtctgcaggcggcagcgacctcggcccagaaagcggcattgtctaaactgtctccggaaatggtcagcgccagcacgctggcaggcgacccgatcaccgcgcgtcttaccgcagcgccgggtaatggcgcatcgattggcggcctgaaggtaatgaccgacaacggctggttcgccgcgcgtccatccggtacggaagacgcttacaagatctattgcgaaagcttcctgggggaagaacatcgcaagcagattgagaaagaagccgttgaaatcgttagcgaagtattgaaaaacgcctga

SEQ ID NO: 374209 - DNA, 705 bp, Salmonella enterica
atggacagatttccacgatctgattcaatagtgcaggcgcggtccggcctgcagacctatatggcgcaagtgtatggctggatgacggtcggactgttactgaccgcgtttatcgcgtggtatgcggctaatacgccagccgtcatgatgtttgtcttttccagtaagatcaccttctttggcttaattattgcccagcttgcgctggtgtttgttctgtcgggactggtgcataagcttagcgccggaatggcgacgacgctgtttatgctctattcggcgctaaccggattgacgttatccagtatttttatcgtttacacctactcctctatcgccagcacgtttgtggtgacggggggaatgtttggcgccatgagcctgtacgggtacaccactaagcgcgatcttagcggtttcggcaatatgctgtttatggcgcttattggtatcgttctggcgtcgctggtcaatttctggttgaagagtgaagcgctgatgtgggcggtaacctatatcggggtggtggtgtttgtcggtctgaccgcctatgacacgcagaaactgaaaaatatcggcgagcaaatagatacccgcgatagcgctaatctgcgtaaatattcgattctcggcgcgttaacgctgtacctggactttatcaacctgttcctgatgttactgcgtatttttggtaatcgccgctaa

SEQ ID NO: 374210 - DNA, 258 bp, Salmonella enterica
atgatgggattcagaaaagtcgataaagaagacaacgtgacagagccggttgtgacgttctgcgttctcccgtcaggctggaaggagatctgtaagggattttacttgcgtaaggtggccaggttgtgtgtggatgcgggctggctgaaacccggtgaagatggccggacgcaaaacagaattcgcctgccagaaatagggcttaaacgtgtgtaccagttcaatacgcaggtactgggaagcgccgaacctgagtaa

SEQ ID NO: 374211 - DNA, 807 bp, Salmonella enterica
ttgtatatatataagtatcgaagatttgatgaaaatagtttgaatgcattgaagaataatgaaatttggttttctagaggtgttaagtttaatgatccttttgattgctctttaaatgttcctattacattaatgtcaataacatctataagaaagtttattaacgttaataagaataacagtctattattggagttggcaaaaaataatgaggatttaattgattttatagttaaccaacaaattgaaaagaatagggaatatatagagaacaatagtattgaacggacagatctttatccggtttatgaactcgtaatggcatcattgtcaagagcatttatatgttgtttttctcagactgcaacaaattctttattatggtctcattattctaattcacatactggtttttgcctaagatttaagaaagatgtgttattgaatgatttgtcgttatttgattatggggaggttaaatatactaatgaaccaataaaccttatggaaggattgtatgataatagcaatccagctagaaatataatttttacgaaggatgaaaactggagatatgaacaggagtttagattagttcatcaggatgtggcgagaaataatgaggatgactatagagtatgtaaatattctgatgaatctattgactgcattatactaggatataactcaagccctgagtgttatcaagaaataagaaaaataataaacgacaaaaaaataatacttaaaaaaatagaacgttcaaattatgggtttaaattatacgtgggaactgatagatattaa

SEQ ID NO: 374212 - DNA, 1017 bp, Salmonella enterica
atgaaagtttataaatatagaggtgggaataaaagcattcttaagagagatctgcgtagtctttataataatgaaatttatagtgcgccatttaatttattgaacgatatctttgaagcaagatttacaataaatgaaaatcattttgcattaagtcaaatgcgatctgttataaaagagcaagatcttaaaaagataaacgcatcgactttgaaagttttacgggagtatgccgataatgttaatgaatttggtatttattcattgagcaaaacgtttgaagatgaactcctttgggcttattacgcagattctcatcgtggattttgtcttgaatatgaattagatgaactaatggaatacagaatgagggatgaattggtcattccagttgactatcaggaaaaaatgccttgtataacggatatagatcttcttgatttctttgaaagtaagaaaatggcagggaacttgaataggaagatgataggtacaaaatctcttcgatggaagcatgaggatgaagttagaatagttacagggcaatcaggattgtataaatataaaccatcaagtttaaaatcaatatatttcggttgtagatgtgattctagatttataaaacttgtaatgaaagtcttatgtggtcgtggtttaaaatactataaaatgtctatgaaggcggatacttataaattagaaagaaatagattggaggattgttacaagggccggagttataacaataaagtgcttgctacagtcgagaatggtgttccatatatcttcgaaggtaatgaaaaatatgttaaatacattaatgtagcaatagatattgtaaggcgactacctgattgcaaaaatattttcaatgctgacttgtcagtcaataaaggtactccatctaatccggttgtatatgttcagtatgagtctatagatggaagaatacaaagtgaatattatactttaaatgtattagattattattttaggaagcaaagtaagtcggaataa

SEQ ID NO: 374213 - DNA, 249 bp, Salmonella enterica
atgagcgaggccagtatcaacaaagtgataaaactactgggctatcatggtcggttaacgggtcacggcttcaggcataccatgagtactattttgtatgaacatggttttgaaagcccttggattgaaatgcagcttgcgcatgttgataagaattccattcgagggacttacaattatgcgcaatatattgaaaaaagaagattgatgatgcaattttattccgacttactttgcttcctaaaataa

SEQ ID NO: 374214 - DNA, 477 bp, Salmonella enterica
atggaaaaggatatttttccttttatcggtcagcgcccaattgagcagattgaaccactagagctgctaaccgtcctgcaaaaaatagagaaaagaggtgcactggaacaaaccagtaagatccgccgccgctgcggtgaggttttacgttatgccgtcgccaccggacgggctaaatataactttgctcctgacttggctattgcactcaacaagcctaaaactcaacacttcccgttccttactgaaagtgaattgcctgattttgtcaatgctctggaaaactatcaaggcagtttagtcactaaatatgccacgcatctgttgatgctaaccggagtgcgcacaattgaactatgtgcagcggagtgggctgagtttgatttagataatgccttatgggagatccccaaagaacggatgaagaaacgcgcccccatttggttccgttatctactcaggcgatcagcatcctga

SEQ ID NO: 374215 - DNA, 2001 bp, Salmonella enterica
gtgaaacaatacgccatacaacccgccacactcgaatttaacgctgagggtacacctgtttcccgagattttgatgatgtctatttttctaatgacaatggactcgaagagacacgctacgtttttcttggcggcaatcgtcttgcggagcgatttcccgtacattcacatccattatttatagtcgcggaaagcggttttggcaccggactcaacttcctgacgctgtggcaggcgtttgacggctttcgttctgagcatccacaggcgacgctgcaaaggttacatttcatcagttttgagaaattcccgttaacgcgcgacgatctggcgctggcgcaccaatactggccggagctcgcgccctgggcagagcagctgcaggcgcaatggccgctgccgctcccggggtgccaccgcctattgctggatcggggccgggtgacgctggatttgtggtttggcgatattaatgaactgaccgaccaactggacgccacgctgaatcaaacagtcgacgcctggttcctcgacggttttgccccggcgaaaaatccggatatgtggacgccaaacctgtttaacgcgatggcgcggctggcgcggcccggtgcaacgctggcgacgtttacctcggcgggtttcgttcgtcggggattacaggaagccggttttaccatgcaaaaacgcaaaggcttcggacgtaaacgcgagatgctttgcggagtgatggaacaacacctcatgccgaccctttccgcgccctggttttaccgcagcggaagcgaaaaacgtgaaacggcaatcattggcggcggcatcgccagcgcgctgttatcactggcgttactgcgtcgcggctggcaggtgacgctctattgcgcggacgaccagcccgcccagggcgcctccggtaatcgacagggcgcgctttatccgctccttagcaaacatgacgccgccattaatcgctttttcccgaccgcattcacctttgcccgtcgcctgtatgatgccctgcccgtctcttttgatcatgactggtgcggcgtgacgcagctcggatgggatgagaaaagccagcagaaaattgcccagatgctgtccctggcgctgcccgccggactggcctcggcgctcgatgccgaagaggcggaacaggcggttggcgtgacgacacgctgcggaggaattacctatccggcaggcggctggctgtgcccggaacaattaactcgcgcagtcatcgcactggcgaccgaacagggtttacaaacgcgctttcgccatacgctcacgtcgctcgttgcgcaggagtcgcgctggcaactgcgctttacgtcaggtgaaaccgccagccatgagaccgtcgtcctggcgaacggccatcagattaaccgttttgatcagacccggccgctaccggtgtatgccgtcggggggcaggtcagtcatattcccaccacccccgccctctcggcgttgcgtcaggtgttatgctacgacggctatctgacgccgcaaaatccgcataatcagcagcactgtattggcgccagctatcaccggggcgatgaaagcaccgtctggcgcgaagaagatcagcgtcagaaccgacagcgtctgcttgactgttttccggatgcgaaatgggccacagaggttgacgttagcggcaacagcgcccgttgcggcgtgcgttgcgccacccgcgaccatctgccgatggtgggcaatgtcccggattaccacgccacgctgacgcattatgccgatttagccgataataaaacgtcggcggcgcctgcgcctgtgtatccgggtttatttatgctcggcgcgctgggatcgcgtggtttgtgctcagcgccattatgcgcagaaattctggcggcgcagatgagtaacgagccgattccactggatgccggtacgctggcggcgttaaatccgaatcggttatgggtgagaaagttattgaagggaaaagcggtgaaataa

SEQ ID NO: 374216 - DNA, 753 bp, Salmonella enterica
atgaaaagtcgttatttactattttttctaccactgatcgtagctaaatatacatcagcagcaacagtgcaactctttcattctcctgaagaatcagtgaacagtcagttctacttaccaccaccgccaggtaatgatgatccggctttccgctatgataaagaggcttattttaagggctatgcgataaagggttccccacgatggaaacaagctgctgaggatgcagatgtaagcgtggaaaatatagccagaatattctcgccagtagtgggtgctaaaattaatcccaaagatacgcctgaaacctggaatatgttacagaaccttctgaaaatgggcggctactacgctactgcttcggcaaaaaaatattatatgcgtactcgcccctttgtcttatttaatcattccacctgccgtcctgaagatgagaatactttgcgaaaagatggctcttacccttccgggcatactgcttatggtacacttctggcattagtattatcccaggccagaccggaacgcgcgcaggagctcgccagacgaggatgggagttcgggcaaagcagagtgatatgtggtgctcactggcaaagtgatgttgatgctggccgttatgtgggagcagtagagtttgcaagactgcaaacaatcccggcttttcagaagtcactggcaaaagtccgtgaggagctgaacgacaaaaataatttattgagtaaagaagatcaccccaaacttaattactga

SEQ ID NO: 374217 - DNA, 849 bp, Salmonella enterica
atgactctgagacgtttacttaaacaaaaaccggcactgctggctggcgctcttctgatggtggccggtgcggccacactgtattttccggaaacctggtacccggaggaaacgcagtggcagcttgcgacagaaaaagacattcccggtatacagggcggtctctccggcctgacgtggaacccggacagcggaacgctgtttgccgtgaccgaccatccgtcgtcggtggtggggctggacacggacgggaacgtgctgcgggtgataccatcgcatggcgaccatgattttgaggccattgagtatctcggccggaaccgctatgtcctgtcccgggaacgggagcggatactcaccacccaccacattgacaggaatacgtctgtcctgccgccggcgtcatacaccctgaccctggatgtggacagaaaaagcgacaatgccggttttgaaggccttgcccgtggacggggagagaatgccctgatagtggcgcaggaaaagaaaccgcttcgttttttagaaacggaccacagccatgactctctgtcggtcagtgattcactgacgcaccggttgtccctgccgtggttcctgaaggatatctccggtctgcattacgacaggataaacaggcggctgtatgtgctttcccatgaatcagccctggtgctggtgtcagacccggagggcggcaggagggtgatgccgctgcgccggggacacagtggtctggagcgggacattccgcaggcggaagggatagcttctgatggccggaattcgctgtggatagtcagtgagccagaccggttttaccgcttcagccggacaacgacgtcatga

SEQ ID NO: 374218 - DNA, 147 bp, Salmonella enterica
atgccggatgacgaaagacgcgccgggtatggcgggggacgcttttcgctctgggcgctgattttactgctgctgaccagcgcttttatctccggcttcctgaccggagccctggccatgctctggtttgtcattgactgcatgtaa

SEQ ID NO: 374219 - DNA, 213 bp, Salmonella enterica
atgagtaatgacgcttgcgacaaaattctgtcttttatgcagtcacaggcaaacggcaggataaatataccggtcaggacccggagtattgcggatgcggccgggctgacaatataccaggccagggcttatctggttacgcttgaggacgctggcgtggtggagaaaatgaatgcaggtaaaggcgtgtccggccgatggctgctggtctga

SEQ ID NO: 374220 - DNA, 573 bp, Salmonella enterica
atgtcccgtcggaaacgcgtactgctgacggggaactgtgaatatgaactgctggggctgtcacatctgcttgccggtatggggtatgccgtgatgcgaccggagatgtcacctcccggggcatatgacctggccctggtggcactgagtgcggagccgctggccggctgggggcggcatctgcaggacatcagaatgctgcacgcggccagtccggttcccatggttgttctggtaccttcgcggctgcaggaaatgcggctcctgagaggaactgcgcaggttatcagtggccgggacagcctcctccggctgcgtgacatgctgcgtcaggcgcttgagggaagagccgggccggaaagctcaggtgaactgactgagttgcgaaagcggactctgatatccctgtgtacggccataaacaggaatgcctcactgaaggcggcatcacgcaaggattattacctccgggcctgcctggtggagtatgcaggggtggagaacctgcatgtactgtgcacgagcggcctgttacccggggtgattacagatgagaccggacaacggttctga

SEQ ID NO: 374221 - DNA, 765 bp, Salmonella enterica
atgaaacgaataacgcttttactgctggctgccagcctgctgccatcctgtgtgctggcgtggaacacgccgggggaagatttcagcggagagctgaagctgggcgggccggtgaccagcacccgtaatccctgggtctggaaggtcggggaagggaacacacagataaacacgaaggcacactcagtcctgcgcagtggggagcaggtaataccggttcccctgccggccatgacggtcctgctgggaaaaactatcctgaccaccccggccggccgggaggggcttgcgccgcaggtgacgtacggtaaggaaaccgagggttttgcactgacgtggacggcaccgggtatggcatcggtgacactgccggtgacgggggagggaaatgtccgtaccgggacattcaccttccggatgcaggcggcgggtgtgctgcgccatgtcctgggggaccgggcggagtatgccgggctgtatggcgacctgcagggcaacggcttgccgccacagacgcaggtgatgccggcagggcagacgccgggtgtgctgcagaccctgtttgacagtgaaggcccggtctggctccgggagatgacggtcagcagcgtgtccggactgagccggttcagtgacgccgccctgcgccaggttgacggggtatacggcgcacagacggtggcggacagcggtgagctgcgttttaagggggcggtaccgtcccgctggcatacctccctggcggtgagcattgaatatcggtaa

SEQ ID NO: 374222 - DNA, 798 bp, Salmonella enterica
atgaaaataacgcatcattataaatctattatttccgccctggccgcgctggccctgttttattccgcagcaccccgggccggaattcttgacggcggggaaatacagtttcacggtctggtcactgacgaggccccgaaatggacctggcaggtgggctcccctgaccagacatgggcggtggataccgctgatgcccgtacagcgaacgggcaactggtttttgatttacgcagcaagggctccctgccgtttctggaaggccatctgtatgaggtggcagagcgcggtggtcccggcttcaccccttttatctccttcagcagtaacgggcagccgttttccgtgacggatggcggcagcacgacggcgcaacacttccgcgcctctgtcccggtacgtaacccggagaacggtcacgtggcgggacagctttctttcacccttgaccagggaatggccgtcagcgccggacaccaggaagacggggtggttctgccggcaggtatgtcgctcgttaacgggcagagcgtgagcggtgtgcaggccggcaccctgccgcagtggctcaaaagccgtctgccttccctgctgatgctgaaccggggcttcggtaacgggatgagcacggcagataacggtcaggttatcagtcagggcgtgctggctgacggccgggtggcccggctggcggcggcctatgcgtccgccgtctcggattttgagctgcgcctgccggcagaaaatacgccggcgcagtggcaggccgggctgagtgtgacagtgacggtccagtaa

SEQ ID NO: 374223 - DNA, 783 bp, Salmonella enterica
atgaaaaaaacactgattgcactggcagtggctgcatctgcagtggtatccggctcggctatggcgtggaccggcggcggtaatggcggaagtttggaattaggtggtaccctggcaccgcaggacaaatatattccatgggagacgagtgttggtgccgctgtgagcgatttgaatgcacagattataaaaggtgagaaagccgtttctatttcacatacgagtgcaattccagtactgggtattcgtaacgtagctaatggttttacaggtctgccgttgattgacccacagattgattataagggagctgttgatgcatcccagttcatgactgatggaaagggacaggtatatctgaacgcaacagtgaatgatgataaagggaacaaaatcggtacactgaaaaccgttcttcgtgtcgcggctcaggcaaacaatggtgttgatagtaacgttatgttgtatgcttcttcagcagatagcggcttcttcgggggcttaccacaatcagctgaaggggtgtttgactcaggtgacgcttattcgtttgcacgcactctgttcccgggcattgctgaaacctggagtgataacggaacagcgtacgctcccggtaatgttggtcagtttgattttagttccacagcgaacacctaccatgcttattatgcttcaggcatcccgcaggatgctaacttgtctattaccctggatcaaccagctgccagcgacgctattaaatggcacgtttccttgccgattacggtttcttataactaa

SEQ ID NO: 374224 - DNA, 492 bp, Salmonella enterica
atgaaaaaagcactgatggcggtggccctcttcagcgccctgccggtcctggcggcggattacagcgagaagacgcagtacctgggcgtggtgaacggtcaggtggtgggcaacagcgtggtgaaggtgacgcgcaccccggcggacccggtgctgtaccggacggagagcaacggtccgctgccggagacgctggtcatccgtaatgccgaaagtcgcccggcatccggaaacatggcgtatatcacggtgaaacggacactgggagacggccgggacgcacggctcacgctgaagaccaccctgatggtggacgggcagcgggcggccctctcggccagccagcggggagaggatgtggttatcacggtgccggcggcaatccggcaggtggagctgagaagtgacgcgccggcggagctggaggtaccggcgaactaccgggggaatgtgcaggtgccggtggaagtggaaggtatcagcgccggttaa

SEQ ID NO: 374225 - DNA, 798 bp, Salmonella enterica
atgacgatgaaacagacccagaaaatgcgttcttttttccgtaacagagtgacgaaggcgctgggaatgaccctggccctgatgatggcgagccagagtgcgctggcttccctggcggcggaccagacccgctatatttttcgcggcgacaaggacgcgctgaccatcacggtgaccaacaatgacaaggagcgtactttcggcggccaggcgtgggtggacaatattgtggagaaagacacccgcccgacgtttgtggtgacgccctccttctttaaggtgaaaccgcaggggcagcagacgctgcgtatcatcatggcctctgcccatctgccgaaggataaggagtcggtgtactggctgaacctgcaggatattccgccggcgctggaaggcagcgggattgccattgccctgcgcacgaagctgaagctgttctaccgtccggtggcgctgctgaaagaccgtaagggggcagaagagggtatcagcctgcaggcccgtccggacgggcggacgatgctggtcaacaccacgccgtatatctacgccatcggcagcctgctggatgcgaacggtaaaaaagttgcggtggacaacgacacggctcagaaactgctgatgtttatgccgggggatgaggtgcaggtgaaggggaatgtggtgaaggtggattccctgaacgattacggcgagctgcagacctggaccatcaaccagaaaaaaacggcgacttctcccaggcagaagacatctgatacggcggttaattcgtctgataaagcaggtaaaaaataa

SEQ ID NO: 374226 - DNA, 2439 bp, Salmonella enterica
atgagcgggaataacgtaagacagccagcctgccagatgtctttttgccatgccgtgctggcacttgcgatagcggttgccctgggcagcggtaccgcaagtgccggagaaaaactggacatgtcctttattcagggcggggcgggaattaacccggaagtctgggcggcgctgaatggagattatgcgccggggcgttacttggtggatctgtccctgaacgggaaggatatcgggaagcggatcctggacgtaacaccgcaggacagcgaagcgctgtgtctgtcagaagcgtggctggcaaaggctggaatttatgtcagcgcggagtacttccgtaaggggtatgacgccacgcgacagtgctgggtgctggcgaaagcgccggcggtgaaggtggactttgatgtcgccacccagagcctgtcgctggccattccgcagaaaggactggtgaaaatgccggagaacgtggagtgggactacggaacggaggcgttccggatgaactacaacgcgaacgccaacagcgggcggtacaacacgtcggcgttcggctcagcagacctgaaggccaacatcggtcgctgggtggtgagctcgtcagccacggccagcaccggggatggtgggaaccacgaggccacgataaacatgttcacggccacccgggccatccgctccctgagtgcggacctggcggccgggaagacctcgaccggtgacagcctgctgggcagtaccggcacgtacggggtgtccctgtcgcggaacaacagcatgaagccgggcaacctggggtataccccggtgttcagcggcattgcgaacggtccctcaagggtgaccctgacccagaacggcaggatgctgtactcggggatgatgccgtccgggccgttctccgtcacggatgtgccgctgtacagcagcggggacgtgacgatgacggtcaccggggatgacgggcgggagcagacgcaggtctttccgctgtcggtaatggccgggcagctgagtccgggacagcacgagttcagcgtggcggccgggataccggacgatgacagcgacctggagggcggggtgtttgccgcgtcatacgggtatggtctggacgggctgacgctgcgcacggggggcgtgttcaaccaggactggcagggcgccagtgccggtgcggtactggggctggggtatctgggggcgctctccgctgacggcgcttatgccacggcgaagtaccgggacggcagccgcagcgggaataaggtgaaactggcctggagcaaacagctggcgctgacgaacaccggactgcgggtgagctggtcacatcagagtgaggaatatgaggacatgtcctcctttaacccggctgaaacatggctgcagcagaaccaggggcgccggacccgggatgagtggaatgcgggcatcagccagccggtgggagggctgttcagcctgtcggcgtcgggatggcagcggagctattacccggcctccacgaccggcagttaccggtacgctgatgacaacggtaaggagacaggaattaccggtaccctgagcacacagataaaaagcgtcagcctgaatctgggctggtccgggtcccggaacatgaacggggagaacacctggtcggcctccgcgtcggtgtcggtgccgttcaccctgtttgagcggaagtacagcagcagcaccacggtgagcaccggtaaagatggcggcaccggcgtcagtaccggtatctccggggccctgaacgaccggttcagctacggtctgggaggcggccgtgacagtgacggcggtgtcagcagttacctgaacgccgcctacagcggcgaccgggcgaacctgaacggcacggtgaaccactcgtccggttcgggcaccagtggttcggtgtcagccagcggttcggtactggcggtgccggcggcgcgggacatcatgttcagccggaccaccggggacacggtggcggtggtgagcgtgaaggacacgccgggggtgaaggtgatgtccggcaatgaaacgtcggacagtgacggaaacctggtagtaccgctgaacagctatgactggaatacggtgaccatagatgcgggcacgctgccgctggacacggagctgtccacgaccagccggaaggtggtgccgacggacagggcggtggtgtggatgccgtttgatgctctgaaggtgcaccgttacctgctgcaggtgaggatgccggacggggcctttgtgccgggcggcacatgggcacgggacagcaataacacgccgctgggctttgtggcgaacaacggcgtgctgatgattaacgcggtggaccgccccggcgatatcacgctgggacagtgccggatacctgcggcgaaactgcaggagacggcgaaactacaggaaattacgtgcgaataa

SEQ ID NO: 374227 - DNA, 540 bp, Salmonella enterica
atgaaaaaaataaagatacttttccttctgctgctggcagggggcgggctttctcacgcttccgttcagaaaaccctgttcagtgctgatgtggtggcctctgcctgtcatgtggtggtggatgctgacggtaccggcagcagccgtttgaccttcgggacataccgtaagtcgtccgctgcacccgtgccgccgcgtgatttcaccgtgcgtctgtatgagaccggcgccaccgttcagggctgttcggcctttctggccgggcagatcgccaccctgaatttcggcaacccgggccagctggacggacagggtgtggtcacccgtggcgccggcgacggtatccgtatcgatgtgcgggccgcggatacgcaggcggacttccgggggcgcatcacgcaggcaaatcatgaggtgaagtacccggtggattttgccgcgaaggggcagttccggtttcgtgcgcagccggtgtttccggcggacgtgaaggcgggtgagtacaacggcgctctgacctttgtggtcacctaccagtaa

SEQ ID NO: 374228 - DNA, 291 bp, Salmonella enterica
ttgaaactgaataaaaaatcattttccggcgtcaggatagtgagggccggggaactcgaaccgggggccgtgtccgaagagcagttctggctacttgttgatatatccccgatacacagtgaaaagattattctggccctgaaagattatttcgtttccgggtattccagaaaggttgtgtgcgaacgccacggtatgagtggcggatatctcagcaccagtgttaaccggctgaattttatcagcaggaatgtgcataaactggcgggttattacagccatcatgaatga

SEQ ID NO: 374229 - DNA, 480 bp, Salmonella enterica
ttgttattatgcagcagcgaggtcagcacagaaccaataagtaatgagttacgtaaacagagagtctttatctccggaagcggtgtccgttctgtttggtttcgccataaccttgagaacttcaaaaagcgcctgaaagcgctggaacgtagagccagtgacgacgaggcgtgtggagaaatcgaaacggcgcatcccggttatctgggggcacaggacatattctatgttggcaacctgaaaggcgttgggcgtatttaccagcagacattctcgaccagactgtgtgttctgttctttttgacgatcggatgtcagaagatgatggctgccgccagactgacgatgtctgtcctgctgctcaatgtcccgtccgggggcgtgatgatgctgtcaggtctgctgcccggtggccgctggtttgcgcaactttgtgtcctgcacctgaccgttatcggagccgtgttatatctcccctga

SEQ ID NO: 374230 - DNA, 648 bp, Salmonella enterica
atgcctgaagtaacaccttttcaggtgcttattgtggacgaccatccacttatgcggcgaggtattcgtcaattactggaactggacccggctttttatgtcgttgccgaagcgggtgacggggcgagtgcgatcgatctggcgaatcgcattgagcccgatctgatcctgctggatctgaatatgaaaggtctgagcgggttagataccctgaacgcgctacgccgggatggtgtgacggcgcaaattattattcttaccgtctcggattccgccagcgacatctacgcgctgatcgacgccggcgccgacggttatctgctcaaagatagcgatccagaagtgctgctggaggccattcgcaaaggcgctaacggcggtaaagtctttagcgatcgggtcaatgaatatctgcgtgagcgcgaacggtttggcgcgcaggaagatccctttagtatcctgaccgaacgagagttagatgtcttgcatgagctggcgcaggggctttctaacaaacagattgcgtcagtactgaatatttctgagcagacggttaaggtgcacattcgtaatctgcttcgcaagctaaacgtgcgctcgcgcgtcgcggcgaccattctatttttacaaacacgcggaatgcagtaa

SEQ ID NO: 374231 - DNA, 666 bp, Salmonella enterica
atgcggggagaaaatagtgaaattgatttagtcgacgtttccttattccttataagaaaatggctaagtatcgtgatcgctacctttatttttgttgccattggctatgtttttgtgagcgtgcagcatgatacaaaggttgtgagtatgacaatcaaacctaatctggatacgcctgctacctatgcgttatgtggctatgctaatgatattcaatgtaaaacaacggttatacttaaccagtttagccgtttcttgcctgcggactataaaaataaaataagttttgacgtgaaaaatcagcttgtcttttttaaggcgcaggggagggaagaaagcgtcaataatattatttccaccctgaaaaatagtgtcgataaaatggcagcatggtatatcgatgatggtgacattaaacgttatggcgtgcataaaaatatgttaaaaacggaaacatatgcaaagctatcattgttgtcggaggcggttaaaaataatgctaacattgaagtgatagatgttgctgttacaccaaaatataagatgcggctggtgttagtcctttgcggactgatgggcgtaattttctcaataaccggtcttttatgtaggagggcgctaacagaatatcgtattgagaaaaagacaatgaatgaccgcgcatga

SEQ ID NO: 374232 - DNA, 645 bp, Salmonella enterica
atgcacaacagtcccgccgccgctgcgcctaaatcatttgacctgacgtctaccgcctttttgatcgtcgcttttctcaccggtattgccggtgcgttacagacgccgacgctcagtatttttctgacggatgaggttcacgcccgtcccggcatggtgggattcttttttaccggcagcgcggttatcggcattatcgtgagccagtttctggcgggtcgctcagataaaaaaggcgatcgcaaaaaactgatcgttttctgttgcgtgctgggcatgttggcctgcgtgttgtttgcctggaaccgcaactactttattttgctgttcatcggcgtctttctcagtagcttcggctctaccgccaacccgcagatgtttgcgctggcccgtgaacatgccgatcgtacaggtcgtgaagcggtgatgttcagctcaatcctccgcgcccaggtctcattggcctgggtcattgggccgccgctggcctatgcgctggcgatgggttttagctttacggtgatgtatttatttgagcgcggcggtagcttttatcgtctgcagcgtcatggtgtggttctttttaccgtcaatgcgcaaagatgcgccgctggcaaccggtacgctggaagcaccgcgtcgtaa

SEQ ID NO: 374233 - DNA, 543 bp, Salmonella enterica
atgaaacgttcaattatttctgctgctgtactgtctgctgtatttatgagtgctggggcgtttgctgttgatacggattctggcatattgaatattaatggtaaggtaaccggaacttcatgtcagtttgttgatggcgcgacagaggctacaattacattgtctagcattccggattctttattcaatgaggttgatgtcgggaatgatgttacgtatggagaggggcgtgccagttcaccattgcaaattaaatgtgcaaacgcttcaaatgttaaggttttcatttctgctaatgacgttgacaataacgatattattatacctactattggcttggatactggagtaggttttaaactgttccataacaataaatcgattgctaaatctggaagcgaaggtattcctttaagtgactttccagcagcagacgatggtgtatataaactcgatcttgcagctcgttacgctaaaaggacaatggctgtaacccctggtgatgtaaatgccactgtgactctgaaagttgttcaggaataa

SEQ ID NO: 374234 - DNA, 552 bp, Salmonella enterica
atgaaactcaccttaaaaacactcgctgtggcactggctgccatcaccctctcccccgccgcgctggcagacaccgccaaagacggcaccgtacatatcaccggcctcattcagcaaaacgcctgtacggtaaaaacggattcagtattaatagaggtaacattacagaacgaatttgcctctctttttactgccgcagggcaaacggcaggggataaaggcttcaccatcgatctcgaaaactgcgacgcaaacatctacagcaatgtacaggcgcgctttgaaggtacgctcgacggaaccgatgcgaccatcctgaaaaatgattctgatgctcagaatattggcgtgcaaattcttgataaaacgggtgacagtgcgccagtgacctttaacgatcttcaggcatggtcttccgcagtcgcgctccctacagaagagggggtgacgacactctcaatgcctttcaccgcccgctatatcgccaccgcggttcccgttgggtcgggaaatgtcgatgcaagcgcaacattctatctgcaatataactga

SEQ ID NO: 374235 - DNA, 1044 bp, Salmonella enterica
atgcgtattgaagaagatctgaagttaggtttcaaagacgttcttatccgtcctaagcgttctaccctcaaaagccgttccgatgtcgaactggaacgtcaattcacctttaaacactcaggtcagacctggtctggcgtaccgattatcgcggccaatatggataccgtcgggacgtttgaaatggcgcaagcattggccgggtttgatattctgactgctgtacataaacattataccgttgaagaatgggcagcttttatcaacacggcttcggctgatgttctgaagcatgtgatggtttccaccgggacctctgatgctgatttcgaaaagaccgtgcagattctggcgctggatcctgcgctgaactttgtctgtattgatgtggccaatggctattcagaacattttgtgcagttcgtcgcgaaagcacgtgaagcatggccgacaaaaacaatctgcgcaggcaatgtggtaacgggcgagatgtgcgaagagcttatcctctccggcgccgatatcgtgaaagtgggaattggtcccggctccgtatgcacgacgcgtgtaaaaactggcgttggttatccgcaactgtcggcggttatcgaatgtgctgacgcggcgcatggcctgggcggcatgatcgtcagcgatggcggctgcaccatgccaggcgacgtagcaaaagccttcggcggcggcgcggatttcgttatgttgggcggtatgctggcgggtcacgaagagagcggcggcagcgtggtagaagagaacggcgagaaatttatgctgttctacggcatgagttcggaatctgcgatgaaccgtcatgtcggcggcgtcgcgaaataccgcgcggcagaaggtaaaacggttaaattgccgctgcgtgggccggtgggcaatactgcccgcgatatcctgggcggtttgcgctcagcctgcacttatgtcggcgcgtctcgcctgaaagagttgaccaaacgcaccacctttattcgggtgcaggaacaagaaaaccgcattttcaatagcctctaa

SEQ ID NO: 374236 - DNA, 516 bp, Salmonella enterica
gtgcgccgggctggtggtgtaggagagcgtgccctgggcgtgcgcgccgtggctgcgcaccgcctgcagtgcggctttcatattgcgcgggtcgttcatggcatcgaagacgcggaacacatccatgccgtttttgacggcgcgttcgacgaagcgctccaccacgtcatcggcgtagtggcggtagccgagcaggttctgcccgcgcagcagcatctgcagcggggttttcggcatggcttttttcagctcgcgcaggcggacccacgggtcttcgccaagaaagcggatgcaggcgtcaaaggtggcgccgccccagcactccagcgacccgtagcccacgtcatcgagcgcggcggcaatcggcagcatatcgtcaagacgcagacgggtggcaaacagggactggtgggcgtcgcgcaggacgacatcggtaatggcaatagtcatggatccctccgggaattaagcgttaaggcggtgatggtgaatggcggcggcaatcaccggctttaa

SEQ ID NO: 374237 - DNA, 180 bp, Salmonella enterica
atgatgactgagttcaaacgcacccaacgtgattatcctctatcctttaaaatagccgtcgttgagcactctcctgaggaggacaaatccgccgggagcggatttgaacgttgcgcagcaacggcccggaggggggcgggcaggacgcccgccataaactgccaggcatcagacaagtga

SEQ ID NO: 374238 - DNA, 693 bp, Salmonella enterica
atgaaatctctgaatactctagtgatattaacttcagtaatatccacctctgtttttgctggcgcttatgtagaaaaccgtgaggcctataacctggcgtctgaccaaatggagtttatgctgcgcgtcggctataactccgatatgggggccggaattatgttgaccaatacctatacgctacagcgtgatgatgaattaaagcatggttataatgagattgagggctggtatccgttatttaaacctacagataaattaaccattcagccaggggggttaataaacgacaaaagcattggttccggcggcgccgtctatctggatgttaactataaatttaccccgtggtttaatcttacggtacgtaaccgatataatcacaataattatagttcaaccgatttgaatggcgaactggataataatgacagctatgaaatcggtaactattggaattttaccattaccgataaattttcttatacctttgaaccacactatttttataacgttaatgattttaatagtagtaatggtacgaagcatcattgggaaatcactaataccttccgttatcgtatcaatgaacactggttgccctactttgaattacgctggttagatcgtaacgtgggcccctaccatagagagcaaaaccagattcgtatcggggcgaagtatttcttctga

SEQ ID NO: 374239 - DNA, 1383 bp, Salmonella enterica
atgagtcaaacatcatcgaatccggcaaccctacgcttgccgtttaaagaaaaacttgcctatggactgggggatttaggttccaatatcctgttagatatcgggaccctctatttactcaaattttataccgatgtgctgggtttaccagggacttacggcgggatcattttcctgatcgccaaatttttcaccgcatttaccgatatgggtaccggcattatgctcgactcgcggcgtaaaattggtccgaagggcaaattccgcccgttcgtgctttacgcggcatttccagtaacgctactggcgattgctaactttgtcggcacaccgtttgaggtgacgggaaaaaccgtcgtcgcaacgatactgtttatgctgtacgggctggttttcagcatgatgaactgctcgtatggcgcgatggtgcccgcgattaccaagaacccggatgaacgcgcctcgcttgccgcgtggcgtcagggcggcgccactctcggcctgctgctgtgtaccgttggctttgtgccggttatgaacctgatcgaaggcaatgcccagctcagctatattttcgccgccacgctattttcattgtttggcctgctatttatgtggctgtgctacgccggcgttaaagagcgctacgtcgaagtgaaacctgtcgataacgcgcaaaagcccggattattgcagtcgttccgcgccatcgccggtaaccgtccgctgtttattctgtgtatcgccaacctttgtactctcggcgccttcaacgtcaaactggcgattcaggtttattacacccagtacgttcttaacgacccgatcctcctctcctggatgggcttctttagcatgggctgtatttttatcggcgtctttttgatgcccggcgcagtaaggcgttttggcaagaagaaagtctatatcggcgggctgttaatatgggtggcgggcgatctgctcaactacttctttggcggcggctcggtcagttttgtcgccttctcctgcctggcgttcttcggttccgccttcgtcaacagcctgaactgggcgctggtttccgacacggtggagtacggtgaatggcgcaccggcgtccgctcggaagggacggtttacaccggcttcacgttcttccgtaaggtctcccaggcgctggcagggttcttccccggctggatgctgacgcaaatcggttatatcccgaatgtggtgcaatcggcaggcaccgtcgaaggcctacgccagttgatctttatttatccttgcgtgctggcggtcatcaccattattgcgatgggctgtttctacaacctcaacgagaagatgtacgtgcgaattgtggaagagattgaggcccggaaacatacggtttaa

SEQ ID NO: 374240 - DNA, 1557 bp, Salmonella enterica
atgaaagtaaaactgcttgctgccggtattttgttcacgctgccgttctgggcctgcgctaaagatgtcaccattatttacaccaacgatctacacgcccatgtggagccttataaagtgccgtggattgctgacggtaaacgcgatattggcggttgggccaatatcaccacgttggtgaagcaggaaaaagccaaaaataaggcgacgtggttttttgatgccggagattactttaccggaccgtatatcagcagcctgacgaagggtaaagcgattatcgatattttgaataccatgcagtatgacgctgccactatcggtaatcatgagttcgatcatggctgggacaatacattgttgcaacttagccgggcgaaattccctatcgtacagggcaatattttttatgaggacagcagtaaacccttctgggataagccgtacaccattgttgaaaaagatggcgtcaagattggcgtaatcggcttacacggtgtctttgcttttaatgatacggtttctgccgcgacgcgcgtgggcattgaggcacgcgatgagattaagtggctgcaacgttacattgatgaacttaaaggtaaagtcgatctgaccgtcgcgctgatccacgagggcaccccggcccgccagtccagcatggggaataccgatgtgcgacgcgcgctggataaagatattcagaccgcaagtcaggtaaaagggctggatattttgattaccggccacgcgcatgtcggtacgccggaaccgattaaagtcggcaatacgctgatcctctcaacggacagcggcggcattgatgtcggcaaactggtgctggactaccaggaaaagccgcatcagtttaccgtgaagaacttcgagctgaagaccatttttgctgatgagtggaagccagatccgcaaacgaaacaggtgatcgacggctggaacaaaaagctcgataaagtcgtgcagcagacggtggcgcagtcgccggttgagctgacccgcgcgtatggcgaatcgtcgtcgctggggaatctggcggcggatgcgctgctttttacggcggggaaagacacccagttagcgcttactaactctggcggtatccgcaacgaaatcccggctggcgcggtgacgatgggggcggtaatcagtaccttcccgttccctaatgaactggtcacgatggatttaaccggtaaacaattgcgcagcctgatggagcatggcgccggattaagcaacggcgtattgcaggtgtctaaagggctggagatgaagtatgacagcagcaaacctatcggtcagcgggttaccgtgctgacgctcaatggcaaaccgattgacgatgcggcggtttatcacatcgccaccaacagcttccttgccgacggcggcgatggttttgcggcgttcacggaaggccaggcgcggaatacctccggcggctactatgtgtcgaatgcgatagttgattactttaaggcgggcaacaccatcacggatgagcagctcaaagggatgcgcgttgcggatgtgaagaagtaa

SEQ ID NO: 374241 - DNA, 291 bp, Salmonella enterica
atgacattacgttacccggcgttattgactcctttgctaatgatgttcgctttcagtgttcatggcgaaccgcctttaccacaggatgtgcagcattttctgagcaatgcagagatgtgccagcatctggccggcgaatgggacagttctttaccggaagaggataaaaaagacatagaaaagggcattaatacctggtgccctccggcgaaaaaagcacttcctgggttacgggaaaagtacaaagaaaacaaagagattataaaaaaactctctgagtatgatttttaa

SEQ ID NO: 374242 - DNA, 222 bp, Salmonella enterica
atggattatgaaaaagataaggccaaaaataaagtggcaatattagataaaaaatcctattccgatagttactatgaaaatcaggttaaatctatcgtggcaaaatatacctatattaacaaagataaagaaaaagatattttcattgcatccagcttcatgaatgctgatgagtgttctgtaagatttaatggttatattactttatccagggaattttaa

SEQ ID NO: 374243 - DNA, 795 bp, Salmonella enterica
atgcgccggccagcggtggtatcagccccggcgatgttcggcaggctgccggaccagcgcgactatgtgcgttggcgggtgggcgctgaagagggacgaatatggcaggactggctgaaccgccagacatgggtgggcagcgggcggcatatcgtgttgccggaaggccagacgaccgatgaagagcgtgacggctggatgcacctgtcgccgcgtggcgaacatgatatgcccgcgccggaacaccatccgctgccgtggagctttgtgatgtcgccgggatttttgccgatgggtggaacgactgactggctgaccggagtgctgatggcgtcacgggatagcgtgggacgcccgtggccgctggtgatttaccagcgctgcggtcgggagtggctggacgagagtttgcaggagacgcagggctggctgtactggctggcgaggctggcggcgcagcatatcacgccggacacgatgcggcgcgggcggctgacggagcaggtggaccagctatgggcgatgtggcagccggggccgtggtgggcgcagtggctgcgtgggttacgacgtacatcgcagcgcagccgggaactgaccgggctgccggatgaagcaccggtagtagaactgccgggcgtgcgttatctgccgtggccgggctggccgggtaagactctggggcaggcaagaccggggcaaggctggttctggcagcagaacagtgaagggcggtatgtggatgcgctgcggcatatcacggaagttgataattcaggtgatgtccgaagataa

SEQ ID NO: 374244 - DNA, 375 bp, Salmonella enterica
gtggcgagtgttctcttatattttttggccacccggtgctgtattctagtttgctataataatgaagagatattctcattctgcttcagaacatcagtagagcatgagataggtcacacacttttatatcttgaagatgagtatgacctgccaaaaccacctgagaattttgataccaattatttgtctttaaccaaaggggaaagatttccatcgaatgagttaagagtggtaaatgatatatatggttgggatattgatggagtgatgaatattggaacagaacttcgggaacattatctgaatgatattcctgtacaattaaatgtaataattcctgatgccagtttctcgcttgcggagttaaaaaaatga

SEQ ID NO: 374245 - DNA, 417 bp, Salmonella enterica
atgaagaaagattttgcttatgcggtggaactcccttattggcaggcaccaaacgatgatctcctgttaaaatcacaaggtgattcattaaccgcattttttaagatatggatttctccttctaaatattctaagtttacaggtatattcgatttttcttgtgtttgggcagtgcggtatgagaggaataaagaattaagttattatagtaaacgtgatgacgatgattttgtttcatgttattggattgttcctgagtcatcgtggatagaaaaattgaagaaagaaagatgctctttttttcctgaatggaaagaatatgatgttggagaatattcacattatattattcaaagtaattcattttacatagaaataattgccaaggatgtaaaaatatcaagaaggaaattatag

SEQ ID NO: 374246 - DNA, 495 bp, Salmonella enterica
atgaaaagcataaaaaaattgattatcgcaagtgcgttgagcatgatggctgctagttgttatgctgctggatttttgccggacacagagcaacagaaatcagtggatattagctttgccgctcccgaatctttaaccgtatcgcttgagcaagtgccgggcttaatggctgggagggggcatgatggtatggatattgcgaagcttacagttagttctgcttctattcaagaattcggggccaggggggtttctagctcgatactgggcagcgctggcagtgaatggaaaataactggtaaaaatagtggcgagtcaatccttgtgggcttttcaactaatgtagccacagccaagggcccgaaaatgtggaatggggaaacctggagcacctttgataccaatgccccagttaatattgttataacaggggatcaggatatcccacctgatacgtacccactgactttagatctagtgggatatcggccttaa

SEQ ID NO: 374247 - DNA, 231 bp, Salmonella enterica
atgatcgatgcctggctggaagctgaagtcgaactgctccagcgttttgactcatggcagacgagcctgtttcagccgggattccattccgcgctgatgtctgccgttctattcctgctgcagcgccatgcacaggaatgtcgacttatttttgggctgacagaggcattggtcgttaagacttgtacattcatgttgcttactcgcacaaaagggggaaaggaaccgtaa

SEQ ID NO: 374248 - DNA, 1080 bp, Salmonella enterica
atgacagcccattggtcagcaattattaatttcatccgaaaacttgttcgctctgcaaggatggttgcaattcatcttctggtactgtggttacctgtttcagctcaggctgaaagggagagcgactattcatggaacctgccagtctctgagaatatagacctgaatgcactccctgaacaacaggatatatggtctattaaggtagtccgaagggatttcggtctaggatacttttcattaatgtgcctgtctgaaaacgatgatgttttcggaaaatgccggacaagggttccagacggtgtgtgtgctcaacctttccaaaacgtgccattacggtttacgcggcagggtagtggtgagacgattaccctgaccgtggcaggtaggtttgctaatcatgatgagggatttgcaggatcggtgacctacagcgagatggcggatcacgtcattataaaaacatggattctgcgtgaggagttgaaaaaaatcccgactaccggcatctggactgcgcatctgcagatgcgatctttgcgatggtggaatattccaatcggtagtttagtgtcggatatcacgctgaatgtaacagaccactttgcagaaaatgcggctatttactttccgcagtttggtactgcaacccctcgtgttgacctgaatcttcaccggctgaatgcctcacaaatgtcgggcagggctaatctggatatgtgtctgtatgacggaggtgtgaaagcccgttcattacagatgaagatagaaggaagcaataagtcaggtacgggatttcaggttataaagagcgattctgctgatacgattgattatgcggtcagtatgaattatgggggacgaagtattcctgtcacccgtggcgtggagttcagtctggataacgtggataaagcagcaacgcgtccggtgctacttcccgggcaacggcaggcggtacgttgtgtgccagtgccccttaccctgacaacacaaccctttaacatcagggagaagcgttctggtgagtatcagggaacgctgacagtgacaatgctgatgggaacacaaaccccctga

SEQ ID NO: 374249 - DNA, 168 bp, Salmonella enterica
atgggaaatattcagggatacggtcgtatccctgagacaagccagaattcagcatgtaccattgtcaaaaatagcattaagctgatatttttctttttgcacggcatctttgttctgttgagttcccttctcctcaacagacatatcccatacgttttcattatctga

SEQ ID NO: 374250 - DNA, 2562 bp, Salmonella enterica
atgtcccccaccattaatttgaaccgcaaaagccttgcgctattgatcgccatagtttgctcaggctccgcgcagggtgaagagtattattttgatcctgcgctacttcagggggccacttacggacaaaatattgcccgttttaatgaacagcaaacgccttccggagactatcttgccgacgtttacgttaatggcacgctggtaactgcgagcactaatattcgatttaatgctgtaaaagagggtcaacagacggaaccctgcctgcccttatcggtgatgaaagcggcacagataaaatcactccccgcaaccggcgctgcgaccgagtgtcgcccgctcagggagtgggtacctcatgccggttggcaatttgatagcgccacgcttcgcctgttgctgacgattccaatgaccgaacttacgcacaaaccgcgcggttatatctccccttcagagtgggatagcggcgcgctggcgctgtttttacgccataacacaaactggacccacaccgaaaataccgacagccattatcgctaccaatacttatggagcggtttaaacatgggcgttaaccttggactttggcaggtccgtcatcaaagtaatctgcgctatgccaatagcaaccagagcggaagcgcctggcgctataatagcgttcgaacctgggtgcaaagacctgtcgcgtctattaacagtattctgtcgctgggcgatagctatacggactccagcttattcggcagtctgtcttttaacggagctaaactagtcaccgacgagcggatgcgcccgcagggcaaacgcggttatgcgccggaagttcggggcgtagcggccagtagcgcgcacgtggtagtaaaacaactggggaaagtgatttatgaaaccaacgttccgccgggcccattttatattgacgatctgtacaacacccgttatcaaggcgatctggaggtagaggttatcgaggccagcggtaaaacctcacgtttcaccgtgccttattcttccgtgccggattcggttcgccccggtaactggcactattcgctggccttcggcagggttcgtcagtactacgatattgaaaatcggttctttgagggaacgttccagcacggcgttaataacaccattaccctcaacctcggttcacgaattgcgcagcgttaccaggcatggctggcgggcggcgtctgggccactggtatgggcgcgttcggccttaacgccacctggtcgaatgcgcgcgcagagcataacgatcgccaacaaggctggcgcgcggaactcagttacagcaaaacgtttaccaccggcactaacctggtgctggcggcttatcgttattcaaccaacggctttcgcgatcttcaggacgtgctcggcgtacgccgggaagcaaaaacggggattgattactactccgatacgctgcatcagcgcaatcgcctgtccgcgacggtaagccagccgttaggacggcttggcacgcttaacctcagcgccagcaccgcagactactacaataaccaatcgcgtataacacagctacaaatggggtatagcaaccagtggcggaatataagctacggggtgaatatcgcacgacagcgcaccacctgggattacgatcgcttttatcacggcgttaacgaaccactggacgtgagtagccgacaaaaatataccgaaaccacaatgtcgtttaatgtctctataccgctggattggggcgaaaacagaacgtctgtcgccatgaattataaccagtccagtcaaagccgttcctcaaccgtatccatgaccggcagtagcggtgaaaacagcgacctgtcatggtcggtttatggcggctacgagcgttatcgcaatagtaatagcgatagcagcgcgccaacgacgtttggcggtaatctacaacagaacacccggtttggcgcacttcgcgccaactatgaccagggtgataactatcgtcaggaagggctgggcgtgtccggcaccctggtacttcactctggaggtctgacggctggcccctataccagcgatacctttgcgcttattcatgccgatggcgcgcagggcgcgatcgtacaaaatggccagggcgctgcggttgatcgctttggttacgccattctgccttcgttatctccttaccgcgtcaataacgttacgctcgacacccgtaagatgcgcagcgatgccgaactgacgggaggaagtcagcagattgtgccctatgctggcgccatcgcgcgtgtcaatttcgccactattagcggcaaagcggtgctgatctccgtgaagatgccggatggcggcataccgccaatgggcgctgatgttttcaacggtgaaggcacaaacatcggcatggtcggccagagtgggcagatttatgcccgtatcgcccatccgtcgggttctctactggtgcgctggggaacaggggcaaaccagcgttgcagggttgcctaccaactcgatcttcacaccaaagaaccgtttctctatctgaacaaaatctgcgagaaggaatag

SEQ ID NO: 374251 - DNA, 762 bp, Salmonella enterica
atgaaaatggatacccgacattccgcattatattacttaatagtttttctattgctggccctacccgccacagcatcgtgggcgagcgttactattttgggtagccgaataatttacccatcaacagcctcctccgtagatgtgcagttaaaaaataatgatgcaataccttatatcgtacaaacctggtttgacgatggcgatatgaataccagcccggaaaatagcagcgcgatgccgttcattgccacgccgccggtatttcgtattcaacccaaagcaggccaggttgtacgcgtaatttataacaacacgaaaaaattgccgcaggatcgtgagtcagtattctggtttaacgtattacaggtaccaccaacgaatattggcagcgacagcgggcaaaataaaatgttggtaatgctgcgctcaagaataaaacttttctatcgtcctgacgggctaggtaaacctgataatctggcgaaaaaattacagattaaaacggtaaataagggttccggaaaaagcggtattgttattgttaatccgcagccctggtttgcctctttaagtaacctgaatgtaaaagtgaacggcgcttcgtataacctggatgctgacatgattgcccctttctccagtcaaacctggtggctgccgggcaagcggtcactcaaatccttctccggtacagtcaccgttactttggttaacgacctgggcgcaaggataagcgagagctacgatgtcccccaccattaa

SEQ ID NO: 374252 - DNA, 1617 bp, Salmonella enterica
atgacgactgcccacagcgctccgcgcgataatagcgataaaccggtgatctggacggtctccgtaacgcgtctgttcgaactgtttcgggatatcagcctggaattcgatcatctggcgaccatcacgcctattcaactcggctttgaaaaggcggtgacctacattcgcaaaaaactggcgaccgagcgctgcgacgcgattatcgcggcgggttcgaatggagcctatttaaaaagtcgcctgtcaataccggtgatcctcatcaagcccagcggattcgatgtattacaggcactggcgaaagcgggaaagctcacctcgtctatcggtatcgtgacctatcaggagaccattccggctttacttgcctttcagaaaacgtttcacctctgtcttgaacagcgaagctatgtcaccgaagaggacgcgcgcgggcaaattaacgaacttaaggccaacggtattgaggctgtcgtcggcgcgggattaattaccgatctggcggaagaagcgggaatgaccgccatctttatttattccgcggcgaccgttcgtcaggctttccatgatgcgctggatatgacccgtctgacacggcgacagcgcgtggattacccacccggcaagggattacaaacccggtatgaactgggcgatatacgcggccagtcgccgcaaatggagcagctccgccagacgattacactctatgcccgctcccgtgcggcagtgctgattcagggggaaacagggaccggaaaagagctggcggcgcaagcgattcaccagacgttttttcaccgccagcctcaccgtcagaataagccatcccctccctttgtcgccgtcaattgcggcgcgattaccgagtcgttgctggaagcggaactgtttggttatgaagagggcgcgtttaccggttcacgacgaggaggccgggcggggctgtttgaaatcgcacacggcggcacgctgtttctggatgaaatcggcgaaatgcccttgccgttacaaacccgacttttgcgcgtactggaggagaaagccgtcactcgcgtcggcggacaccagccgatcccggtggatgtccgggtgatcagcgctacgcattgcgatctggatcgggagataatgcaaggacgttttcgccccgatctcttttatcgcctgagtattctgcgtctgacgcttcctcctttgcgcgagcggcaggctgatattttgccgctggcggaaaactttttaaaacagtcgctggcggcgatggaaattccgtttaccgaatcgatacgtcatggattgacacagtgtcagccgcttttgctggcctggcgctggcccggtaatattcgcgaactgcgtaatatgatggagcgcctggcgctttttttaagcgtcgatcccgcgccaacgctggacaggcaatttatgcggcagttattacctgagcttatggtgaacacagcagagctgacgccttcaaccgtggatgcgcacgcgttacaggatgtactggcgcgctttaatggcgataagaccgcggcggcgcgttatctggggattagccgcaccactctgtggcgtcgtttaaaagcaggtgccaaagaccagtag

SEQ ID NO: 374253 - DNA, 939 bp, Salmonella enterica
atgatgaaaaaaagcgtcgctatgctggcggtttgtatgctggcgcaaagccaccttgctattgctgctggtgctcctgcgcctcaagagatcaacattgttttactgggcaccaaaggcgggccttctttgctcaatacagccagactaccgcaagcgacggcgctcactatcggcgataaaatatggctgatagatgccggctacggcgccagtctgcaactggtgaaaaacggcattccactgcgcaacatcaatactattttgctcacccatctgcacagcgaccacatactggattatccttccttgctgatgaatgcctgggcaagtggtctgaaagaccataccatacaggtgtatggcccgccgggaacccaggcgatgacgaaggctagctggaaggtctttgacagggatatcacgctacgcatggaagaagaggggaaacccgatccgcgcaacctggttaaggcgaccgatattagccagggcgtcatctataaagatgaactggttacaataagcgcgctgaaagtgcctcattcccctttcccggacggtgaagcgtttgcttaccgttttgatacccaaggtaagcgaatcgtcttctctggcgatacgtcctggtttccgccgcttgcaacgtttgcccaaggggcggatatcctggtacatgaggcggtacatgtcccttcggtagcaaaactggctaatagtattggcaacggaaaaacgctggctgaagcgattgcgtcgcatcacaccacgattgaagatgtcggtaagattgctcgcgaggcccacgtgaaaaaactggtgttaagtcatctggtgcctgcgacggttgcggatgacgtctggcaacaggaagccatgaaaaattacccgggccctgtcattgtcggtcatgacaatatgacgataagcgtaccgtaa

SEQ ID NO: 374254 - DNA, 165 bp, Salmonella enterica
atgctgcgtcacatgcagtggttcgaagcggcggatctgattgttaaaggtatggaaggcgcgattgccgcgaagaccgtgacctatgactttgaacgcctgatggaaggcgctaaactgctgaaatgtagtgagtttagcgacgcgattatcgcaaatatgtaa

SEQ ID NO: 374255 - DNA, 834 bp, Salmonella enterica
atgcatgtttttgataataatggaattgaactgaaagctgagtgttcgataggtgaagaggatggtgtttatggtctaatccttgagtcgtgggggccgggtgacagaaacaaagattacaatatcgctcttgattatatcattgaacggttggttgattctggtgtatcccaagtcgtagtatatctggcgtcatcatcagtcagaaaacatatgcattctttggatgaaagaaaaatccatcctggtgaatattttactttgattggtaatagcccccgcgatatacgcttgaagatgtgtggttatcaggcttattttagtcgtacggggagaaaggaaattccttccggcaatagaacgaaacgaatattgataaatgttccaggtatttatagtgacagtttttgggcgtctataatacgtggagaactatcagagctttcacagcctacagatgatgaatcgcttctgaatatgagggttagtaaattaattaagaaaacgttgagtcaacccgagggctccaggaaaccagttgaggtagaaagactacaaaaagtttatgtccgagacccgatggtaaaagcttggattttacagcaaagtaaaggtatatgtgaaaactgtggtaaaaatgctccgttttatttaaatgatgggaacccatatttggaagtgcatcatgtaattcccctgtcttcaggtggtgctgatacaacagataactgtgttgccctttgtccgaattgccatagagaattgcactatagtaaaaatgcaaaagaactaatcgagatgctttacgttaatataaaccgattacagaaataa

SEQ ID NO: 374256 - DNA, 555 bp, Salmonella enterica
atgcttattggctatgtacgcgtatcaacaaatgaccagaacacagatctacaacgtaatgcgctgaactgtgcaggatgcgagctgatttttgaagacaagataagcggtacaaagtccgaaaggccgggactgaaaaaactgctcaggacattatcggcaggtgacacgctggtggtctggaaactggaccggctggggcgcagtatgcggcatcttgtcgtgctggtggaggagttgcgcgaacgaggcatcaactttcgtagtctgacggattcaattgataccagtaccccaatggggcgctttttctttcatgtgatgggtgccctggctgaaatggagcgtgaactgattgttgaaagaacaaaagctggactggaagctgctcgcgcacagggacgaattggtggacgtcgtcccaaacttacaccagaacaatgggaacaggccggacgattaattgcatcaggagttcctcgccagaaggtggcgattatctatgatgttggtgtgtcaactttgtataagaggtttcctgcaggggataaataa

SEQ ID NO: 374257 - DNA, 519 bp, Salmonella enterica
atgccatttgctcgttatttctgcattttcataaacgttggtttgggagaaggctctgcattacctgttggtgtgcctgttccatggccttcagccacaccgccaacaggctggctgaaatgcaacggtgcggcattttctgctgaagaatacccggaactggcaaaggcttatccaacaaataaattacctgatttacgcggtgagtttattcgtggctgggatgacgggcgcggtattgatgcaggacgtgttttattgagtattcaggccggaatgctggaaaagcaccgtcatcctgttgtcgccaacgatgggtatgactcaaaagaggaatgggaactggcgacaatcttcagaagagcatatacgcaaggcagggggcttgatgctgccgctgccggagggagtctgatcccatcaccgacacttcattcacgagggagtatcggtaacactggcgggagtgaaacccgtccacgaaatattgcatttaactatatcgtgagggctgcataa

SEQ ID NO: 374258 - DNA, 360 bp, Salmonella enterica
atggataacgccgtattaaatagcgagcttattaccacgaaggcggggagtattaccgtctataactatgatggtgagacgcgggaatatatttctgcatcaactgaatatcttgcagtgggtgtcggtattccagcatattcctgtttagacgctcctggtacatctaaggctggttatacaatttgccgttctgtggatttaaaatcatgggaatatgtgtcagaccatcgcggtgaaatcgtctataacaccgaaacgggagatgccaaagaaatcacagcactaggcgactatcccgaaaatacaaccactatcgccccgttaacgccatacgataaatgggatggtgaaaaatag

SEQ ID NO: 374259 - DNA, 444 bp, Salmonella enterica
atgaacgaatatgtttatagcgcaaggcataatgcttttttccctgtggatatgattgataaatataaatcagagggatgggatttatcagacgctaaggaagtaaatcaaaatattatcagtgagtttatggctgaaccgccacaaggaaaaatccgtattgccggagatgatcggctgcctgcgtgggcagatattcctccacccacgcatgaagagcttattgaaattactgaatcagaaagacagctactaattaaccaggccaacgaatacatgaacagtaagcaatggcccggtaaagccgctattggtcgtctgaaaggtgaggaactggcgcaatataatttgtggctggattatctggatgcactggagctggttgatacctccagtgcgccagatattgaatggcctacgcctccggcagttcaggccagatga

SEQ ID NO: 374260 - DNA, 465 bp, Salmonella enterica
atgcaaaatctaactgtctggattagagctatagctaccttctttttgtgcttagcattagcatcgactgataaaaccatttataccttacttgagcaggcttctgctggagtaataggttcaatacttggaggtattaccgcaggtatctccgttatcttcggaattttggctgtcattaataagggcgagaaaagcacagactttacggactatttagatagtttagaattagatttgaaattactggtcatgtgtctggcagtaacaatcttccttccctatttacgtaattatgacataccactagtaaattatcctcagcacgaatttatcccttctaaaggcaagctatttactgctttagaactttttgctatcgtgctatctcttaacctcattgcagaagtgattagctgcatgattttagtggttaaaaaaagtttcaaaattgaatcaaagtga

SEQ ID NO: 374261 - DNA, 615 bp, Salmonella enterica
atggactgcatttcaaaacaaaaattcacaattattttaatagtggtgttaattgccttgggctgtgctgcttattttggagatggtgaaggatattttataggtagctttgtgcctgaatttactggagtgtgccttgagcttcttattattttaaaggtttttgaggtctggcagcaaagagatgagaaaaggaaacttattaaggttgaaagacgattaagggagtttcttattttctttctgaaccatacgtgcatggattttcctccatcctgccgtccagggcgtttttatggaattgactatgagcaaaatcaaaaagcattagaaaaattaatcaatcatattgaagaaaaaggattagctgaaaatcttgttattcaagttcaaatgtattgtaagagtgaatgtcaaattataaataatttaatcccagtttcttctgagcttgaaaatgatcactttaaatcatgggttcggattgcctattatatgaatgccgttgctaatgggcaagaaaaggctagtgttgcaatgattaaaatacttgaaaatataaaaagatttgataaggaatctcatgataaaaaactttatgttggtgcaaattag

SEQ ID NO: 374262 - DNA, 810 bp, Salmonella enterica
atgtatctgattaacggccaatccactgaacgactcgcggtgaatgaccggggggtgcagttcggagacggttgctttaccactgcgcggatcgcggcgggggagattgccttgttttcccgtcatctggctcgcctggaagaaacgtgctctcgtttggcgatcccctttaacgattgggatgtattagtaaaagagatgcgctgcctggcacaaccgcatcgggaaggcgtgctgaaagtgatgattacccgcggcgcaggcggacgcggttacagcgccgccagttgtcaattacccacacggattcttagcgtgtcgccttaccctgcccactacgcccgctggaaagacgagggcatcactcttacccttagtcccataccgcttgggcgcaatccttatcttgccggattaaaacatctgaaccgcctcgaacaggtgttgattcgctctcatcttgagcagacggacgccgatgaggcgctggttcttgacagcgagggatgggttacggaatgctgtgcggctaatttgttctggcgtacaggcgacattgtttttacgccgcgtctggatcaggccggggtgaacggcattatgcgacaattttgtttacgccaactggcgcaatctcctttccaggtccttgaagttcaggcgagagaggaggcggtcaggcaggcggatgaggttatcatctgcaacgcgctaatgccgattattcccatacgcgcctatcacgggacgtcgtattcttcgcgaacactgtttcaatttttagccccattttgtgagcatccgaattag

SEQ ID NO: 374263 - DNA, 543 bp, Salmonella enterica
atgaaaggaaaatttgccgctgccgtattattcaccgcaatggggcttgcttcgactgcaatggctcaggatggccaggttaattttaccggcaaaatcatcgaagcaggttgcaaaattaacggcagtgttaccagctctcaggatgtcaagctgggcgaggtctctaaaacagcgtttaccgccgctggctcaacggcagcaaccaccaagttttcattggtattaaccgcctgccctgcagatctgctggggaaaccggtttccgtaaaatatgacggtatgccggacaccctgaataacgactatctgcaaattaccggttacggtactaccggcgtcgctaaaggtgtcgctatccagttgttgaatagcgataccagcgaactgccgctgggtactgagtctaaatccgttaccattgcctccgatgcggcagaagaaacgaacctcgactttttcgcccgttatatcgcgacagaagatagcgtatcaggcggcgatgccaacggcgtcgttaactttaccctgacctacaactaa

SEQ ID NO: 374264 - DNA, 678 bp, Salmonella enterica
atgaataaatatagtttactcactgccgccacgcttatattcactacggcaaccgtacaggccggtgttattatcggcggaacccgtattatttataacggcgataaaaaagaaacgtcgattagcgttaaaaatccggaccaatcttcttatctcattcagtcatggagtgacgccggggaaaaaagcagcgataaatcgccgtttatggtcacgccgccgctttttcgtttaggcgcagggcaggaaaataatctgcgaattctccgtactggcggcaatctgccggaagatcgtgagtccctctactggatgaatattaagtcgatcccatcgacgacggaaaagcaggataacgttaacactctgcaaattgcggtgaaaacccgcattaaattaatttaccgtccgcaggcgttgacggagcaaccggaaaacgtcaccgcgaagctgacctggcagcacagcggtaaccgtcttaccgtgaccaatcccacagcctactatatgaacttcagcacggtgaagataggaaccagcaccgtgaaagacgctacctatgtcgcgccgatgagttccgccagctttaccgcgcccgccgaagccagcggcgacgtaacctggacacttattaacgatttcggctctatcgggtctgaacaccacacacgcctgtaa

SEQ ID NO: 374265 - DNA, 2556 bp, Salmonella enterica
atgaatgcagacgcatacaaaaaaataatgacgctcagtcgaatcgcctgctttatcgccctgcagtgcgcactgccagccggtaacactgcgtttgcccgcgaatattttaacccagcgctgctggggatcgacgggccgggaaaagagcttaccgatctttccgcttttgaagaaggcataggccaaatgcctggcacctatcgcgttgacgtcattgtgaataaatcgtccgctggcgtgcatgacgttaattttgttatgcaaaatgatacggcaggcaacaccactctgcagccctgcttcagcgttgactcgctgcgcgagttcggtattcgtaccgacgcgtttccaaatcttgctggtcacggcgactgcgctaacctggcggcgatcccgcaggccagcgccgagttcgcctttgaacgccagcagctacggctgtctattccgcaggccgccgtagacagccatgcccgcggctacgtcgccccggaacggctcgatgagggcattaacgccctgctgctcaactatagcttttccggcgccaacaccgaagcgcgccgcggcgatatgaccgactccgacagctattatctgagcctgcgtccgggcctgaatattggcccctggcgcattcgcaactacagcacctggaatcgcaacgtcaacggcgatagcgccgatgaaagctgggattcgctctacacctacgcccaacgcaatattatcgcgctgaaaagtcagctaacattcggcgacagcaccgcgccctccgagctgtttgatagtgtgccgttccgcggcgcacagctggcctccgacgatgatatgttgcccgatagcctgcgtggctacgcgccggtggtgcgcggcatcgcccgtactaacgcgcaggtaattatcaaacagaatggttacaccatttatcaaagctatgtttcgccgggcgcatttgagattaccgatatgtacccaaccggcagcagcggcgatcttgacgtcacaattaaagaggccgacggtagcgaacagcatcagacggtggccttcgcctctctgcctattctgcagcgcgaagggcggctgaagtacagcgtgaccagcggccagtatcgcccctatgagagcgatattgacaaaaaaatgtttacccaggccaccttgatttatggcctgccagccgggtttacggtatatagcgggggccagttctcacagcactacaagtccctgctcaccgggcttggaaaaaacctcggcgagttgggtgccgtctcggtggatggcactcaggcatggtcaacgcaaaaagatcaggataaagagagcggccagtcctggcgcatccgttacagtaaaaatattctcgaaaccggcaccaatatatccatttccggttataggtattcaacatcaggttattacactctcccggaagtactggatacctggcgtgacgacgagtcgcaaaataataacgaccgccgccgcaaccgtgctgaacttcagcttaaccagagtatcggtgagaacctggggtcactgtcgctcaatgctattagcgaagattactggaacagtgaccggaagatgcgctctctcggtgtgggttacagtaatagctggggcggcgtgacgtacaacatcaattacagctataaccgcaataccaccgacagtgacgatagcgacaaaatctacgatgaagatcaggtcttctcactgagcataaacatcccgctcgaccgctggttaagtcacagttacgccacctacaacctgaatactagcaaacggggcaataccaaccataccgtcgggctaaacgggtcagcattagaagacaataacctgaactggagtctccagcagagcgaaacgaatcacggcgaagggaatggcggttacgccagcctcgattatcaggggacctacgcacgaatgaatggtgcctacagctatgacaacgaccagaaacgcgttaactacggcatggaaggcggcattgtcgcccacgcgcatggtgtcacgctcagccagtcgttgggcgaaacctcagcactggtagaagcccccggggcgaatggtgttacgataagcaaccagacgggtgtaaaaaccgacttccgcggttacaccgtggtgccttacgtaacgccgtaccgtgaaaccgccgtctcactggataccgaaacgctgcctgatggtgctgacgtcgacctgaccagccagatgattactcccacgcgcggcgcaattgtacgcgcacattttgatacccgtatcggtaaaagggtactcatgaatttgtcacgtacccctacggagatagtgccatttggagcgctggcaacgatagagggtcaacctgcggataagagcttcatcgtgggtgaccacgggcaagtctatcttaccggtgcgcccgaacgcggaaccttaaaggtaacgtggggccgtacagcgaatgacacctgtcacgtaacattcaatttaacagaattgaatgcgactgatggtgtgatggaaacgcaagaatcttgtcgttaa

SEQ ID NO: 374266 - DNA, 999 bp, Salmonella enterica
gtgaaaaaaacagtcggccttgcgttgttaatatctgtgtgcccgttgataacgtccgttgatgctcttgcaggtatcataaatacaagcagtgcgaatacatcaactttaccttataaattcagctcctttactatgccgagttcggccggagggacaacctggtttgacgactggggggaacactggaaattgccaataatagctagcagccaaaaaggttatattgattttactgtgaatggcgaaccgacagggggaacgactactaatgacgcaacggtgtataaaaccaataacccgggtgtaggcattgcctatcaaatgacttacaccccagcgggcgtagtaaccccggataaagattatacggctccatttcgtttagacgtcgatagtaatgtcaacgcatccggcgacctgattattcgctacatgctggtgcgtttaacggatgaactaccagcgggccccattactgaggtgccaagcgttactgtttcttatcataacccagcggatagcgggtatggagatgtgactttcgtggcccgttctggtgtggctagtcagccaaagtatacggcttgtggaattaacgcaccaacagaaattaaactcaacccactttatgggaatagcctaaaaacgggcgcacaaaatagtattcaggcgccgacgataacgctcacaaactgcccgggggccatcaatggtatctcttataatttttccgcagtctatggagcccacgacgaggccaatggggttcttaatactgtgacgggtgatacctacgcgaaaaatgtttatgtgcagatacagaataccgatggtacgcctcatacaattaattcagcgatcgcgctccagaattataacggctccggggattatgtgttgcctgactttaaagtgtcttattttatagatgatgctgaaagcgtaactgcgggtaatgtcaaaacagccattgagcttaaagttacttacaactaa

SEQ ID NO: 374267 - DNA, 495 bp, Salmonella enterica
gtggcattcatcattgcgcttggttggttattttcctcatccagtcaggctgtcaatattgatatcagcggtaccgttatcgcctcaccttgtgtggttaacggcggcgatgagtctctcgctattaatctggggaccgggattcaggccaatactctggaaacaagtggcagcactaccccatgggttgaaaagacattgacgctcaccgattgcccagcctccaccacctcatttagcgtagcctttgctggcaccgccgacacggatacagacttctacaaaaataccggcactgccaccaacctgaagcttgagttaacggatgacaaaagcgagcacgcctataaaaatggcgctgctctgaaggacatcgcaatcccatccgacacgcatgcctatgacctgaaactgcgctcccgtgcagtggcaacaggcctcgtgatgccaggcaccatcgagggccaagtacaggcaaccttcacctaccagtaa

SEQ ID NO: 374268 - DNA, 525 bp, Salmonella enterica
atggcgcaacagataaataaactgctccccgcgttggcctgtctatgggcggtaagcagtatttattccgtgcaggcaaccgatattaacctgagcggtatagtaattgcttctgcctgcatcgtggatacgggcacaaaggaacagacggtcacgttccagcaggcacgcgccgttgattaccttaaggtgggcgataccagtgagtggcaggattttgaactgaccctctcctcctgcccgccatcaactactcaggtgactgccctgttcagcggtgatgccgacactgacgatgccaccaaattcgctaacagccagggcagcgctaccggtatggcactggaaattatgacccgcgatcatcagacggaaatctcaccggcggatacgctggccgtgaaagtgaacggcaatgaccaccgggccgttttcccgctctctgcgcgcatgtacacaccgacgggtcgcgtaacgccaggggaattcaagactgtcgttcaactgaactttacgtaccagtag

SEQ ID NO: 374269 - DNA, 447 bp, Salmonella enterica
atggccccacattttagccttatcgctgtcggggctggtgaccacggtaaaaatggtgtcgatactggccgtcgcgctggcgttatcgtacagcgccgccgtaatcgcgaccttcgtaccgtgggtatccgggcgggtgacgttgataattttgctgccgtcctcgccggtcagttcgccgattttggtggcggtatcgttgagcgattcaccgtcgatgaccaccgcagaaacgatgccgtcgccgctaccggcgatatgtttttccccctggcgggtatagccgtcgccgcgactgagcacaaacggcgcatccgggaccggattgccgctggcgtctttcgccgtcaccttgagctgaagggtgtcgccttttttcactttcaccgcgtgctcgccgccgacgtcataccacagcgacgtatctaccggttcgatggtaattga

SEQ ID NO: 374270 - DNA, 630 bp, Salmonella enterica
gtgaattttattgccatcgttcgcggcatagagtgcgctaagctggtgatcttgcggcagatgattaacctcgcagcctccggcgttggggttgttcagcgcatcggcatgggtaacgcgcgcccaggtttcgttattctgatcttcggtcctggtcgcggcagtcgcttccgccgccagttttggccgctggaattccatattgtccacggtgatagtatccgccatatgtccccacatatgcgcttttggcgtgtcggggctggtgggtacggtgaatttcacgctgcggttgacgggggcggtgatcagcgagtggagcggcagtacggtcagcggcgtcagcaagccgacgccctgcggctgttcaatcaccagcgtggcgttcccctcggcatcggtgatgccctgatacgtcatcgacgcctgggaggagccaaacgaggttccccccatgaccaacgttccgtcgctggagtcggtaaaaccggtcgtcgcgttgtcgcgatttttgccatgcgacatggtcacggtaaacgcggcgttaggcacagtcagtccgttcagcgcgttgacggagtgcacgttcatcgttacctgttcgcccactttggcgaccgcattgcgtaa

SEQ ID NO: 374271 - DNA, 5586 bp, Salmonella enterica
gtgaataaagtggtacatttcttactgacattactgatcatgtttgcagtgtcgatcgcgcctgcgcaggcgttattgaagggcgggacctggcaagagctgaactcgacgaccggcgcggttaacggcaccgcgccgctggccgacggtgccactattcccctgtatcagggaagtatgctgcttgaccctaccaagacctacgatatcgagtttaccgccatgccgcgcgattttagcgctgatgcctcctcaacctcgatgcgtgcggtcaactccaccgatacggaaggcgatctctttaccgatccgccctccatcgcctgggaaaatcaagaaccgccgaccatgagtctggtatgggccgatgccgccacgccggatacgccgctctcgccgcagccgattcttaaccagaccttttgcgcccaaaacctcgccgggcggcaactggtggcctgggcgcaggtggaagatgaaacgaacgttcccgcgctgtggctctatacccgtaccggggtgccgaacaatgcggtcattccgctacttagcccgaaagtgacgctgaatatcaaaccggcggtgagcgatcctgtttctgtgagcggcgatcatattgacgccaactttgcagcctcgaaagtcaaagcgggggagagcattaccctcactgtctccaccaaagcctgtaatggcgacgtggcgccgaatgctgccttcgtgatccgtcgcgaggatgcaataaatcgccagggcatggtcaataacgctaacccggtgcgcgttggcgataccgagttaacgactacgcaaacagaatatcacggtgtaacggacgggcagggcaacgccacggtggtggtgacgcaagagcaaggtccgggggtaaaaacacgactcatcgtctcttcgcaaagctatcccacgctgaccgacaatgtcgacgtcattttcactaccatcaccagtcctgacagtgataaggccaacatgtacggtcatatgcttgagaacgccacggcgacgctgaacggtacgacctacactttcacccgcccgaaactggcggcggaaaccagcggaaatggcggcaccgttgtggacaccaacgaaacctgggcgcagtttacctggagtggcgcggataaccattgcgacattctgccggatgccgaacaactggtggcgctaaggcatgagcatagtgcgttggcaacgtacaccggctggccggtgacgggcgatgcggaatactggtcgtcaaccaaagatcagataaacgactaccacgctgccgtgcatatgaacagcgcgtcggtcgtcagggccgccaacagcgacacgctactggtcagttgtgtggataaggcccagcctgcggcgcatccgcagataacgctctctccagaggggccgtataaagcacaggtgggggaatcgattgatttagtgatgaccgttgtggatcgcgacacgcaaaagccgctgccttatcgctatatggagctgttcattgaccctgcgaaaaaccgcaaaggagagcatcaggacgcgtgggataaccaacgggttacaatcaacaccgaagatatgcgcgcctcgtcgccggaacactataccggtgtgaccgacgccaacggccaggtacacctgacgttaaaacacgacagcggcctgggcgtagaaacgcccatccgcatcgtgatgccggatgatgaaggcggcagcatcgagttgccctttagcgtaattttcaccgtgataaccagcccggatgtggacggcgccaacatgtggggccatatgcagggcgtggtggacgcgggcaacctgtatagacgcccgctgctggcggtggaaaccagccacaaagacggccagttcagcgaaaacaacgaagagtgggcgacgtttaattcagtggaaaaagccaccgcgcagtgcggcatcggccaggtgccggatcagtcatcgctggcacatttatacagcgaacatgctggcggcaagatggaaagcgaacatggctggccaaccgaagactattacatcgccgcggacagcgacgcctcgggaacggcgcacgtcaaccttgaaaacggcgatagcggtaaatttaccaatcaaccgaactacctgacctgctcggccaacgaaatggtggcggtgctggacgtctacttcaacgatgacccggcgaccaaaaacagcgatatggttgccaaagtgggtgaacagattaagctgaacattcattcgcgcaacgccctcaacggcatgccgatcgcctataccgacttcaccgtcaccatggcgaacggcaaacggcgcgacgggctgacgaccggttttaccgacaccagcaatggccagatgctgtttgatgacgtgggctaccttgccgggcaggcttatcatgggatcaccgacgccaacggcgatgcgaccattatcctcacccagccgaagggagtagggctgctgacgccgttaagcattgcgcccgtcgattcattaatcagcacgcccgtttcccgcagcgtgaagtttaccgtcgccaccagcccggatacgccaaaagccaaaatgtggggccatatggctgataccatcaccgtcggcgatctgacctttgagcggcctaagctggcggatgaagtgacgccggaacgtactcaggctgaggctaacgaaacctgggcgcgcgttctgcaccctgacgcggcgggcaacccggataagggcggctgcgcggcgaaccgcctgccgcgcatcgatcagcttgaggcgttgtacaacgccaacagcgacggcgtgatgaaaagcacccagggttggccgacgctgcttaactactggtcttcgaccttccagagcgctaccacgtggaaactgatctcgctgtttagcggcagtgaattcgccaacgccaacgtctccatttacgccagctgtctggccagcgataacccggcggcggcctcgattaccattgaaccggtggatgcgtcgcagtggtacgatggcagcggcgttcacgcggtcaaagcgaaaaaaggcgacacgatgcaactgaaggtgacggtgaaggacgccagcggcaacccgatcccggaagcgccgtttgtgctcacccgcggcgacggttacgatcgcaggggcgagaagtacaccgccagtgagggcaacgatcagcaaggcatcgtcacgcccgtggtgatcgatggcgaatccctggcctggaccaccaccaaaatggggatgctgaccggcgctgacggcacccgcatcatcagcgttacccgcccggacacacacggcacccgaacggccattatcgccgcgctgtatgaaaatgccgccgtgagcgccagcattgacaccatctttaccgtcatcaccagcccggatgtcgacgttgcccgcatgtgggggcatatgttgccgtcgctcacggcggcggatggcgcggagtatcagcgtccacagctctacgctgaattagccaatcaggcaagtgccgcgcaatataccgaagacaacgaaatctgggcggggctttatgggccagacagttcaaaaaccgaccccgctgttaactgcgctgcgggctatttcccttccgtcgaggcgctggattcgctctacagcaaatacccaaaccgcacgataaaaaccgcccagggctggccgatcaaccgttcttactggagcggttccagttccgggtcgttaaccggcggaaagccccgatcctattacattgtcgatctggatgatgattcgcgccggggcgtcgttaatgacggtgtgaacgacaggcaataccaaatttgcgcaacgacgccgaagacgcaggctacgcaaattacgctcacctccacgctggcgacggatgacactattcaggcggtgaaggctaaaaacagtgagtcgatcccactgctcgtcaccaccaccgatgcggcgggtaatccggtgccttatacgacgttttcgcttaagcgcgacgccgggacgccgcgtaaagctgactacccgtttaccaacagctacaccatgacgatgacgcagtctggtggcgcgacgcaagagtttgcctacagttcatcggttctttatggggcgaccggggcgaacggtacgttggccctttcgcttgacgaacctggcggagtcggggtgaaaagcgtggtgactgccagcctgtatgatacgccgacagtaacctcgtcgctgccggcagtgtttaccgtcatcaccagcccgaacagcgacaaggccaatatgtacggccatatgccggaaaccttcaccgccagcaacggcgcggagtttatgcgcccgctgctgtatggcgaactctcatcgcagaatcatacgtcgagttacttcgaaaccaatgaaacctggtttacggtgaataattttaataccgggaattatggcgcgtgcccgataaatcagatggccacgcaggatgatctccagtcgctgtaccgcgatcaccccaaaggtaagatcacgaccgacattggattacccatcaagaaaaaatggtgggcaggcgacagcctggtaaaaaatcaatccatttactggcaatttaccgatctcaatacgggtaatggcggcaccacgttggaaactccggggaatttctattaccagctctgtctgacggaaccgcgacagatgaagattgcgttatctacggacgtgtggaacgcggataaatcggcggcggtggcgaaaacaggcgaggcgataccgatgacggtaacggtgactaacggcgccgggcagccgcaggcgggggcgacgcttatgctgacgcgtgattactcttattcgcgtggcacggtggatagcaaatacattcaggccggtgtgattggcgagccggttgcgtccaaaggcgcgttatcagacatgaccctgacgccggtatcgcctgcgggtgcggcagtggtgtttaataaccagaggggaaccagcacgaaatggtatggcgtcaccggcgatgacggtaagttgcggttcacgttaaaccaggataaatcgctgggtttgagaacatccatcacggcgacgctttcggagctggctggcgagacggcgagcgtcgatgcgatctttacggtaccaaccagcccggatacgccgtatgcgtcatactggggccatatgccggataccgttgaggttaacggcgttacgctgcgccgcccattcctgaaaacagagatgtccaaaatgccgccaggcacctggccgcttaataatgaaacctgggcggcgaactatattgattatggtgaaacatccattcatgctacgacatcgctgccttatctttgcggctcgctggaaaacgccgcgacgctggacgatctgaaggcgctgaagaacatcattggcgacctgcactggcctacggctgcgccggcgtcgtcgtatacatatgactatgcatcgcaaacgatggttggcggtaagtattgctcatttaacgaaacgaccaatacggaaaactgtacgctttcaagtcaaggttttgcttatgcctcgtgccgggtgcagtag

SEQ ID NO: 374272 - DNA, 2379 bp, Salmonella enterica
atgaaaaatataaaaagccagggaaatggcgaacagcccgctatttctcgccgccattttatccaggccagctccgcgcttattgcgttaccgtttgtctcctcgccagctaccgctcaggcgcgcgctgtgacggcaactgaaaacaggcctgcggaaaaagtcgttcagacatgcagcacttttgactgcgggggcaaatgcgatattcgggcgcatgttagtgacggtatcgtgacgcgaatttcaacgcgaccggataatgcgctggatgcgcaaatgccggtgatgcgtgcctgtgttcgtggacgcgcataccgtaaatttgtttatcatcctgacagacttaaatatcccatgaagcgcgtaggaaaacgcggtgaaggaaaattcgagcgaatttcctgggatgaagcgacaaccttaatcgccgataatttaaaatcgattactgaaaaatatggcccggcttcgcgctatgttcatgttggcaccgccgtttccggcggcaccttttctggcgataaaatggcgcgtcgcctgctgaatctgaccggcggctatctcgaaagctaccattctgtgagtatgggcaacacggcggccgcgacgccttatacttacggcattgccgccagcggcagttcgctggatacgcttttggagaccaaactggtgattctgtggggccataacccgacggagaccatttttggtcataccaactatttcttgcagaagatgaagcagaacggtacgcggtttatcgtggtcgatccgcgctattccgacaccgtttcgtcgctggcggatcagtggatcccgctgctgcccaccaccgacaatgcgctgatggacgcgatgatgtacgtcatcatcagcgagaatctgcacgatcgcgcatttattgcgcgctacgctatcggttttgacgaagactcaatgccggaaggcgtaccggctaacgaatcgctggtggcgtatctgaccggcgccaaagacggtgtcgttaagtcccccgagtgggcggaaaagatcacccatgtgccggcgcaaaccattcgccagttagcgcgtgattacgcgaataccaaacccgccgcgttgattcaggggtggggaccacagcgccacaactgcggcgagcgcaccgcgcgcggctcgactctactggcgaccattaccggtaatgtcggcatcaaaggcggttgggctgcgggttatggcggctgcgctaaccgtaaattcgccgtgggtccggagatgccggataacccggtaaaagccaaaatttcggtgatgaactgggtgcaggccgcagacgacgccagcaaagtgacgccggatattggactgaaagatgccgataagctggacagtaacatccgtattctgttctcgctggccgggaactatctggcgaatcagaaccccgatctgcaccaggcggtacgcgtactggaggatgaatcaaagatccagtttattgtcgccagcgatctgtttatgacgccgagcgcgaaatacgctgatctactgctgccggaaaccagctttatggaacgctggaacatcggtgaaacctggggcacggcaagctacctgatactctctgaaaaattgatcgagcctgaatttgagcggcgctccgactacgactggctacgtgaggtggcggcgaaattaggcattgagaatgaatttagccaggggcgcgatgagaaagcgtggattgaacacatctgggaacagacgcgcctggcgatgccggacgaaaatctgccggatttcgccacgctgcaaaagacccgtcagcatctgttcaaaagcgcgccatttgtcgcctttgaagacaatattcgcgatccggacaatcatccgttcccgacgccgtcagggaaaatagagatcttctcgaagcgcctgtacgacatgcagcatccggaaatcccggcgttgtcgcactacgttcccgcgcatgaaggcccggaagatacgctggcgaaagattttccgctccagttaattacgtggaaaggaaaaaaccgcgccaactcaacgcaatacgctaacccgtggctgattgaagtgcagcagcagacattgtggatcaacccgcaggatgcgcaaaagcgcggcattgcgcatggcgacatggtgcgcattcataactcacgcgggatttgcgaaatcccggcggaagtgacgccgcgtattattcccggcgttgtcgcgatgcaggccggcgcctggtggcagccggatgagaacggtattgataaaggcggctgtgcgaacgtcctcagctcggcccgtattaccgcgctggcgaagggaaattcacatcaaaccatgctggtggaggtggctaaagcatga

SEQ ID NO: 374273 - DNA, 1035 bp, Salmonella enterica
atggcttactcagtacaaaagtcgcgcttggcgaaggttgcgggtgtttcgcttgttttgctgctcgctgcctgtagttccgattcgcgctacaagcgccaggtaagcggcgatgaatcctatctggatgccgcgccgcttgctgaacttcacgccccggcaggaatgatcctgccgataacgaccggcgactacgttattccggtcacgaaggggagcggcgcggttggtaaggcgttggatatccgtccgccagcgcagccgttagcgttagtgagcggcgcgcgtacccagttctctggcgataccgctacgctattggtggagaatggccggggcagcacgctgtggccgcaagtcgtcagcgtgattcaggcgaaaaattatccgattgaaaaacgtgacgatgccagccagaccctgacgaccgattgggtgaactggaaccgcctggatgaagacgaacagtatcgcggacgttatcaaatctcggtgaagccgcagggctatcagcaggcggtaacggtaaaactggttaatctggaacaggctggcaagccggtcgctgacgcggcgtcgctgcagcgctatagcactgaaatgatgaacgtcatttccgccggtctggataagaccgctacggatgcggcaaatgccgcgcagaaccgttccgccgcaacgatggatgtgcagagcgccgctgatgataccggtttacctatgctggtcgttcgcggtccgttcaacctcgtgtggcaacgcctcccggccgcgctggaaaaagtgggcatgaaagtcaccgacagcactcgctctcagggcagcatggcggtaacgtacaaaccgttgtctgacagcgactggcgggatctgggcgctagcgacccgggcctggcatccggagactataaattgcaggtcggcgatttagataaccgcagcagcttgcagtttatcgatcctaaggggcatactctgacgcaaagccagaacgacgcgctggttgccgtcttccaggcagcgttcaacaagtaa

SEQ ID NO: 374274 - DNA, 516 bp, Salmonella enterica
atgaattttaaaaaaaatgctttgcctctggttttgtttgcctctttttctcttgccggatgccagtccaatgcggatgactatgccgcagatgtttaccaaaccgggcagttaaacgcgaagcaagaaacaaagaccgtcaatattatctctgttttgccagcgaaagttgccgtagataacaccgccaataaaaaaaccgctcagaccttcggcgcaattcttggggctgtagcgggcggcgttactggtcataacgtgggttcaggtagcggtttgggtactactgccggcgcggttggcggcggagccgttggcgcagcggcgggttcattagttaaagataaaacgttagttgaagctgtatctttgacttacaaagaaggaacgaaggtttatacctccacccaggttggaaaaacgtgccaatttaccaccggtctggcgatggtgatatcgaccaaagataacgaaacgcgaattcaacccaatacgaaatgtcctgagaaaagctaa

SEQ ID NO: 374275 - DNA, 540 bp, Salmonella enterica
atgaagaaagttattttagccactgttttattcaccctaagcggctcggttttatcttcttctttgcaggatcagcttgcggcggtagcccaggctgaacagcaaggaaaaaatgaagaaaacagacaacgtgatgctctgcaagccaaacgagatcaagaggctcaacaggaaagacaaaggcaagccaatgcggccgcggttgctaagcagcgagcaaaagcggcagaagctgaacggaaagcacggcaagcaaaattggcagcggaagccgcgcaagataaagcgcgcgatcaaagctacgaagatgagcttcgtcgtttagaaattcagaaacaaaaactggcgctggccagggaagaggcccgggtaaaaagagaaaatgaattcatcgatcaagagctgaaaagtaaagctgcccagacagatgttattcaatctcatgctgatgcaaacagaaatctatctgaaggcggtcgcgatctgctgcaaagcgaaggtaaagcccgtgagaaaaaggcaagcggctggtttaactga

SEQ ID NO: 374276 - DNA, 270 bp, Salmonella enterica
atgaataagcttgtgctcgcaattatctcgacgatgttatcgattatctcgttttattctcttgccgcagaaccccgtcaggaacccaccgacgcagagcgagcccgtacggtttatatcttccatcaaccgattgtgatgctgcaggcgaaatttggcctcactacgccggaagaacgggtgttacgtattcgaaataccttacgcaacttcacaaaggcggatgtgaatgagccgctaaaaatcgttcctgtgacccgctataactag

SEQ ID NO: 374277 - DNA, 1479 bp, Salmonella enterica
atgaaagttaaagtcatcaccagcgcggttttgctggcacttatggtgtctcagcccgcaactgcagtcgacgccccacaatcgccgctaatgaaacaactcaataatggcaactggcttcctcaggaagaagcacagtcgctcagcgatgaactttactatcaggacgcgatccaggcctatattcagacgttgccgctgttgaacactattggcctgcgcgatggttcagaggcggcatttggcaaaggctataatgtcctgcctatctggaaagagcggatggacagccgcgccgtggtgccaacgccgaacggtgacgttatctattcaatgagctacctggatctgaaagaaaccggtccgctggtcatcaaagcgccaccgaacgtgattggcatgtttaccgacttcttccagaaaaccattaccgatgtgggcgctattggtccggatcgtgctcgtggcgggctgtacctgttattgcccccggactacgacgggccggtgcctcaggggtactacgcgtttaaatcctcgacctacaatgtgttcctgttcttcagaaccattatgggcaaaggtgacgggaagcctgatccggttccggcggtgaaaagcgcggaaacaacgcgcgtctatccgctgtgggatgttgaaaaagaagtcaaaccgatgcagttcccggacgccagcggtaagcgtgtcaatatgatgtacccgaccgacgccagctactggcagaaactgaaaaccttcgtggactatgagccgttgacggcaatcccggaagaaacacgcagcgcgttactgagcattgggatggtgaaaggcaaaccgttcaacccaacggcgaagcagcaagagatgctgaaaaaagccgtcgagaccgcgccacgcatgatccttgcgcgtcgccaggtgggccgggacgatcaacgccaattgtattacaaggaccgccagtgggaaaactcatgggcgggagcaacagcggagtggatgcagtacggcacgcttgatgccaatcagcgcgcagcatttttccagattgcctattccagcgccgcggcaatggtgatgcacaccacgggggcggggtctaagtatccatatgcggtcaaggacaataccggcaagttccttgatggaagcaacacttacaagctccatttgccgccaaacccgccagcggcgctgttctgggcggtcaccgcttataacatcaccgacggtaccatgccggaaactgaccagttactgccgtcgaccaatggctattacaacatacccaagaacaaagatggttctatcgacctgtggtttgggccgaataaaccagaaggcgtcgccgacagcgcgtttattaaaaccgtttctggccgtaatttcctcgtggcattacgactttatggtaccgaagacggtttctatgaccagacctgggtgccggacgatctggttcagaccaataaataa

SEQ ID NO: 374278 - DNA, 1464 bp, Salmonella enterica
atgaaaatgaaacacctggcgatgttgactgctctgacgctcagcgccggagcctttgcccagaacgcaccgctgacgatcccgcatccgaccaagtttgatgagctgaagcaaccgtcaccggacgtcacgatgccggagagctatgtgaaggccattgcacagcaggcctacctttggggctggccgatggtgaaccagttcaaccgccgtgaaaccatcaccaaagcgccatacccggcgcttaacggtgggatggttccggtcgcgccgatgggccagctcagcatgctcaccgactacatcaaaccggaagagaccttcgttacctgcccgaaccaggacgtagcctacggacttggcttctttgagctggataaagagcctgtcgttatccaggtgccggattttggcgaccgattctgggtttatgccatctatgatgcccgtaccgatcagattggtaatgtgggtaaaccctatggaacgaagccaggtttctatttgctcgtgggtcccaactggaaaggtgaaacgccaaaaggctttaacggcgtaattcagtcttcgacagaaatggcgaacgtcattccccgtattcagatggatgatacgccggaagatcgcagggcgattcaagcgcccatcaaagaagtgatgacttatccgttgagtcaatttgatggcaagatgaaatcctatgagtactccaaaatcccggcgatcggtgataaaccggatgccagcgccggagaaacgccttgggtcgttccggaaaaattctttgaccagttcgctaacgtgctggaaaaagtaccgccacttccgggtgaagaggccctgtatgcgcagttccgccatctagtagacgctggcaagaaaaacccggaaatccgtaaatggatggatgccgccgctgtcgagacggacaaaaccgtcatcgcggatttctttaaatggaagaacaacggtgtgcctgcaggcaacggctggaaccgttccaaaaataacgccgagtttggtgtggattactacaaccgtaccggtacgtccaaatccaatatgttcgacaacaagccggacgaaacgcagtatttctacaccgacaatgatgccacagggaagcagctttcaggtgagcatgactacacggtaaccttcccgaaaggcgggcttccgccggtgaagggcttctggtcacttacgctctacaacagcaagcatctgttcagcccaaatgaactgaaccgttattcgctggggacgaaaaataaaaacctgaagtataacgaagacggttcactgaccctctacgtgagcaaaaagcgcccttctgaggataaagtgaataactggctgccggcacctgacggcaacctgtcactctatatccgagcatattggggggaacaaccaattctggatggtacctggcagccgccaaaaattgaaacggttaaataa

SEQ ID NO: 374279 - DNA, 405 bp, Salmonella enterica
atgacgattttagtgacggtgcaggctcagctcattactggagaagcgcagataataaaaagccaggctcctgaggggatgctggccgccgtatttgaagatgacggccagaccgggtatttctacgcgctcgatgaatccgttgaaggaaacccgattcaggatgcagtgcatatctacaatgtcgaggatatttcagacggtcacattccttctgacgttaaaatcggctggtcagaagacagtcagaagtgcgtgctccttatcaacggatatccgcatggagcattcgatttcgtggggaaaaatgggtactgcagaagcggatttcctcctccaataaacaaggtatggtctgtgtccggccatgagtggagcgattcggtggatgactttttccggtga

SEQ ID NO: 374280 - DNA, 132 bp, Salmonella enterica
atgataatcacacctttttccccacgcatctatttatctcaatatatgaaaccattaaatatcatccatagtatgaatatttataaaatggttggatatatttatattaattataaattaatcaaaggttaa

SEQ ID NO: 374281 - DNA, 2040 bp, Salmonella enterica
atgccatttatgcaacaagacccgcgtcgtctggtctggcagcaaaacgatcgctatttatggattgaaccctggggcgagaacagcctgcgcgtacgcagcggccgtcatctgccggtaatgagaaatgaagactgggcattgactgagccagtcgcagaaagtcagtgccacattgattatgagcaccaccaggcaacgctgaccaacggcaaaattatcgctatcgtcaatcaaaaaggacaagttaccttttaccgccatccacacaaacccctgttgcaggagttctggcgcctgcggggcgaaattggcgaggatgaatcatctcacggccagtacgtcagcgcactcaaccttgagggacgcgagttccgccctattcagggtgggaaatattcactgaaagcccgcttcgaagccaccgaaggggaaaaaatttatggtatggggcagtatcaacaggccaacctggatctcaaaggatgcgtgcttgagctggcgcaacgtaactcccaggcctcagtaccgtttatgctctccagtctgggctacggatttttatggaacaatccggcagtcggacgcgtaacctttgcccaaaacgttaccgaatgggaagcgcaggtcagcgaacagctggactactggatcacggctggcgataccccggcagaaattagccgggcttacgcgctggctaccggcacaccgccgatgatgccggactacgccatgggcttctggcagtgcaaactccgttatcgtacgcaggaagagctgctggaggtcgcccgcgaatataagcgtcgcaatctgcctatctcagtgatcgttatcgacttctttcactggccgaatcagggtgactggatgttcgatgcgcgcgactggcccgatcctgatgccatgattgccgagctgaaatcgctgggaattgagctgatggtctccgtctggccgacggtagataaccgtaccgaaagctatcgggagatgcgcgaaaacggctggctggtacaaacggaacgtggcttgccgatcaatatggatttcctcggcaataccacttactttgatgcgactcatccgggcgcgcgcgactacgtctggggcaaagccaaacgcaactattacgataaaggcgtgaagctattctggttagatgaagccgaacctgagttcagcgtttacgactacgacaactatcgctaccacgccgggccggtactggaagtgggcaatatctacccacgtatgtacgctaaaaccttttttgacggcatgaaagccgatggcgaagaccaggttatcaacctgctacgctgcgcctgggccggcagtcagaagtacggcgcgctggtctggtcaggtgatattcactcctcgtttagatcgctacgcaaccagtttgccgccggactcaatatgggaatcgcggggataccgtggtggacgacggatatcggcggtttccatggcggtaatattcacgacccgaaattccatgaattgctgattcgctggtttcagtggggcgtctttagcccggtgatgcgtctgcacggcaaccgcgatccgcagattttacctgcacaaccgtaccgggatggtatcgcccagtgccctacaggtgcgccgaacgaggtctggagctacggtgaggaagtatgcgacgtactgacaggttgcctggcgttgcgagaaaaactcaagccctatatcaaagcgctgatggaggaaacccataagcacaattcgccagtgatgcgccccctgttctttgaattccccgaacaggaaacaagttgggcaatcaccgaccagtattgttttggtcctgacctgctgatcgcccccgtcatgcatgaaggtatgcgcgagcgtgatgtctggctaccagaaggggaaacatggacggatcttgcgaccggtgaaagctattcaggagggcagacgctgcattacgctacgccactgaacagaattccggtgtttatccgcgaaggtgggcagtaccgtagcctgctgaacttgtag

SEQ ID NO: 374282 - DNA, 1254 bp, Salmonella enterica
atgtttgccaatattaatgtggactgctgtaaaacgccgggatgtaaaaatctgggcgtgttgaacagtccggattatgtccgccagggaaaagatgttctttgtcgggaatgtggtttcctgtttcctgttatttccgctggggcgttaaatctttttcgccacacggtaaaccggggatggaaaggcctggtcaaacagtgtcctgcctgcggcagcacctcattaaagaaatacggcttctcgactcagggagaacaccgcatggcgtgtagtcagtgtcggaaaacgttcatcgtccccgaaaaggcaaaaagcgattgccgacaggacgagctggcaaccctaattgaggaagggacatcgcttgccgggatccgctcacagctgaaattagacagcacaggccttaaccgggcgctgtttaaactatcccgtaatgcaaaccttgcggagcgatgccagcagtttccggccttcgatatcgcactcagcacccgcgctttccgggtgaactataacggtggagacagcagcctgtatgttctggtgacggcagaagaacaaagcggaagggtggtggcgatttcgtcaaattattcagcacagccgctggataaagcctggcagtatcagtcgtattatgaagaacggctacctccgggaacactggcgcatatggtgcaacgtaaggaagcgattacagcgcgccgcgaaactttatttgatatcgattacggtccggcctcgttatataagaatgactccggaatgatcgtaaagccggtgttgcctgcctaccgccattttgaactggtgcggatgctgacggacgaacgcaccttaaacgttcagcattacctcgatcatgaatgctttattctggggggatgcatgatggcgaacatgccgcatgtccatcagggccgttgccatatttcatttgtcaaagaacgcggtacgacgccgctgcaaaaagatattccgccacgcctgtttttaagcggcggtatccgtaacaatgtctggcgtactttttctacccgcgattatgctatggcggtgtgtaatctcaccggtaataaaaaaatcacccagcaacgctatgctacgttacaaggcgcgacggcgttcattaattatttgtatgcgcatccttttttggcgcagcttaatcgtctgtcaccggcaaatgtgacggcaacgctggattatctgaagtatgaatataatcaatcccgtaaggtcggataa

SEQ ID NO: 374283 - DNA, 1197 bp, Salmonella enterica
atgcaacggaaaagctgtcaggtaatgatcaaaccgaccgggtcggtgtgtaatcttgattgtaaatattgcttctatctggaaaaggaaatgctctatcccgatagaaaaaaccattacaagatgacggaagaaacgctagcgttgtttgtgcaacagcatattgcggcgcaggacgtagatgaagtgatttttgcgtggcagggtggggaaccgacgctgatggggctgccattttaccgccaggcggtagcgctccagcaacgttatgctaatggaaaagccatcgttaatacttttcagaccaatggcattctgattgatgatgaatgggcaagattcttcagggcgcatgactttctggttggtatttcgattgatggcgatgcggcgctgcacgacgaatggcgggtaactcgcgcagggcaacctacccatcataaagttgaacaggcgataaaatgcctggcgagtcatggcgttgaatttaatactctcacggtggtgagtcagagcaatatgctacacccgcagcgggtttatgcgtatctgaaatctatcggcagccgctatatgcagtttattccgctagtggaaagagcggcaaataaagacggaatgctggcgcatccgcaggacgagaaaaccgcagtaaccccctggtcagtggacggattacagtttggaaagttcctgaatgccatttttgatatctggatccgcgaagatattggtgatatcggcattcaactctttgaacaaacgctggcggcatggtgtggactcccccctcaggtttgcgtttttgcgcccgtttgcggtagcgcttttgcaatggaaatgaatggcgatgtgtataactgcgatcatttcgtttacccgcaatataagctcggcaatattaacggcacgccgctgcgtcagatgaataatagcgcgcaaaaccagcagtttggtctcgataaaagccgcacgatggcgcaggaatgccatacctgcccgtggcaattcgcctgttatggcggttgccctaaacaccgctttttgccttcggcttgcggaccgatgaagcaaaactatctttgtgccggctatcagtgctttttctctcataccgcgccgatgatgaaagcgatgaaaaccctttacgtaaataacctgtcaccggcggagatccggtctgttttttttaagtaa

SEQ ID NO: 374284 - DNA, 297 bp, Salmonella enterica
atgtatccttttactaacgacgtaatgagcgtggaaattagcggtaacgctctgaaggcgatgatgtctcatgcagccgatccgaagaacggcatgcagcatgtgtcgaaaacggccaaattcaaacactacaacacaaaaccgctggtacagcgtattgtcaaatttgatatcaaaggtaaacaggtcgcagacagtacattcagtaccgtcgcactggattcctttatcggtaaaggccgtggcggatttgacttcacgaaaggtaaaaatgtcaaaggcattaaagggctgtaa

SEQ ID NO: 374285 - DNA, 174 bp, Salmonella enterica
atgaccttaccgaggcatggtataaaaataaatgaaaagatcgttattgatacaagcgaccttccccagccctatacctgtaaaaaaccataccgacataaaaatatcatcgcagtaatcatttctatatttctggcgatgctcgccttattttatcttccaatacgcctctag

SEQ ID NO: 374286 - DNA, 285 bp, Salmonella enterica
atgcatgtcagacactatgtggtgcccgcgttgtggttgccgctcatggttatcggtgcggcgcaggcgggaagccagatacggtttcagggaacggttgttgaagcaggatgctggaatgagacgggggtactggaagtgcgttgccatcggcaggacggtattgagcgccatattatcgtggagaatatgactacgtcgatcgcttcaccgtatgcgatggtggaacctcattacctggatgaggacaaacagctggcgctgctgcggattatttatgactga

SEQ ID NO: 374287 - DNA, 690 bp, Salmonella enterica
atgaaaaaattattaatagcgacctctgtcgtaataggattatcaacttcagcgcaagcggttgaatccactgctgtattaaaactgactggcgttttaaccaacggcgcatgtataccagagttaagtgatggtggggttgtagatttcggtactaaggccgttagcgatctgctgccaactgagacgaatcaactgggatacaaagatataacactcacgattcagtgtcttgcaccggcaaaagttggctggaccgctaccgataatcatgccgattcggtaacatcattgactatcgatgacgcaacatttagacatcagaacaatagaataccaaactatcagctaggtctgggtaaaacagcaggtggtatcaacattggttcattcggcctctctatggacttgaataatgcgaccgccgatggaattcagacgaaaatggtagcgtcaagtagtaataatccagatttgtgggctatcacaggaaacgaattcgttgcgcttacaaatacatttccaaatatcactacatatagtgtcggcgatgaaaatggccccgccgcttttaccattgcaacatttcctatacgcgtagctgccgctatacagggaacggacacactggctattaccgataacaccacgcttgatggtcaggcgacctttacactcgtatatctgtaa

SEQ ID NO: 374288 - DNA, 1134 bp, Salmonella enterica
atgacaattaaaataacagcgttggcggcatcgatcggcgcggcagtggctttcatgcctttcgctactcaggcggaaatcaccgttttaaaacaagatccccaggcgggtaatccactcagccgactcaatttcaccgtcggcgggagtattcgtccgcagttccagaatatgaccggcaatgacggcgcgaacggttataaacgtaatggttttgatggcgggacgcgtttccgcttcgccgcggattactatctgtttgatgatatcagttggattagctattacgagctgggcgtcaatatccctgcggtatttgactgggataaccattatgcgaagggtgcgactgataccactcgccgtatgctgtataccggcttcaagagcgcgacgtggggaacgctgaccttcggtcaacagaacagcatttattacgatgtggtgggcgcaaaaaccgatatctgggattacgacatgataggtcaggcgccgggcaacgggattaacggcgactacgatggttcttatcgcacgcgtaaatcattgaagtataagaaaagcattggtaatgtcgatctctacgcgtcttatctgttcagcgacgattataatgccaataacggcctgaattacaaacgtaaaggcggcggttctttaggcgcggattaccatctcaccgacgatctgacctgggggacggcatggaactatacccgtgcggagatgcgcggcaacggcaataaaacttacgatcaaaatattgtcggtaccgcgttaagctggacgccggaaaactggactattgccgcaggcggcggttggtatcagaactttatgacgaccaaaaaagtgtctgtgaatgattactttgccggcgatgcgtggggtctggaatattttgtcggttacgctttcccgattggtcagtatgccgtaaaagctattcaaccgtactttatgggcgaccgcattgaatatgtgaatggccgcgactatctgcgtaccgataacggcgtggggatcaccttccaactggattatggtttccgcgttgattatgaacatgttttcacctccagcactgataatctgggcgatatgaacctggtgcgtctgcgttacgatttctaa

SEQ ID NO: 374289 - DNA, 1017 bp, Salmonella enterica
atgattgaaatagaaaaagtctgcgtcgattttaccgccggtcgcggtacccccacgcgcgcggtggatgatgtgagcctgcatatcgccgcgggcgagatttttggcattgttggtaccagcggcgcaggaaaaagcactctgctgcgtaccctgaacgccttaacgcgtcccagccaggggcgcgtcaacgtcaacggcgtggaaatctcggcgctggacggaaaagcgttacgccaggcgcggcagcgtattggtatgattttccagcattttaacttaatgcatacccggacagtggcgcaaaacgttgcgtttagcctgaaagcggctggctgggaacgcagcaaaatcgcgccgcgggtggcggaaattttaacgctggtgggccttgccgataaagcgaaccgttttccggtacagctcagcggcgggcaaaaacagcgggtggggatagcccgcgccatcgctaaccatccggatgtgttgctatgtgacgaaccgacttccgctctggatctggaaacttccgccacgattctggccctgctcagaaagatcaacgcacagctcgggattactattgtgctgatcacccatgaaatgaacgtgatcaaatctatttgcgatcgcgtggcggtgatgtcgggcggtaaggttgtggaatcgggcgaggtgtttgatgtgtttgcccacccgcaacacgctttcacacagcaactggtgtctcatacccttaatttgaccctgccggaacgtttacgggaacacctgcccgggcagttgctgaaaattttgtttatcggcgattcggcggagcagccggtactgtcagaggtggcgatcaagtttggcgtcgcggtcaatatcctgcatggcaagattgaatatatcggcgaacgcgcgttgggcattctggtagtgcaattaaccgcgccgcataatccaacggcggtggccgccgccgtggagcatatccgtcaacgtaccgcacaggtggaggtgatccgtggatga

SEQ ID NO: 374290 - DNA, 660 bp, Salmonella enterica
gtggatgatttattgccggatttaacgctggcgttcaatgaaactttccagatgttgagtatttcaacggtgctggcgattcttggcggtctaccgctcggttttctgatttttgtcaccgatcgtcatctgttctggcagaaccgttttatttatctcgtcgcctcggttctggtgaatattatccgctcggtgccatttgttattttactggtgctgttactgccgctaacgcagcttttgctgggtaatacgattggcccgattgcagcctccgtcccgctgtcggtggccgcaatcgcgttttatgcacgcctggtggatagcgcgctccgtgaagtcgataaagggattattgaggcggcgctggcattcggcgctagtccgatgcgtattatctgtaccgtactgttgccggaagccagcgcagggctgctgcgcggcctgacgattaccttggtaagcttaatcggctactcggcgatggccgggattgtcggcggcggcggggtaggcgacctggcgattcgctatggctactaccgttacgaaaccgaagtgatggttgttaccgtagtggcgctgattgtgctggttcaggtcgttcagatgctgggcgactggctggcaaaacgtgccgacaagcgcgacagacactaa

SEQ ID NO: 374291 - DNA, 1086 bp, Salmonella enterica
atgaacgatggaacggactatcgcgcgctcctccttgccgatacgcctttaattgatgtacgcgcgccgattgagtttgaacagggcgccatgccgggctccatcaacctgccattgatgatggacgacgagcgagccgccgtcggcacctgctacaaacgtcagggcgcggatgcggcgttagcgttggggcatcggctggtttgcggcgacattcgccagcagcggcttgaggcctggaaagccgcgtatcaacgtttccccaatgggtatctgtgctgcgcgcgcggcggtcagcggtcacatatcgtacaacgttggctgcaagaaacagggattgactgcccgcttattgaaggcggctataaagcgctgcgtcagacagcaattcaggcgacctggcaactggcgcaaaaaccgatacttttaattggcggctgtacgggcagcggcaaaacgcaactggtgcgacaacagcccaacggcgtggatctggaaggtctcgcgcgtcatcgcggctcctcttttggccgcacgctgaaaccccagctcagccaggccagttttgaaaacaaacttgccgttgaattgctgaaaattaacgcgcgtcagacgctaaaaaggtgggtactggaagatgaagggcgaacgatcggcgccaaccatctgcctgagtgtttacgcgaaagaatggcgcaggcccccattgcggtagtggaagatccgtttgcgcttcgtctggaacgactgcgtgaagagtatttcatccgtatgcatcacgacttcacccacgcctacggcgatgaagccggttggcaggcgtatagtgaatatcttcaccatggactgttcgctattcgccgccgtctggggttgcaacgctttgccgaactgacggacacgctggatagggcgctggcggaacaattatccagcggcagcaccgacggccatatgtcatggctggttccgctacttaacgaatattacgacccaatgtaccgctatcaactggagaaaaaagccgcgaatatcgtttttcgcggcacatggcaagacgttgccaactggctaaaagcgcaatag

SEQ ID NO: 374292 - DNA, 1068 bp, Salmonella enterica
atgaagcaagtttgcgttctcggcaacgggcaactgggccgaatgctgcgccaggcgggcgaaccgctgggtatctccgtctggccggttggtctggatgcagagcctaccgccgtgccggtacagcagagcgtcattaccgcagagattgagcgctggccggaaactgcgcttacccgcgagctggcgcgccacccggcattcgtcaatcgtgatgtatttccgatcatcgccgaccgtctgacacaaaaacagcttttcgataaactgggactcgcgaccgcgccgtggcagctgctgaccagcgccgacgagtggtccggcatctttgaccgtctgggtgaactggcgattattaagcgtcgcgttggcggctacgacggtcgcgggcagtggcgtctacgcgcggacgaaaccgggcaactgccggatgactgctatggcgaatgtattgttgagcgcggcatccatttttccggcgaagtgtcgttagtcggcgcgcgcgctcatgacggcagtaccgtgttttacccgctaacgcacaatttgcatcaggacggcatcttgcggaccagcgtcgcgttcccacaggcgaacgccgaacagcaggagcaggcggaatcgatgctgtcagcaattatgcaggcgctgaactacgtcggcgtaatggcgatggaatgttttatcacgccggaaggcctgttaatcaatgaactggcgccgcgcgtgcataacagcggacactggacgcaaaatggcgccagcatcagtcagtttgaattgcatttgcgcgcgattaccggcctgccgttgcccgcgccggtgattaacgccccgtcggtgatgatcaatctgatcggcagcgagctgaattacgactggctgaagctgccgctggtacatctgcactggtatgataaagcggtacgtccggggcgaaaagtcggccatctgaatctgaccgacagcgatacgtcacgtcttagcgccaccctggaagcgctctctccgctcctgccgggcgaatacgccagcggcattatctgggcgcaaagtaagcttaaataa

SEQ ID NO: 374293 - DNA, 624 bp, Salmonella enterica
atgctcgtctattggctggatattgtaggcacggctgtatttgctatctctggcgtgttgctggccgggaaattacgtatggacccgttcggcgtcctggtgctcggcgtcgttactgccgtcggcggcgggacaatccgcgatatggcgctggataacggcccggtattctgggttaaagatcctaccgatttggtcgtcgccatggtcaccagtatgctgaccatcctgctggttcgccagccaagacgtctgccgaaatggatgttgccggtactggatgcggtcgggctggcggtgtttgtcggcattggggtgaataaagccttcctcgctgaaacggggccattagtggcagtctgtatgggcgtgattaccggcgtcggcggcgggattattcgcgatgttctggcacgcgagattcccatgatcctacgcaccgaaatctatgccacggcctgtattatcggcgggattgttcacgccaccgcgttttatacgttttcagtaccgctggaaagcgccagcatgatgggtatggtcgtcacgctgttcattcggctggcggccattcgttggcatttgaaattgccgacatttgcactggatgaaaacggacgttga

SEQ ID NO: 374294 - DNA, 480 bp, Salmonella enterica
atgacgatcgcgtatatcgcgcttggcagtaatctggcctctcctctggagcaggtcaatgccgccctgaaggctatcgccaacattcccgatagccgtatcgtcgcggtttcttcgttttaccgcacgccgccgcttggcccacaggatcagcccgattacctgaacgccgcggtggcgctggataccgccctcgcccccgaagaattgcttaaccatacccagcgcattgagctgcaacagggccgggtgcgcaaagcggaacgctgggggccgcgcacgctggacctcgacattatgctgtttggcgatgaagtcattaacaccgaccgtctgacggttccgcactacgacatgaaaaaccgcggttttatgctgtggccgctgtttgagatcgctccaaaactgcgcttccccgacgatggcgtcgcgctgacgcagcttgttcatcaacatacccccgcaccagcatactggtaa

SEQ ID NO: 374295 - DNA, 594 bp, Salmonella enterica
atgaaaaaagttctcctggcgacagccgtatttatggctttaggctcttcttccgttatggctgtcgaaggtggtcgtattaattttgaaggtctggtcagcgctgaaacctgtaaaaaagtcgtcagctccgctgttggtaatagcaatatcgacggtacggttactctgaaaaccgcacacgttagcgatgttaccgcagaagttcaaaacagcaccgcaggcgtaaacgcagaagatttctccatcattatcgactgctccgatgctggcgcaggcctggtgaaatcacatctgacgatgtcctcctcttttagcaatacgaagggcaccctggataacgacgaaacgctgacccgcagcggtatcgaggcggcgaaagcggttgatatcgcggttcaccatgttgacgatgccaacgctctctcgctggtgaaaatcaacgatccttctaacacgatggaagaaagctttaccaacggtatcgcaacctacaactttaaagcgtcttacgtgaaatcgtctgatgcaggtgccagcgtgacaaccggtctggtctccaccaatgcgatttatacctttacttacgagtaa

SEQ ID NO: 374296 - DNA, 738 bp, Salmonella enterica
atgtctcactctttaaagtttactttgtctgctatcgctctgaccggggcattatttagctctgccagccaggccgatattattatttctggcacgcgtattatttatgatgcaaataaaaaagatgtcagcgtgcgtctggaaaataaaggtaaaagcccattattagttcagaactggatagatctcggcaatgataatgccgagccgggcagtattaaagcgcccttcgccgccacgccgccggtatcacgaatagaacctaagcgcgggcagtcgataaaaattatgtataccgccacagaatcgctaccgaaagatcgcgaaagcgttttctggttcaacgtgctggaagttccaccgaaggcaaataccaaccaggaagaaaataagaatttgctccagttggcgtttcgcacccgcatcaaactattttatcgcccgacgggtttaccgggcgccccggcagaagcggcaaaacagctgaaatggcaggtcgccagcgaacagggccatgccgttcttcgcgccgataacccgactccgtattacgtctcctttaactctgccacctacaccagcggcggaaaacgctatgacgtcgacgcgaccatggttgccccctttggcaaagccgccttcacggtgaaaggactgcaaaacgccagcgcaggcaaactggaattccagtccattaatgactacggcggcatcatcgctggctcagcttcactgtaa

SEQ ID NO: 374297 - DNA, 2667 bp, Salmonella enterica
atgacgttatcacaaagcaggatgaaaaagacggtgcaaaacgtttccacaaccaggaccatgccaaaaaagacgttgctcgcgatgtgctgtgcgttgttttacaatcagcccggcctggctgcggacatcgttgaatacgacagcacatttctgatgggcgatggcgctacgtctattgatgtcagccgctattctaatggcaaccccacgccagcgggaacgtacaccgtgagagtgtttgtcaatgagaaggccgtcgccagccagaccatcccgtttatcgacatcggcaaaaaaagcgccgaggcctgcctgaccatgaaaaatctggcgcagctacacattaagtcgccgcaaaacgtcggcgaaaaagccattttgaagaaaggcgacgacgagagcagcgattgcttaaatctgccagcgctgattgaacaatccagcgtgacgtttgatatgggcgaccagcgcctggatatcgtcgtgcctcaggcatgggttaacaaaagttatgacggctatgtggaaccgtcgctatgggaaaacggaatcccggccgcgctactctcctacaacattaacggctatcacaataccaatcacggtgtcgataacgacaatatgtacgccgctttcaataccggtattaacctcggagcatggcgttttcgcgccaacggtaactataactggaacaataacagcggcagtaacttcgattttcagaaccgctacatccagcgcgatctcactgcgctgcgctcgcaactgatgttaggcgaggcgtacaccaccggcgagactttcgactcggtcagcattcgcggggtgcgtctgtacagtgactcccgtatgctaccgtcacagcttgccaactacgcccctgtgatccgcggtgtcgccaataccaacgccaaagtcaccattacccagggcggctacaaaatttatgaatcaacggtgccgccaggtccgttcgagattaacgatctcagcccttctggctacgggagcgacctcatcgtcactatcgaagaggccgacggcagcaagcgtacctttagccagcccttctcctcggtaatgcagatgcaaaaacccggcgtcgggcgctgggatgtcagcgccggggaagtgaatgacgacgatcttcacgataatccgtatgtcgcgcagggtacctactattacggtttgaacaactatctgaccgcctatactggcgttcaggctaccgataatcactacctggcggggttgctcggcatgggcctcaacacgccgtttggcgccatcgcgctggacatcacccattcccgcgcggagatccctgacgataaaacctatcaggggcagagctaccgcttaacgtggaacaagctgattgaagccactgatacctcgtttaacgtggcggcctaccgctattcaacccagaattatctggggctgaacgatgcgcttcagttgatcgacgaagcgaaatatggggatgacgaccagcgcaacaccatgaataactttgcgcgcctgaaaaaccagatcaccctcagcatcagccagccgttacagtatggcgaaacggattacggttccttttatctctcaggctcctggacagattactgggcgacgggcgacagccgcagcgattatacgctgggctacggcaaaggcttctcatggggcagcatgagcgtcaacctgcaacgcacctgggatgaagacggtaaaaaagatgattcgctctatatcaacctgagtattccactcgccaacctgcttggcggggagagtcgccgttccggttttaacaccctctccacgcagatgcggacggactttaacggtggccataacctgagcatgaacagcagcggtagcagcaaagacaatatgctgaactatagcgtaaatacgggttataccatgcagaaagagggcaagagcatctctgatatcggcggctatgccagctatcaatccccgtggggagatatttcggcctcagcctctgccaataacgatagcagccgacaatattcgctcgcgacaaacgggggctttgtcctgcatggcggcggcctgacattcactaacgataacttcggtaatagcgatgccatcgtgctggtaaaagcccccggcgcgaaaggcgcacgcatcaatggtggcaacagcaccatcgatcgctggggctacggcgcgacaaactcgctttccgcctacagagaaaacctggtcaatgtcgatatcgacacactggaaaacgacgttgagcttaagagcaccagcgcaactctggtgccgcgcgatggcgcggtggtcttagccagtttcgaaaccgaccagggacgctcggtcattcttaacatgtcccgcaatgacggcaaagctctgccgtttggcgcagaaatctacgagaacgatgtgcagatcggcaacatgggccagggcggacaggcttttgttcgcggtatcagcgatgcgggcgaactctcagtacgttggtttgaagaaaaccagccagtaacttgttcagcaacctttgcgttgcctgcaacgcaacaaacggtagggtccagccagaccttactgttagaccacgtaacctgtcgtgttaataaccttaaatcaaatggaatagacaatgagaaggaataa

SEQ ID NO: 374298 - DNA, 567 bp, Salmonella enterica
atgagaaggaataagcaccttttagcagcctctgtgctcgcgatgatatttccactgaccagtcaggcggaagatatcaacgtcgactttaccgctaccgtgctggccacgacgtgcagcatgtcgattgcggcgttagatggctcgaacgtatcgggtgatgctaccagcggctatacgctgaatgtcggcgatgtcgggttggataaaatcataaaaaaatcagcggaatcgcagaaaaactttaagtttgtggcgaaagattgcagtggcgccctgacgaaaattaccaccgcactcggcagctctgcggatgccagcggcaactttattaaaaaccagtctgcggcgtccgatgcggccagcaatattggtatgggctttaagcgtaagagcaccaccgatgaaacctatttcacgccaggctccggttcaattacctggactgacgacgagcgcacagcaaacgaagtagagatgacggttgcgctgcgtgaactgaccgacggcgcgggtaccatgggtgccttcagctctaccgctacgtttaacttcacttatcaataa

SEQ ID NO: 374299 - DNA, 609 bp, Salmonella enterica
atgaaaaagcaagtattgcgcggcgtaatcttaggcgcactggcgaccatgaccgcgggcgtatcaacaatggcgcaggccgatggcaccgccagcctggacttaacggtaaatgccaacatcacggcgggaacctgctccgcatcggtgctggacggtgaaaccgccaccgatactatcgcatttggcaacgtctacatttcggaagtttttgccaaaacaaaagtcaaaagctttaaactgcgcttcagtgactgcgcgggattaaaagataaaaaagcctctttggtcattgcgccaagagatgcaggttgcgcaggcagcgattcgactaacgcagaatttgccaacgcctccacagcgacgtctaaagcacagagaaccgctgttgaactctggacaacagataccccggaaggttctaacagcgtccagttccactgccgtaacaaaaatgcgcaagagattgatctgagcagtgcaagttcaaccacaccggttgattatccgttaagcgctcgcatggtgccggttaccggttatgcaatcactgcgctaacagcaggtgacttctattcccccaccaccttcaccatcacttaccagtaa

SEQ ID NO: 374300 - DNA, 597 bp, Salmonella enterica
atggtgataccaatgagacgtttgcgcagactcatgctcgccacgttattttcagggctggcaacagccctgtttatcgcgccgctgtatgccgacaccaacgtggattttaccgccaccgtgcagaaagatacctgccagattgaaattgacggtaatggtacagtcagtttagcgaccgtcgggccgagttactttgccgatggcatcacggcggaaacggactacgggggcggcaaggaatttctgattaagttgataagctgcccggttagcggcggcgcaatcacgaacgtcacgtttaacttcttaccacagagcgggcagttcgttaccggtaataagcaggtgtttgccaatgatttagcgaccagcacagacggtgcctccaacgtcggcgtagtgatttttaccaccgagtcaccccgccataacgttctgaacaccgatggctcctcgcgggcaacctttgccgcgacgacatacagcgatacctcatggacgttttatgcccggatgcagaaagtcctcagtaacgacgtggtcgtccccggcaaactcagcagccgcgtgctggtaaatgttgaatacgaataa

SEQ ID NO: 374301 - DNA, 1269 bp, Salmonella enterica
atgataacaaaatgcgttcaccgactgatgctattaaacactcagagactaaagagtgccgttaaaatcatatcattattactgttatctttcgtttcttttgtgacgccttcgtatggctggtcactatatgtaggccaatatacaaagaatgaagggggaaacgtatggggagcggtgcaggattttacaaaatcctatgcgcccaaaaacatgcttaatccaatagctattcataacggctcaggactgcgtgaaatctccgtatcgaatgatgcgacagagctcgaccccactactgggctaagttgtaacaaagatcatgataaccatgtcctgacactgtatcatggctacaagaactccggtaaaacctacaacggtaatatgttatgggaaactaatactcctggtatgtacatgggtatcgaagtcaccaatatcaactttggcggccaatactggggtgaaaaattctggataaactggagcaacggagaaacgtccggcgcaaaaaaatttgatttaacaaatatcatgccaaaggatggtcgtttcgaactctgtcagaggccaaccaactggacctattttggattaggcggtattgttctgtgggttaaatatcatttgtatattgatgactcttttaatcctgccggagcaacttcgttatctgtctcgctacgaaaagaacaatcgtatgattatcaatttgcttcatcaccagccttctcaggctcacataatgtatattacaatatagcaccaaatcagttgacgattaactatcctacctgccaggccaatgcggtcacaggcgatggggtaacaaattcaacggttccatttggggaacagaatgccaaagacatttcggcgaataccattaaccgcaaattttccataaagctcagtaattgcgcttacgttaaagaattgaatgttacgttaagttctgcaacggtaggaggacaggataacaccttgctcggtaatacacttaccggcagtgaagcggctggtggcattggtgttatgatcgaaggggagaaaaatccaaacagccctgctgactggaccttacttaagccaaacatcagcagttctatttattcttttactaattccccggattacgaaaatagcgaaattgggaatgctgagcaggtaatgaatttccaggcgaccctgaaacaggatggtaacaaagcgataaccccaggaaaattcaaagctacgggtaaattcaccattacttatccctga

SEQ ID NO: 374302 - DNA, 1002 bp, Salmonella enterica
atggttgcccatggcatcaatcccgcgcagaaaaagcaggaagaaaagcttaaacagaaagacccaacgacagtcaaaacattcgccaaacgctggctgaccgatatcgttgaaaaaagtaaccgcgatccgcgcaacatcactcgcgttatcgagaaggacatcattcccatcatcgggaagctggaactcgaagaactcacaactgcccacattcaggtcgtgctcgaccgtatcaagcaacgaggttcggatcacgtcgcgctactgacgcgaaacgtgcttaaacgcatgctggcctatgcgatttccaggggaatcatattcaacaacccggcagccgctatcgaggcccgttatatcgcacaagcaacaagccgcgacgtggcgctaacagcagaagagatcggcatcctgctacgggggatatacacctctaatatgaaccgacgccacaagctggccctgcacctgttaatcatctgcatggtgcgtaaatcggagatgattgaagcgacatggagtgaagttaacttcaacgcgctggaatggcgtatccccggcgaaagaatgaagatggataacccgcatattgttccgctgtcaaagcaggcgctggcgatgttcgaagagctaaaatttctggccggagattctccatacgtcttccccagccgaaacgaccaccgacgcccgatctccaaaacaacgctgaactgcgcggtgcgtacgctggatctaaacgtcagggattttgttattcatgacttccggcgtactgccagcactttgctccatgagcagggctacaactccgactgggtagagaaatgcctggcgcataagatcggcggcgttcgcggcatctacaaccgtgcggagtacctgaatcagcgccgggagatgcttcagtcctgggctgattttgttgatgcgcagattgagactggaaggaaggttatcattggacaattcgggaagtcttacaatgtaaccgtatga

SEQ ID NO: 374303 - DNA, 963 bp, Salmonella enterica
atgtttgaagaaactattaaaaaacaatttgaattgttagacataagtaacttcaatgttgatatatctcatcgtctccttttcgtgtgtggtggcaaagtcgatgtacgtgcaccaattccccccagttttagggatagactactcacttacacagcaaaacatgcctctgagcttcacgaacatttcattctagctgagacattcaaggattattttaaagagaatgcctatccggaccttctggtgtttgaagatgatatagccagtatttcatctcttattatcatttttttagaaagtccaggatcattagttgagttaggtatattttgcaacaaatcagaactatttaaaaaaatactgattgttgcttcagcggaagaagtatccggtgaggactcattcatttatttaggcccactagagtatattaagaagaaagtctcatcctctgttgtaatctatccttggccggatcctgaagtcttaaaatacgataatgattttcttgatgatttatgtgtaaatataaaagaaaaactttcatcaatcccaaaaacagaacaattcagtaaggataattctggacatatagcacttctaattactgaaattatatctctttgcgccccaatacaacttagtgaaatagaatcagccctaaactcattagggtttaatatttcaacaaaaattattaacagatcaatttatttacttcagaaagttggttttatagacgttttatcatatagctcaaacaaatattactttccattaaaagagcgcaaatgggtaaaatttggtaaaactaaagataataaactcatagataatcaacaattaaaaatgaaggttagacaatcttttgtaacattaaccgatccattatcaaaacgaagaattacagcgctgcgtcaaataatagcaaaaaaagaaatggctgaggagattaattaa

SEQ ID NO: 374304 - DNA, 936 bp, Salmonella enterica
atggacatattacagcatatttcagatttactattaaccaagaaaagtgaaatcatttccttttcattgacggcaccttatcgctataaaatatataaaattgcaaaaagaaactcagataagaagagaactattgctcatccttcgaaagaactaaaatttatacaacgtgaaattactgagtatttaaccgataaattacccgttcatgaatgcgcatttgcatataaaaagggcagtagcattaagaccaacgctcaagttcatcttcatacaaaatacttgttgaagatggattttgagaattttttccctagcataacaccacgtctatttttctcaaagttacgacttgcaaatattgatttaactgcagatgataaagtactacttgagaatatattattcttcaaatccaagagaaatagtaatttaagattaagtattggagcaccaagctcacctttaatatcaaattttgtgatgtatttttgggatattgaggttcaagagatatgctctaaaataggcgttaactatactcgttatgctgatgatttaaccttttcaacaaataataaagatgttttgtttgatatacctgacatgcttgaaaacgtactgcctaaatattctttaggtaggattagaatcaatcatgaaaaaacagtgttttcttcaaaaggacataaccgtcacgttactggtataactctaacaaacgataacaaattatccataggtagagaaaggaaaagaaaaatctctgccatgatccatcattttataaatgggaaattatctactgacgaatgcaataaattagtcgggctacttgcatttgctaaaaatattgagccttcgttttataaaagcatggtcattaaatatggatctgataatatttataaattacaaaaacaaaaagacaaataa

SEQ ID NO: 374305 - DNA, 978 bp, Salmonella enterica
atggcatgtggcgagttttccctgattgcccgttattttgaccgtgtaagaagctctcgtcttgatgttgaaaccggtattggcgacgattgcgcgctcctgaatattcctgaaaagcagaccctggcgatcagtaccgatacgctggtggcgggcaaccacttcctccccaatatcgatcctgccgatctggcttataaagcgttggcggtgaatttaagcgatctggccgcgatgggggccgacccggcctggttaacgctggcgttaacgttgccggaagtggatgagccgtggctggaggcttttagcgacagtctgtttgcgctattgaattactacgatatgcagctcattggcggcgacaccacgcgtggaccgctgtcgatgacgctgggtatccacggttatatcccggcagggcgcgcgctcaagcgatctggcgcgaagccgggcgactggatttatatcaccggtacgccgggcgacagcgctgccgggctggcggttttgcaaaaccggctacaggtgtcggaggagacagacgctcactatttaattcaacggcatttacgcccgacgccgcgtattttacacggccaggcgctgcgtgatatcgccagcgcggctatcgatctttccgatggtttgatttccgatctggggcatatcgtcaaggccagcggctgtggggcaagagtagatgttgatgcgctgccaaaatccgatgcgatgatgcgccatgttgatgacgggcaggcgctgcgttgggcgctttccggcggcgaagactatgagctgtgctttacggtgccggaactgaaccgtggcgcgctggatgtcgccattggtcaactgggtgttccctttacctgcataggtcaaatgagcgcagatattgaagggctgaattttgtacgtgacggaatgcctgtcacctttgactggaaaggatatgaccattttgccacgccataa

SEQ ID NO: 374306 - DNA, 1521 bp, Salmonella enterica
atgacacaggcagttatgttgcaggggacggcatccgacgtcggcaaaagtgtgctggcggcgggtttatgccgcattttttatcaggatggtctgcgtaccgcgccgtttaaatcgcaaaatatggcgcttaattctggtattacgccggatggcaaagagatggggcgggcgcagatttttcaggcggaagccgcggggatcacgccagatgtgcgtatgaatccggtgctgctcaaaccgaccagcgatcgccaggcgcaggtcgtgctgatggggaaagtggcgaccaatatggatgcggtgagttaccatgactataaaccgcgtttgcgtgagcaaatccttgcggtctataacagcctggcgcaggaatatgacgttattgtgctggaaggcgccggaagcccggcggaaatcaatctgcgcgatcgtgatatcgtcaatatgggaatggcggaaatggcccagtgtccggttattctggtggcggatatcgaccggggcggcgtattcgccgctatttatggcacgctggcgctgttgcataaacaggagcgtgacagagtaaagggcgtcattatcaacaaattccgcggcgacgtggcactactctattccggtatcgaacaaatcgaatcgcttaccggcgtcccggtcctgggcgtgatgccgtggctggatgtggatctggaagatgaggatggcgtcgcgctgcaaaacgataaatatcgcggtaacgccccccgtgatatcactattgccattgtgcaactgccacatatttctaactttacggattttaacgctctggcggcgcagccggatgtgcgcatacgctatattcgccgcccggaagcattgactgacgttgatctggtgatcctgccgggcagtaagaatacgctgagcgacctcgcctggctgcgcgaaagcgggatggcggatgcggtattgcagacacatcggcagggcgtgtcggtgatgggaatttgcggcggctaccagatgctgggcgacaccattgtggatgaggtggagtcggggctgggtacgcagccgggcctggggctgcttaatacgatcactcgctttgcacaggataaaaccacgacgcaggttaacgcgacaatgtcagacgagctgcccggctggctggctgccgcagcggggctaccggtacgcggttatgaaattcacatgggagaaacggtgctgcaggaaggatgctgtacggccatgacgttacagaaaaatggatgctctgtggcggatggcgcggtcaccgccgacggactggcgtttggcacttaccttcacggcctgtttgacagcgatgcgtttacccgtgcggtggtcaatgggttacgggcacgaaaagggcttgcgccgtgggaaacgactttttgttatgcggagcataaagcgcggcaatttgatctgctggcggaagcgatgcggcaacatattgatattgataaaatttataccatcatgcaacaacatcaggagccggtatga

SEQ ID NO: 374307 - DNA, 354 bp, Salmonella enterica
gtggcagatgcgttcattttgttagggatagtcatggcgatggtcagcctcggcttcattcttataaataagttattctgttttatatctgctgggtgcctgctctcgttatgcgccagcatggccagttttcaactctgggatgcgtcttactgggggcgatggggaaaagtatgtcccggcctggatgtgatcatctcctgcgacaattaccattttctctatgacttgggatgggaattgtacggtatcgcctttttgttctttaccgcgttaatgctcacatgtgcggccattattcttatcaatatgattatggctttagagcgatactgtgccggatggcggcgctaa

SEQ ID NO: 374308 - DNA, 516 bp, Salmonella enterica
atgtcaataaacaaccctattcttatttacgtgaataagaaacgacaaataaaattagctctgttttattcagtgttagctatagctcttatgatgagcctctttctaaattatagtattatgctaaagatgatgtgtgtttttttcataatcctcatgatagcaggcgcaagtgcttactggtactccgccttttcaggaaagccacagttaacgttgaaccaggagggagtaacattacacacaaccaggctaccaatagtttactggcatgaaatcgactatgttggtgagcgtgttagcgataatgcgcctgtgctggccgtttttgtcaaagatgttgagctttattgtcagcgaattactaatgagaaaatgcgtaataattttctgtcattattgaataagcatgaaagtaatcgcgtgatgaatatctctctaaacgatctcgattatgattcagatgagttacaggatatttttaaaatggctgttgccagaaacctggaacaatag

SEQ ID NO: 374309 - DNA, 300 bp, Salmonella enterica
atgttttttgttattactcaccatattgatgtgctgcctctggcaaccctacccacacatgaaacatgcccttattgtaataatcaggatgtatggttgattattcgccaaaaaaggacccgtacatgtggtttgtctcaagcgagaaaaagagataagtttggtttagcgatatgcaagcattgcagcaatgaaatcaaggaaaaacgttggtcaccagcgttacgtcaactttttaccgagcagaagccactgtttaacctaaccttttggcaacgctatggtttttgggttggttga

SEQ ID NO: 374310 - DNA, 516 bp, Salmonella enterica
gtgcgccggactggtggtgtaggagagcgtgccctgggcgtgcgcgccgtggctgcgcaccgcctgcagggcggctttcatattgcgcgggtcgttcatggcgtcgaagacgcggaagacgtccataccgtttttcaccgcgcgctcgacgaagcgttccaccacgtcatcggcgtagtggcggtagccgagcaggttctggccgcgcagcagcatctgcagcggggttttgggcatggcctttttaagctcgcgcaggcggacccacgggtcttcgccgagaaaacggatgcaggcgtcaaaggtggcgccgccccagcattcgagggagccgtagcccacgtcgtcgagctgagcggcaatcggcagcatatcgtcaagacgcagacgggtggcaaacagggactggtgggcgtcacgcaggacgacgtcggtaatggcaatagtcatggatccctccgggaattaagcgttaaggcggtgatggtgaatggcggcggcaatcaccggctttaa

SEQ ID NO: 374311 - DNA, 729 bp, Salmonella enterica
atggactttttcatcattaacaatgtaatggtcaacattcctctcggcgagggagggtatgcgctgtcgtggattgaggctatcggcaccgtctttggcttattgtgcatctggtgcgccagccgggaaaaaatcattaattacctgtttggtttgattaacgtcactctgtttgccgccatcttttttcagattcaactgtatgccagcttgctacttcaggtgtttttctttgcggcgaatatttacggctggtacgcatggagccggcagaatgacgcccgggaagccgctctgaaagtacgctggctttctcgtcaacaaacatggaggttggggggcatatgtattatcgccattctgctgatgatgtggtttatcgatccggtcttcgctatgttgacccgcgttatgctcgctctgctgcaaacgataggtatgcaggtggcgatgcctgaactccagccggacgcgttcccgttctgggattccaccatgctggtgttgtcgattgcggcgatggtgctgatgacccgcaagtacgtggaaaactggctgctgtgggtgattattgatgtaattagcgtcgtgatctatgcagtacagggcgtttatgcgatgtcgcttgagtatgttctgctgacggcgatcgcgctaatgggttcttacagttggatcaagagcgcacagcgtaatggctatacgccgcttgccgccagagcctgctga

SEQ ID NO: 374312 - DNA, 744 bp, Salmonella enterica
atgcaaccccatattcggcttaacacaagcatgacccgcgcgaaatatgcgcttttgcccggcgatcccgggcgggtggatagaatcgcccgttttcttgataaggctgagattctggggcaaaaccgggagtttcgcgcggcgcgcggttggtaccagggggttgaaatagtcgtgctctccacgggaatcggcggaccgtcaaccgctatcgccattgaggagttacgccaggttggcgtcaacacgctaatccgtatcggtagttgcggcgcgttgcaggactcgctggcgttgggcgatgtgatcatcgcccacggcgcggtggctgacgacggtgccagcaaaacctatgcgcccgccagttatccggcctgtgcggacccgtatcttaccgccacgctgatacagcaggcgaaacagatgaacatctctgccgtttgcgggctggtgcgcagccatgacagtttttataccgatcgcgaagctgaactggatgccgaatggtcggccaggggagttctcggcgcggatatggaaaccgccgcgctgatggtggtgggggcgttacgtgggctgcgtaccgcgtcgttgctaaacgtggtcgtcgcgcatagtggctgtctggagagcagcattaaccattatgttcagcaggaaaccttgtgccagcaaggtgaagagcgccagatttctttggcgcttcaggccatttatttcgatagtttgcaaggagagcaatga

SEQ ID NO: 374313 - DNA, 792 bp, Salmonella enterica
atgaaccgggagataagcggcatttttagcgggcgtatttcggatgcgcgggacggcggtcctgtcctttctgacaaggggcgagataccatgaacataatgaaaaacgcagaatttccagacgactggcttttagggctacgccaggttgtacgcgacccagtgctctatgaattactcaaatactgcccgttggaaatcatgcagtgctggcgatttgacgacatttcccgcggcgcgcttatctgccgccagggggaaatatgccagcaattttcactcattgtggccggcgaagtggatgttttttacgaagctgaagatggacgccgttaccggcaggcgcgttatggcaaaggagatatgctgggcgagctagagatatttgagtcgcggcattacatctgttctgtcgtagccgtcggcaatgtacagctactcagcctgccgcaagcgcatttttgccgctggctggcgctggataaccactttaaccagcgaatgctgcggtttttcagccaacagtattaccagttgtcgaaaaaggccagtagcgacaatttgtactcgctgcatcaacgcgtatgccaggcattatggctgcgttatcaacaatatgaatcaaccactattttgcttgataagcagaatcttggtcaggaatttgcggcgacgacgcgcagtatcaaccggatactgcacgatctgaaatcgctgaacattatcgataccgacggtgaggggatcattttactggctcctgaaaaactcaaacaggaggcggaaatctga

SEQ ID NO: 374314 - DNA, 390 bp, Salmonella enterica
atgcgcacaaaaataatgctgttatctgcactggtagcgatatgcttcagcgtacaggctaaacccacgggcattaccgtacaggatgtaaagcatctggcgttaaagcagcgccttgttgataactatcataaacgcattccgccggatgctttttatgctccaggccatgatatgtcgtttttagttaaaacctacgcgttagataatgccgggaaatggaaaccattccttaaattcgtcgccaaagaaacagaaggctttgaccgcttaacgatggcgctccaccccgatagcgctaaagacgctaataacgtgctggagcggtgtatggcattttatgaatcggacaaattagataaatacgttcgagagacagtgatgaaataa

SEQ ID NO: 374315 - DNA, 375 bp, Salmonella enterica
atgctcccaaaaaacagtaagactgcgcgtatccttaaggagccccatgctgctatgggcggaaattcaggcaactatgtccgtgcagaagtagaatttgattctacgaagcgaaaactcttaccgataaaagggtatcgacccgacattgtcataccgtccctcacggatgaatattggggcatcacctttgtcgaagaagaaattgaactttttgatttccctttcattgttagcctggctttcacattcaatgatgagcattatctccagatcagggaaaatcagttatttgttataatggaagggcctcaccaggtaggtaaagggcgattcctggaaatacactttatcccgaaaaatgttaatacataa

SEQ ID NO: 374316 - DNA, 702 bp, Salmonella enterica
atggctggacgctttcagggatttgcacaagaagggctcaattttcttcagcaggtttgtattgagaacgacaaagcctggttcgatgagcaccgctttatctacgaaagaagccttctgactccattccgcgcgctggtggacgaccttgctccagcgatgctggaaatcgatccactgctggaaacccgacccgccatcggtaaaaccctgtcgcgtattcaccgcgatacccgtttctcgcacgacaaatcgctgtaccgcagtcggatgtggctgaccttcaaacgttcggcgaaaaactggatcgatgcgccagcctacttttttgaaatcagccccgataccctacgctatgggttgggttactacagcgccagcaaatctacgatggatctgtttcgccatacgttgaggaagcggcctgatgcgtttttacaggttgccgaatgctgcagcccgccgtttgagttggtgggggaaagctataagcggctgctggccaaagatctcgacccggcgatatccgactggtatcagcgtaaaacgtttgccgtgatggtgacggataatgacgtagaaaaactcttccatgccgatctggtcacacggctggccgagagtttccaacagttggagccgctgtaccagtggctgatgacggtggaaaccatgaagcaggtgaacccggcggatttataa

SEQ ID NO: 374317 - DNA, 1221 bp, Salmonella enterica
atgaataaggaattttctctgtccagaccaacatttaaacgcacactacggcggattagtataatcagcgtgctgcttacgatgacattgatctggctattaatttgcgttgcgtctgtccttacgctcaaacagtatgcgcaaaagaatctcgatttgaccgccgccacaatggcccatagccttgaagcggcactggtattttccgataacacggccgcagcggaaacgctcgccacactgggacgccagggacaattttcagcggcggaggtccgcgataaaaatggccgtattatcgcctcatggcgctatgatgcgcgagccgcagacgataagctcattggcttaattagccactggctttttccattgccggtatcacaacccgtctggcacaacggcagggccatcggcgaagtacggcttgtcgcccgcgacagccttattggtcattttatctggctatcgctggcagtgctgacaggatgtattctgctggcatccggcattgccctgctgctcacgcgttatttacacaatggcgttgtggatgcgctgcaaaatattactgaagttgtacacgacgttcgcactaaccgaaatttttcacgccgggtacctgatgagcgtattgcggaatttcacctgtttgcgcaggatttcaatagccttctggatgagatggaagaatggcagctacggcttcaggctaaaaatgcccagttactacgtaccgcgctgcacgatccgctgacggggcttgccaatcgcgcagcatttcgcagctgtattaacgcgctgatgaaggacaattccgctcgtagcagttcggcattgttatttctggatggcgataactttaaatatattaatgatacctggggacatgcggcaggcgaccgggtacttatagaggttgccaaaagattagcggaattcggtggtagccgttatcagacttaccgactcggcggcgatgaatttgcgatggtgctttacggtgtacattcggagtatgaagtacaacgtatttgcgcagcgctatcccaggcgtttaatcgaccttttgaactgcataacggccagcggataacgatgaccctgagtattggctttgcgctgacatgggaacatgccactgccgaaaaactacaagaactggccgatcgaaatatgtatcaggctaaacaccggcgtgcggaacgctcgctaaactaa

SEQ ID NO: 374318 - DNA, 1050 bp, Salmonella enterica
atgactgtaagtaaacaaaaaagtggcaaatggttatgtgaactctatccaaatggtcgagaagggcggcgtatacgtcggcaattcaataccaaaggtgaggccgaggcattcgaagcatttaccaaaagcgagagtgaagataagccgtggctcggcaagaaagaagaccgccgacgcttaagcgaaattattcagctttggcacaatttgcacggtcaagcgttagtcgccagtaagtcgcggttagctaagcttcaaattgtatgtaacgggttgggcgaccctattgcatctcgtcttaccgctaaagattgggctcattaccgcgaccgtcgattacgtggcgaaatagacaacggctatcacaaagacccggcgaagtggatcgccaaacctataacagtcaatcgcgagcagcaatacctcgaagcggtgttcaatgaactgcgacgattaggagagtggagtttacccaatccactggacgggattcgcgtattcaaagaagctgagaaagaaatgtcgtggctaactttgtctcaactcgcggagctgttccgagcctgtgaacaatatggcaaagaaaatcttacgatgattgttaaggtgtgcctagctactggcgcacgatggggagaagcagagagacttacacgcccccaactttctccatacaagctgaccttcaccaaaaccaaaggtaagaagaatcgcacggttccgattcctaaatggctttacgacgagttatccgaacgtcagggcagaatgtttaagccctgctatcaggagttcaagaagatgctcaaactaacgaacattgagctgacggaagggcagaagactcacgttttgcgtcatacttttggtgcgcattttatgatgaacggcggaaatatactggtgttacagaaaattctcggacacgccaatattcgagaaacaatgaagtatgcgcactttgctcctgaccaccttgaacaagctgtaactctcaatccgttatcgctgtatgttggcgacaatatggcggcagaggttgcataa

SEQ ID NO: 374319 - DNA, 339 bp, Salmonella enterica
atgaaacgtaaactttttttaactctgcttcttactctttcgtttggtgtcgctgctgctgaaaaaaccaaagagatagacggatctacctatggcgataagtggcctctaacctttgaaaaggcgaaagtatcatgtgttaaccgtgcttatgcttttgtgtacgacattaaaactgatgacagatatccattgaatggcatggctgttgatgctgttaagtcaggaaagatggaaggatctaacttagatgacgtatggaaggatgaccctgattatgacggtgttaaaatttccatttcaccggtgattgatgccgctacagccctttgtaattaa

SEQ ID NO: 374320 - DNA, 480 bp, Salmonella enterica
atgtctgtaatgttgcattcaaattcagcagacttattcgatagtctaactttcccacccggcaatctgattacgtcaaaaacatcaagagcaccatcaataccaataagccagcggccatttcctatttttgagctggagcagtcgacaagccaagatacactcacgccatcaataaacactaaatcatcagtgtttgccggaaccatagagacatcaggagtccaatgcccgatatctttgagctcgccagcttcaaggcggcatttcctgatggttaaagcattagacggttccccatctttgcttttacgcatctggccttttcccgtagacaaccatcctaacgaaacaccagtatcgagggcgcaggtcacaaccacgtcaccagggaaaaaatcgcgtctaacccaagtacttatagtgccagaagatatgcctaataaatccccaagctctttttgcatcgtaaaaccatag

SEQ ID NO: 374321 - DNA, 354 bp, Salmonella enterica
atgtcagatgcaaaatcaatcccgctgcatgacgcacaaaacttacaaaatcaaactgtattgctagacgctggtcagttcaacgcgcttgtaaccatgatgcagctatccatgcaaaacatgattcgtacagcgatgttagacaccatgtcagtaaaagacttcgccgccgcccgtggcgttagcgagcgtctggtctggcaatggattgatgagggcgtccttctcaaagctcccaccaaagatgttaccagcaaagaaaaagccgctaagcgtagccgcacccttatcaacgtcaaagcatggcgtgacaaactgacccagcaagctatcgattgccgttatatcaactaa

SEQ ID NO: 374322 - DNA, 510 bp, Salmonella enterica
atgttagattttcgtgtttcgtcacatgcgcactttgacgaggcctgcagaaaattcgcagctactcataacgtgaaagaactagcgaataaagccggaatcaagccgcatacgctttacaacaaactcaacccagaacagccgcaccagttaacgccgcgtgaaatctggacgctgacagacatgaccgaagactcgaccctcgtcgatggttttctggcgcagatccattgtctgccatgcgtaccggtcaacgaactggcaaaagagaaactgcaatcctacgtcatgcacgcaatgagtgaacttggcgaactggcaagcggtgcagtttccggcgaccgcctcacgccagccaaaaaacaaaacatgattgctagcgtaaatgcggggattcgcatgttgtcattatcggcaatggcgctgcatgcacgtctgcagactaatcccgctatgtcgagcgtagtcgatactatgagcggtattggcgcatcgtttggtctgatttga

SEQ ID NO: 374323 - DNA, 228 bp, Salmonella enterica
atgctgaaaaatgaaccgtcattcgcgtctctgctcgtcaagcaaagcccaggcatgcactacggccacggctggatcgcaggtaaggacggcaagcgctggcacccgagccactcacagtccgaattattaaaagggctgaaaacaaagccgccgaaatcgttagactttttaattattcgtattgtccactttattattaaaggggttaaacatgtcacgcgatga

SEQ ID NO: 374324 - DNA, 201 bp, Salmonella enterica
atgtcacgcgatgaattaaggattgttttaggtgccatgattccgaacatggaagacggttttgaaattaaaacccgcgatgggataattttacgagttgacccggaatgggagtgctgcaagcagtttaaagatagtctgaaagctgaaattatcagccaattgaaaagtaaaccagccatcgtatttggttatagctaa

SEQ ID NO: 374325 - DNA, 228 bp, Salmonella enterica
atgcgtaataccgaaatccgtagttttaacactaatagtgatgcgctggccgtattgctgaccgatgcaaaaaaagaagagcgtaaagaccgcgcgctcgctgtttccatccgccttgaggcgctggctatccatatcaccaaagagggtatgagtggcaccgaagctgccgaactgctgcgtcgtgaagcaatccgctttgagaatgaatcacaggagctgcactaa

SEQ ID NO: 374326 - DNA, 222 bp, Salmonella enterica
atggccgacgcaatggatttagcacaacagcgcgagcaggaagaccgcgagcgccacatcagcaacgcgcgcagccgtatcgctgcgccttcccgttttctttgcgaagaatgtgacgcaccaatcccggaagctcgccgcattgcgataccgggcgtggccttttgcgtgacctgtcagcaaatagcagagctcaaatctaaacattacaggggagtttaa

SEQ ID NO: 374327 - DNA, 279 bp, Salmonella enterica
atgagtattcgtatcgaagttggcgacaaatgggttgttaccagcgaccaatatcaattcatcctgaatgaaaagaaaatcgctcaatcagggaagaaagctggcgaggaatggctcgacaccatcggctattacccgaagattaaccagcttatttccggtctggcacatcactacatccataactcggagcttcaaactctgaatgacattgcctcagaaattgagaggttggggatgttatgtgagtcagcctttcatactgggattgcgaaataa

SEQ ID NO: 374328 - DNA, 831 bp, Salmonella enterica
atggttaagggcgtggcagatgttactcattaccacggaacacctgtatggggtgacgccggtaatgttcaccgtattgcggtcaccggtgctggcgcatttgtatcgtatgcacgtcctgaccaattagctgcatcaattaaatacgccctctctgttgctatagataatggcgctttttcagcgtggaagcgtggccttgttattgactggcagcaattctatcaatggctgattccttattatcaccatcccaagctgtcattttttgttatccctgatgtggttgaaggtggcgaagctgacaatgacgcacttatcgccaaattaccacgctgtttcaaagacaaagctgcgccagtctggcatttgcatgaatcattgcaccgtctggttgagctttgccgggagtggccgcgtgtgtgctttgggtcgtcaggtgagtacgcaactatcagaacccagctctggcatcgcaggatgtcagaagcgtttgaaaccatttactgcaaacatagtttctcaacgcaggtgcacgggctccgcatgctcgatggtagggttttgggtaactatcctttggcgactgccgatagcacaaaccttgcctgtaatgtgccgaaattcgaagtcaaatacccggagctcacaaaagcaattcgcgaagccgattatgcgaaaaacctttctgaagatgaacttaaagccgtcattctcaaacgccgttgcgccattctgaaaaatactattgaggccgtatcccctccatcgattgagaattggctatcaaaagggttggctccgcttcaactggagttggctatcgcatga

SEQ ID NO: 374329 - DNA, 2223 bp, Salmonella enterica
atgacgaaatatacgtttgcatacccgtggaatgctccacggtcggcaatagccagcccatatcttacttatgaccaacagcatcgccgcgaccgtatgtttgcggctttgctacatgcgagaaaagtgctttctctccagcccgagtgcgtgcgttttgacgtttatcgcaccgctgctgtgctggagcaaaatcagggcagtcaacgagccaatgcctttttaatcagcttctgcaaaaaggcattgccacgtcttgaactggtcgcaaaaaaatacgagtgcacgggtatcaacagcaatgtatcaaccgctgtttttgatggtcattttgatacccagcttatgcaatatctggcgtcacggatggttaatatggttgccagatataaccgcctccctgatatgtcgcgcgccgatattgacttgctggctgctgatatcgctaatttcattcatgctgaactggctgacattgatgacaccggatttagcgagcttaaaacgctgtacgcctggtacatgcgcgctgggattatttccctgcaattcaacgttaccccgccgcactgggagcgggtgataaagaaatatgttggcgaagatgaaatcgccccggctatcgcccgaatgtttaacgatgtgtggtggcgtggccgcctgcgtcgcattgcggctgcatggcgcgaacatctgcaaattgctgttggcaacgtcagtaagaaaaagcatgcctacgcgagtaaaagctgcgtgactgactggcgcgagcagaagcgccgcacacgcgaatttctcaagggactggatctcgaagacgaatatggtaatcgcatcagcctgattgaaaaattcgacggctcggtcgctaatccagcaatacgccgctgcgagctgatggctcgtatccgtgggtttgaaaatatctgtaatgagctcggttatgtcggggagttttatactctgactgcaccgtctaaatatcacgctaccaccaaagcgggctaccgtaacagcaaatggaacggagcaagcccgtcagacacgcagagctatctcaccggtctttgggcgcgtattcgcgccaagctacaccgagaagaaatccgcatttttggcatacgtgttgccgagcctcatcacgacggaacgccgcattggcacatgcttatgttcatgttgccggaagacgtcgagcgtgtgcgcctcatcatccgtgattatgcgtgggaggaagaccgccacgaactgagaagcgataaagccaaaaaagcgcgctttcatgccgaggccattgacccggaaaaaggcagcgctaccggctatgttgctaaatacatttcgaaaaatatcgacggctatgctcttgatggtgaaaccgatgacgaaagcggtgagctgctgaaagagacagcccccgctgtttctgcatgggcggcgcgctggcacatccgtcagtttcagtttattggcggtgcgccggtgacggtatacagggaactacgcagaatggctgaccctgaaacagccagggcgcttagtgttgaattcgccgccgtgcatgatgcagcccactatggccgctgggctgattatgtgaatgctcaaggcggaccattcgttcgccgtgacgatttacaagtacgtacattgtatgagcctcgaactgaatttaatcagtatggcgaagaaactgtgtgtatcaaaggtgtctacgatgcctcgataggtgctggctctcctattctaacccggcttacgcagtggaaaattgttccgaagcgtgccgttgatttggccgttgacgttaagggcgctcctgcgccctctcggagttctgtcaataactgtacgggaagcgaaagcgatccaccggaactcgatttatctaaacccctaagtcgacgtgaaaaacgagagctgacaaaccgactcaggaagcaaaagccagcaatacggcgaaaatttatccacggaacggatgagcaaaacgcagctatagcgaaaactatcgacgagatacatctgactaccggcatcacaatcagccggggcgaagccctgcacctgatggccggtggtaaaagttgttttgatggcaaatggctacgcggaacggccaaaggtgaaatattttccgcagcgccatcgcatcaggctaaagccaggaaaatccttaatcgtgttgctgcgatggctgaagcagcaaaaaccaatatctga

SEQ ID NO: 374330 - DNA, 183 bp, Salmonella enterica
atggttggcgaacatttcagccgaacgcagcaaaagtgggcttgtgtgcaatttatcgccgaggtatctctgattgcaaactgcaagccatcagacttaaagctcgcgctcactctcattgcagacctagcaaacagcgaaaataacgaaaccgaagatgatattttttataaagctgattag

SEQ ID NO: 374331 - DNA, 234 bp, Salmonella enterica
atgagaatcaatatcacattggataaagagcaaaaaattagtcaggcaacgttggatgcacttgaggctgagctgtaccgcaatcttcaacctatttacccaaagactgctatccgcattcgcaagggctccgcaaatggtgttgagctaagcggtttgaaactggacgaagataaaaaaagagtaatggaaatcatgcagcaggtatgggaggacgatagctggctgcattaa

SEQ ID NO: 374332 - DNA, 210 bp, Salmonella enterica
atgcatcgactaccgggcgaaattccgcagcacaaaactaaaagcataaaacttatggctattgttcatcgtctgcagacgataatggtcaatgagaacctgactccagcagagttggtcgggtgtgcagaaatcgtcagggataactatggcaaactggataatatcagcagaccggcacattacgcaccgccaccacgtcgaccatag

SEQ ID NO: 374333 - DNA, 195 bp, Salmonella enterica
atgcaaaatcccatttcatcgaaaaaagacccgtttgaagattgggcaaagaatctgactttaatggcattaaataacgacctgagctctcgcgaggtggaaagctacaccgcaaaaatggtcgaaaaggctaataaagatgagctttcagtcgttatcaaacacctgttaaatcacatcagaatgcgcaaataa

SEQ ID NO: 374334 - DNA, 747 bp, Salmonella enterica
atgaaaaataatgttttctcacaaagccagattcaggcaatggccgatattctgcacaatgacagttttgactatcaggcaacatggttgcgggtcggaaaactcaatatcgaccgcagcattactaaatcgcgccagattggcgcaacgctgctatttagtcgtgaggcactgctcgatgcgctgacaacgggcgataatcaaatctggtttgctcatacagttgagcatgcgcgcgtggcgctgatgtacatgaacaatctttcagcacgcgtcggtgtccgtctggcgagcaacggttacagcgtacagcttgacagcggtgcgaccatcaaccttgtcggcgaggaatcccattgcgccgcgctggcgggtaatgtctaccttgatgagttcggatggttcaataacccgctaagagcggcaaaagtcgcagcggctatagcctgccataatcgccacagcctgacgatgttcacctctccctctgataattatgacgctttccgggtgtggaacggcacgttccgcaggcatcgaccgacaccgctaatcaataccggcgacagcgtattctgtacagatggcgtctggcgccagtcggtcacactggatgcagcatgccagcgcgggtgcaatctctttgcgcctgaggaaattaaacacgaatacagcgacgatgattatcgcatgttatttggttgcgactggtctttcgctgttgcagcgggcgaggtggcagcatga

SEQ ID NO: 374335 - DNA, 1476 bp, Salmonella enterica
atgaacacccactataattcccgctatattttttccattaccttagtcgcaacattaggagggttattattcggctatgacactgccgtcatatccggaacggtagaatccttaaataccgtgtttgtcgctccgcaacatttaagtgaatccgccgccaactcgctattgggcttctgtgtcgccagtgcgttgattggctgcatcatcggcggtgcgctgggcggttattgcagtaaccgctttggtcgtcgggactcgctgaaaatcgccgctctgctgttctttatttccggtattggctccgcatggccagaattaggatttaccacgattaacccagataatgccgtacctgtttatttggccggatatgtccccgaatttgttatttatcgcatcattggtggtattggcgttggtttagcctcaatgctctcaccgatgtatattgctgaactggctccagcgcatattcgtgggaaactggtttcctttaaccagttcgccattatttttggtcaactgttggtgtattgcgttaactatttcattgcccgctctggtgacgctaactggctgaataccgatggctggcgatatatgtttgcttcagaaagtattcccgccctgctgtttttactgctgctgtataccgtaccggaaagcccgcgctggctgatggcacgtggcaaacacgaacaggcggagggcattctgcgcaaaattatgggtagcagcctcactacccaggccatgcaggagatcaaccagtctctggagcatggtcgtaaaaccggcggacgcctgttgatgtttggcgtgggcgtgatagtcattggcgtgatgctgtccgtcttccagcagtttgtcggcattaacgtcgtgctctactacgcgccggaagtgtttaaaacgttaggggccagcaccgacgtagcgctcttgcagaccattattgtcggcgtaatcaacctgagcttcaccgtgctggccatcatgacggtagataaatttggtcgcaaaccgctgcaaattattggcgcattgggtatggctcttgggatgttcagccttggcaccgcgttttacacccaggcttccgggctgatagcgctgctgtcgatgctgttttacgtcgccgcatttgccatgtcctggggaccggtttgttgggtgctgctggcagaaatcttcccgaacgcgattcgtggcaaagcgctcgccattgccgtcgccgcgcagtggctggcgaactacttcgtctcctggaccttcccgatgatggacaaaaattcgtggctggtttcccatttccacaacggtttctcctactggatttacggttgtatgggtattctggcggcgctgtttatgtggaagttcgtgccggaaaccaaaggcaaaacgctggaagaacttgagaagttatggacgccagcagaagagaaaacgccgaaagccgccatacaataa

SEQ ID NO: 374336 - DNA, 1419 bp, Salmonella enterica; identical to SEQ ID NO: 373478

SEQ ID NO: 374337 - DNA, 1200 bp, Salmonella enterica
atggaaaaaagtaaaatactcatcctcaccccacgatttccgtatccagtggtaggaggggataggttaaggatatatcgcatttgtaaggaattgtctaaatactacacattagatttgctaagtctatgcgatagtatcgaagacttaaattttatagtaaaaaatgatcacgtctttgataaaattttccggatctatcatcctaaaataaaaagttattttaatgtattaaaagcattacctggtagaaaaccacttcagatagcttattataaaaatactgaatttgaaaataaacttaatgagataattgggaattatgatttgactctttctcatctcattcgtgttggtgattacactttaaataagcctggcttgcatattcttgaaatgactgatgcaatttccttaaattattcgcgtataaaaaaagaagctccgaaaaattctttaaaaagcatcatttactctatcgaacaagagcgattattaaaatatgaaaaagaagtttatggccgctattcactcatatcgttaatatcagaggttgacaaaaaattcctttttgggaataggaatgataacattttggtttgtaataatggagttgatcttgaggattatccttttacaaagagagtcattgaaaataccaatataattaatcttatttttattgggaacttgtgttcattccaaaattttgacggagtgaaatggttcgtaaaaaatattctaccatcaataaataaaaataataacggtaagcaatatattttccacattttaggtaaaataaacaaaagtgataaactatatttacaaggttttgaaaatgttgtggtgagtggcagcgttacaaatatggctgatgcggctaaaataggacatatcggaatttgcccagttcggtttggtgcaggtgtacaaaataaaatattagaatatatggctcttggacttccaactatcacatcccgaatgggttatgagggtatagaagcaaatattggtgaagagatattaattgctgataatagtgatgagtacttgaagtcgttagaaactttgagtgaaaattctgtatatcaaatgattgctaagaatgcgcgaaattttgttgcggagaaatttaattggtcaacgcgtttatcagttttggtgaaaaatattgagaggttaacaggaaaatga

SEQ ID NO: 374338 - DNA, 1425 bp, Salmonella enterica
ttgaacgtctccactgccttacgccaggttgtcgtccgtacgccctggtatgccaaacgcaagagttacaaggtgttgttctggcgtgaaatcaccccacttgctatccccatttttctggaaaatacctgtgttttgctaatgggcgtgctcagtacttttctcgtcagttggctgggcaaggaagcaatggcgggcgtggggcttgccgacagttttaatatggtaattatggctttttttgcggctatcgatcttggtactacggtggtggtcgcctttagcttgggcaagcgcgacaggcgacgggcaagggcggcggcgcgccagtcgctggtgattatgacgctatttgccgttgtgctggcagtggtcattcattatttcggcagtgaaattattaatattgtcgcaggcgaggcgacgccagaagtaaaggggctggcgttaacgtaccttgaactgacggtgctgagttatccggctgcggcaattgcgctaatcggtagcggcgcgctgcgtggggcagggaatacgaaaatcccgttgatgattaacggcgggatgaacattctcaatattatcatcagcagcatcctgatttacggggctttctcctggcaagggctgggttttgccggcgcggggctgggattaaccatttcgcgctacatcggcgcggtagcgattatttgggtgctgatgattggttttaatccggcgctgcgcattccgctgaaaagctatctgaagccgctgaatttcggcattatctgggaagtgatgggtatcggtattccggcgagcattgagtcagtgctgttcaacggtggcaagctactgacacaaatgtttgtcgccggaatgggcactaacgttattgcgggtaactttattgccttttccgtggcggcgcttatcaacctgccgggtaacgcccttggttcggcgtcgactattatcactggtaagcgtcttggtaccgggcaaattggtcaggcagagcgtcaactgcgccatgtattctggatgtcaactatcgtacttacggcaattgcctgggggacagcgccgttcgcgggtctgtttgcctcattttatacccaggagcaggacgtaaaagaggtagtgaaagttctgctctggcttaatgccgcctttatgccaatttgggcggccgcgtgggtgttgccgtcgggttttaaaggcgcgcgcgatgtgcgatttgcgatgtgggtatcaatgctggggatgtggggctgtcgcgttgtggcagggtatacgcttggtattgtgctgggtatgggggttgtaggggtttggctggggatgtttcttgactgggccgtgcgcggcgcgctgttttactggcgtctggtaagcgggcgctggctgtggagatacccgcgcgtaaagagggagtaa

SEQ ID NO: 374339 - DNA, 303 bp, Salmonella enterica
atggcattaaccgataccgctatccgcaagatcaaacccaccgataaatccttcaagattaccgacagttcaggactctacctgctgatcaaacccaacggctcaaagctctggtacatgaagtaccgcattgacgggaaagaaaagaagctggcttttggcccttatgcggtgaaaaaacagttaatcaggtcgaactctgcgaaaaatctggatggtgagttcacgccgcctgaaacacagcattacccggccctgccccttgagaaactgcctgaatgtttgccgcgaacggataattag

SEQ ID NO: 374340 - DNA, 1050 bp, Salmonella enterica
atgtccgcacaaacccaggccgctccggccatgaacctgtttgaacgttacctgagcgtctgggttgcgctctgcatcgccatcggcattttgctcggacaggtggtgccgggcgtctttcgcgttatcggcggtctggagatcgcccgcgtcaatttgccggtcggtttacttatctgggtaatgattattcctatgctgctgcgcattgatttcggggcgctgggtcaggtcaaagcgcactggcgcgggatcggcgtaacgttgtttatcaactggctggttaaacccttctcaatggcactgcttggctggctgtttatccgttatttattcgcaccgtggctacccgccgatcagcttgaaagctacatcgctgggcttattctgctggccgccgcgccctgtacggcgatggtgtttgtctggagccgactcactaacggcgacccttatttcacgctgtcgcaggtagcgctgaacgatgccatcatgattttcgcctttgcgccgattgttgggctgctactcggcctgtcctccattaccgtaccgtgggctacgttgttgacctctgtggtactgtacatcgttgtgccggttattctggcccagctctggcgtaaggctctgctacgcaaggggcaagcggcattcgataatgcgctgacgaaaatcggcccgtggtcaatggcggcattactggcaacgctggtgttactgtttgcgtttcagggcgaagccattctgcaacagccgctggtcattgccctgctggcggtgccgattctgattcaggtgctgtttaactcggcactggcctatgggttgaatcgactggtgggcgaaaagcacaatattgcctgtccatccagcctgatcggcgcatcgaacttctttgaactggctgtcgcagcggcaatcagcctgtttggttttcattccggtgcggcgctggcgaccgtggttggggtgctcattgaggtgccggtgatgctgctggttgtgcgagtggtgaatcgttcgaaagggtggtatgagagagcttag

SEQ ID NO: 374341 - DNA, 1761 bp, Salmonella enterica
atgctgatgcttcggcaggtgcccccctttttgttttttaccggtaaaggcggtgtgggtaaaacatcgctggcctgcgctaccgcgattcatctgaccgcttccggcaagcgcgtattgctggtcagcaccgatccggcgtccaatgtcgcgcaggtatttgaacagaccatcggccaccagataaccccgattgcagcggttaacggactgtccgcgctggaggtcgatccgtccgccgccgctgcgaaataccgtgagcgcattgtcggcccggtgcgtggcattctgccggatgacatcgtggcgggtatcgaggagcagctttccggtgcctgcaccaccgaaattgccgcctttgatgaattcaccacgctgttgaccaatcagcaactgcgcgatgagtacgaccatattgtgttcgacaccgcgccgaccgggcatacgctgcgaatgctgcaactgcccggcgcatggagcggctatcttgacaacagccaacacggcgcgtcctgtctcggaccgctggccgggctggaaaaacagcgcagccagtatcgcgccgccgtggacgcactggcgaatgcagaactgacgcgcatggtgctggtcgccagagcgcagaccgcaacgctgaaggaagtatcgcgtacgtatgacgaactggccgccatcggcctgacgcagcagtatctggtcattaacagcctgttgcctgagcaggaaactgcgcacgataagctggcgcaggcactgtatcagcgtgaacaacaggcgctgcaacatttacctgataatctgcgcatattgccctgcgatcgcctgccgctaaaaccgttcaatatggtgggtctgtcggcattacgtggcctgctggacgacagcgcaacaggcgctccgatggaaaccggagatatctcccccgtagatctcccttcattgtcatcactaatagacggattcgcatctcagggatatggcctgatcatgctgatgggcaaaggcggcgtggggaaaaccacgctggctgcggggattgccgttgaactggcccgtcgcggtcatccggtacatctgtccacatccgatccggcggcacacctgactaacacgctggacggctcattcgacggtctgaccgtcagccgtatcgatccgcaggccgaaaccgagcgttaccggcagcaggtgatggctgagcagggtaaaaacctcgacgaacaggggcgcgccgttctggaagaagatctgcgttctccctgcacggaagaaattgccgtgtttcaggcattttcccgcatcattcaggaggcaggtaaacagttcgtcgtcatggataccgcaccaaccggccatacgctgctgctgcttgacgctactggcgcttatcatcgcgagattgcccgactggccggtgagcacggtcagcccgtactgacgcccatgatgcgtctacaggacagcgaacagacaaaagttctcatcgccacgctggcggaaaccacgccggtgctggaagccgcccatttgcaggacgatctgcgccgcgcagggattgaaccttggggttgggtgattaacaacagcctgatcaatacgccgactacatcgccgctgctgcgccagcgcgccgaacgtgaacgaccgcagattgatgccgtctgtacccaccatgcccgccgctgcgcgctggtgccgctacaggccgaagagcctgttggtgtcgaacgtttgctacaactgagcacaacgggaaaataa

SEQ ID NO: 374342 - DNA, 363 bp, Salmonella enterica
atgaagacgattcagattttcgatcccgctttatgttgttcttccggcgtctgtggcccggaaaccgatccggcgctggtcgcattcgccgctgattttgagtgggccagaacgcagggcgtcaatattgagcgtttcaatctggcacagcaaccattgctcttcgcacagaacgaaatcgttaaaggctttctggcccgttccggcaaagaggcgctaccgctgattctggtggatggtgaagtcgcactggctggtcgttaccctcgcagagaggaactggcgcgctggatggggcttaccgtctattcgagttttacgccagcgacttcctcctgttgcggtggcgataagtgctgctga

SEQ ID NO: 374343 - DNA, 477 bp, Salmonella enterica
atgaacgtactttttctctgtaccggcaactcctgccgttccgtgctggccgaagccacgtttaaccatctggctccagccggatggcgcgccatgagcgcaggcagtcacccggcgggttacgtacatccccgagcactggcgttgttggcgcgggaaggcatttcaacagaaggctatttcagcaaatcgtggaacgatctgccgcagacgccggatattgtcgtgacagtctgttcaaacgctgccggagaaacctgtccggcctggctcggtaacgtgatgcgtacccattggggcgttgacgatccggctcatgctaccggtagcgatgccgaaatcgatgcggcttttgtcactgcttaccagacattacgtgcgcgtattgaagcctttctggcgctaccgctgaatgaattactgcacgatcgcgctcgtctgaaagtcgaactggatcgtattggcgaaattttttaa

SEQ ID NO: 374344 - DNA, 375 bp, Salmonella enterica
atgaacaaacaaactgccacaaccatctttgaatccctctcctccggcgtgcgtctggatgtatatcgcctcctgatcaaaatgggtaccgagggcatggttgccggggagatcgcttcaacgctggatatcccgccgactaacttatcgtttcatttaaaggcgttgacgcaggccgggatgctgacggtagaacaggaaggtcgttaccagcgttatcgtgccaacatcccactgatgctggatttaatcggctggctgaccgaggagtgttgttcaggccacccggaacaatgcgcaggttttcgttcggcttcttcctgctcagaagccgttttaccaccactcaacaccacgaaaaagagtaaatcatga

SEQ ID NO: 374345 - DNA, 810 bp, Salmonella enterica
atgaaaaaacctgtttttttccttctgaccatgatcatctgcagctatatttcttttgcctgcgctaatatcagtgactacaaagttatgacctggaatcttcagggctcttcagcatctacagaaagtaaatggaatgtcaatgtcagacagcttttaagtggtactgccggtgtggatattcttatggtacaggaggccggtgctgttcccacctcagcggttcctaccggacgacatattcagccttttggagtgggtattcccattgatgaatacacctggaatctcggaaccaccagccgtcaggatataagatatatctaccactcggctattgatgttggagcgcgccgtgttaatctggcaatagtttccagacaaagagcggataatgtttatgtcttgcgtccgacaactgtcgcatctcgccccgtcattggcatcggactgggtaatgatgtttttctgacagcgcacgcactggctagtggaggtccggatgctgcagctattgtcagggttaccattaatttttttagacaacctcagatgcggcatttatcctggtttcttgccggggattttaatcgcagcccagacagacttgaaaatgacctgatgactgagcatctggaacgagttgtagccgtactcgcacctacagaacccacgcaaattggcggtggtattttagattatggggtcattgtcgatcgagcaccttattcacaaagggttgaagcattacgtaatccacaactcgcttctgatcattatcccgtagcctttttggcacgaagctgttaa

SEQ ID NO: 374346 - DNA, 543 bp, Salmonella enterica
atgactaaagatgaaatctttgcatctatccttagtagagaaggcggttacgttgatcaccctgacgacagggggggaccaacgcattggggtataaccctgacgacggcccgggctaatggctatatgggggatatgcggaatcttacccgtaatcaagcattaaaaatccttgaggcagattattggtatggtccacgacttgatcaggttgccattatctctcactctatcgcagctgagctttgtgatactggtgtgaacatgggaccctcaatcccgattaagtacttccagcgttggcttaatgtttttaatgatcagcaaaaaatttatccggatttgatagcagatggtcagattgggccacggacgctttcggcactaacattttttctctctcaccggagagatgagggcgaaatgatacttatccgggcattgaattgtagtcagggacaacgctatctggagttagctgaaaagcgccaggcgaatgagtcatttatttatggatggataaaggaacgggtaaggttgtaa

SEQ ID NO: 374347 - DNA, 729 bp, Salmonella enterica
atgaaaaagttaatattcttaaccttatctatagttagctttaataactatgcagtagattttgtgtatcgtgtggactcaaccccgccggacgttatttttcgcgatgggttttcactacttgggtataaccgtaactttcagcaatttatcagtggaaggtcatgtagtggtggaagtagtgacagtcgctatattgcaacaacctcaagtgttaatcaaacatatgctatagccagagcgtactattctcgctcaacattcaaaggtaatttatacagatatcagattcgtgcagataataatttctacagcttgctcccatccatcacctatctggaaacgcaaggtggtcactttaatgcttatgaaaaaacgatgatgcgattgcaaagagagtatgtttccacattatctattttacccgagaatattcaaaaggccgtggcgcttgtttatgatagcgcaacaggtctggtaaaggatggtgtaagcacaatgaattccagttatttaggtttaagcactacgtctaatcctggcgtgataccttttcttccggaaccgcagacgtatacccaacaacgaattgatgcattcggcccattaataagttcatgcttttcaataggtagcgtatgtcaatcacatcgagggcaaagagctgatgtatacaacatgtctttttatgatgcaagacctgtaatagaacttatactttctaaataa

SEQ ID NO: 374348 - DNA, 414 bp, Salmonella enterica
atgtatataaataagtttgtgcctgtttatacattattaattctcatttattcttttaatgccagcgctgagtggacaggagataaaacgaacgcctattactcagacgaagttatcagtgaattacatgttggtcagatagatactagtccttatttttgtataaaaacggttaaagctaacggtagtggtacaccagttgttgcatgtgcggtatcaaagcagagcatatgggcaccctcctttaaagaacttcttgaccaggcaagatatttttatagtacagggcaatccgtaaggattcatgttcaaaaaaatatctggacctatccgctttttgtaaataccttttcagcaaatgctcttgtgggactatcatcgtgcagtgcgacacaatgctttggacccaagtaa

SEQ ID NO: 374349 - DNA, 1587 bp, Salmonella enterica
atgatggaatttaaaaaaaattatttttggcatgtatctgtaatcattattggccttgccattggcttagtgcatcacatttatatttatccgaatttttttcacgcagattcagcagcatatcaagttttagcttcagccataagagatgaaggggttttacttccacatgattttttctacggcaaccaacttattatgctaaaaataagcccattcatagccttagccaactgcattggtttttcaggatataaggcttatgcaataggcggtgcaatagcgatctgcgtttggttttatatttgcaatctaattatctctaaatattgtggtaataaatatttttctcttttactatcaacttgcttattcattccgcttggtatggatgatattgattttttacttggtcaggaatcgcatctttcgaatgtagtactttctattatgatatgcctaccggttatcatatatattcaagaaagcaaaaagagttttttgtgtatttctgcccttgctgttattctaatgactgcagagcagccaattagaactttgattattatagcacctttcattttattcatactgattatattcagatcaaaaaattcagttgtgtcaatgttatctatagctgtatcttttgttatcggcaagatggcaaatgattatcttttaggcagacatttcccactcaaggtcgactattctcaagcatcgttgttaatatctccagataaagcaattgacaatctttttataattttaaagtcaatcctggtgtactcttcatcctctagcttggctgttggaagtaacgcaataggaatattgacacctttctactttatgggcttattgtatatacttttatttattgcaactattgtatatggcttaaaaatatttcttcacattttgattgatggcagaaaaactaaaactagtatttgtcgactagatctgttatgtgcattgggagctacaggttttgttttaggactgctacttatatcatgcctcaacccagaaggtcgtcatattttctgggcaacttgtatactaaaaatttctgtatttgccaccatttttaaaatttttaaaagtaatataaaaaataatacatattcatattcattaactattgcaatggctatatgcatgtcagcaatagcaccagtactatatacaacaaaagcagagtcttttagttacaataaatccaatatgaattcagaaataaataaaaaaattatttcaattgtaaagtcaactggaataacatatatttatggagaggatttttggagaatgcaactattaaactcgattgatgcagaagtacactcttctgaactcacagactcttataataaatttgtaattcctagaacgtggttgtccagaccaagttggtactgcattaatggtgaggttttatattacacaaaagatggcaaggcggataaaataatagagtcagaattaaagagtaaaaacggaaaaatattgtataacggtgcggaagggaaaatatggttaggacctgtaatatggagcaagcctaagtggtgtaattaa

SEQ ID NO: 374350 - DNA, 459 bp, Salmonella enterica
atgggggacgaaaagagcttagcgcacacccgatggaactgtaaatatcacatagttttcgcgcccaaataccgaagacaagcgttctatggagagaagcgtagggcagtaggcagcatattaagaaaattgtgtgaatggaaaaacgtacgaattctggaagcggaatgttgtgcagatcatattcacatgcttctggagatcccgccgaagatgagtgtgtcgagcttcatgggatatctgaagggtaaaagtagtctgatgctttacgagcagtttggggatctaaaattcaaatacaggaacagggagttctggtgcagagggtactatgtcgatacggtgggtaagaacacggcgaagatacaggactacataaagcaccagcttgaagaggataaaatgggtgagcaattatcgatcccttatccgggcagcccgtttacgggccgtaagtaa

SEQ ID NO: 374351 - DNA, 186 bp, Salmonella enterica
atggggtcaggtgggaccaccgcgctactgccgccaggcaaattcttttatgctcagtacgcaattctttatcgcatcagcggcgttgcctgcgctcgcaaagtcagtcacatacttctgtatgctccttcctttccttcgcttgccgccttgctgctgcgcaaattattgcgtactcaactctga

SEQ ID NO: 374352 - DNA, 177 bp, Salmonella enterica
atgaccagaccttatgttcgtctcgataaaaatgatgccgccgtgctgttggttgattatcaggccggtttgcttttactggctcgggatatcgaaccggataagtttaagaataatatgctcgtcctcaacgagttagcgaaatccttcaaccagcctattaatacctggggataa

SEQ ID NO: 374353 - DNA, 1149 bp, Salmonella enterica
atgtccacctatacccgtcccgtcaagcttttgctgtgcgggctacttttgttgactctggccattgcggtactgaatacccttgttccgctgtggcttgctcaggcaagccttcctacctggcaggtaggtatggtcagttcatcttattttaccggcaatctggtcgggacgttatttaccgggtatttaattaaacgcattggatttaaccgcagctattatcttgcctcgctgattttcgccgcaggttgtgttggattgggagtaatggtgggattctggagctggatgagctggcgttttattgcaggcatcggctgcgcaatgatttgggttgttgtcgaaagcgcgctgatgtgcagcggaacctcgcataatcgcgggcgcctgcttgcggcatatatgatggtctattacgtggggacctttctcggacagttactggtcagtaaagtgtctggcgaattgctgcacgtcctcccttgggttacgggtatgattctggcgggaattttaccgctactctttacccggattgtcaatcagcaaacggaagtgcgttattccacttctattagcgccatgctgaagctacgccaggcgcgtcttggcgtgaatggttgtattatttccggcattgttctcggttcattatatggcctgatgccgttatatctgaagcatcaggggatggctaacgccagcattggtttctggatggcggttttggttagtgccggtattttggggcaatggccagtggggcgtctggcggataaatttggtcgcttactggtgttacgcgtacaggtattcgttgtgatacttggcagtattgtcatgttaacccaggcggcgatggcgcctgcgctgtttattcttggggcggcgggttttacgctttatccggtcgcgatggcctgggcctgtgaaaaagtcgaacatcaccagcttgtggctatgaaccaggcgctgttgttaagttatacggtagggagcttgttgggaccgtcttttaccgcgatgttaatgcagaattattcagataatctgctgtttatcatgattgccagcgtatcatttatttatctgctgatgctgttgcgtaacgccggccagacgcccaatcctgtcgcccatatctaa

SEQ ID NO: 374354 - DNA, 180 bp, Salmonella enterica
atgtggcaaccgtcagtaatggccttgagtttgcccgtggatgcgtatgcgggaatggccgaagactatcagattaccactagttttaaggttactggtgctgttaatcctgatcgccatgaggaactatcctaccggacatcacccttccagtatataccgttacggcctctgaagtag

SEQ ID NO: 374355 - DNA, 951 bp, Salmonella enterica
atgccagttacgttaaattttggtgatcgtcgttatgaagttaatcatacacggatatcccgtttgctgagttctgacaaaaaagaagcgctatacatggggccatgggatcgacttaaggaatatttcagaacacacaaaaaagaagaggctctgaaggtattatatgaactcatccacggatgtgagcgtgaaaagcaagctgaacttggcgttgatgtaagcggcatggataagatatatgcttttgaacgattaaaacaatacgctaacccagctcaacaagaccgctttgttatgcgttttaatatgaatcagacacatgttttatttatgatcgacggccaggttattgataaattgaatttgaaacgtctcctcaacgtttgggatgaatgtattttaaaaccgatggagtgggatgaagaagagttgttttttaaaatatgtatttgttatggtaaaagaattttttcagatgcagaattgttacaaaacttagcttccaaccttagacgctcagttaatgaagatgactcaatcaaggatgcagtttatgaacttatgcgatctggagaagatcgacacatggcatgcgttgaatggaatggtaaccttactcgtgaggagatagaaaaactaaaatgtcttaatatgggttcttttgatgcttctacccaattttttaaaataggttactgggatttagagggggaagtcttatttgatatgttgcatccaacgattctttttatgctacagggatatacaccatcagtacagcttacagaggctaataccaggctgttaacagaaatattaaaggcggatgatgatgattatcataataataaaagagaaattgatctcattttggaaagactatacaagtcacataatggctctttatttataagtaaagattcttgttgtcgcaatatgcttgtataa

SEQ ID NO: 374356 - DNA, 978 bp, Salmonella enterica
atgattgcgcgcatctggtcgggtgaatccccattgtggcggttactgttgccgttctcctggttgtatggcctggtgagcggggcgattcgtctgagttataagcttggtcttaaacgcgcctggcgagcgccggtaccggtggtcgtggtagggaatctcaccgcgggcggtaacggtaaaacaccggtggtaatctgtctggtggagcagttgcaacggcgtggcgtgcgcgttggggtagtttcccgcggctacggtgggaaagcagttgcttatccgttgctcctgacgccggagacgacaaccgcagaagcgggagatgaaccggtattgatttatcaacggaccggcgcgcctgtcgcggttgcgcctgagcgcgccgcggcggtgaaggcgattctggcggcgcatgatgtacagatcattatcacggacgatggattacaacattaccgactggcgcgggatatcgaaatagtggtgattgacggtgtgcgccgatttggcaacggctggtggcttccggccggcccaatgcgcgaacgcgccagccgcctgaaaacggtggatgcaatcatcgcgaatggcggcgtcgcccggacgggcgaaattcctatgcagttggcgcctgggctggcagtgaacttacgtacgggagcgcgttgcgatgtggcgcaactgagcaatattgtggcgatggcgggcattgggcatccgccgcgctttttcgcaacgctggaatcctgtggcgcgcatccgcaaaagtgcgtcccgctggcggatcatcaaacgctcgcccctgctgacgttcaggcgttggtcggtgaagggcagaccctggtaatgacggaaaaagacgcggtgaaatgtcgtgcttttgccgaagataactggtggttcttaccggttgatgcgcgtttgtccggcgagaagcctgataagttgcttgaacatatcacctcgctggttcgctag

SEQ ID NO: 374357 - DNA, 129 bp, Salmonella enterica
atgcacactggacaggctcttgatctggtatcccgttacgattctctgcgtaacccgctcacttctctgagagattatctggacccggaactgatttcccgctgcctgaactgggatacagggagatga

SEQ ID NO: 374358 - DNA, 372 bp, Salmonella enterica
atgaaacagacgatgcagcagagcagactgacgctgagaagtaaaaaaccggagcttgtggagcaggagctgtggggcgtgttactggcttataatctgatgagatatcagatgattaaaatggcaggacatctgaaagggtactggccgaaccatctgagcttctcagaatcatgcggaatggttatgagaatgctgatgacccttcagggcgcttcaccggggcggatcccggagctgatgcgtgctcttgaaagtatggggcagctagtaaaattaccgacaagaagggaaagggccttcccgagagtggcgaaggagaggccctggagataccccacagccccgaaaaagggccagtcagttgcttaa

SEQ ID NO: 374359 - DNA, 342 bp, Salmonella enterica
atgacgtttaaaatgagcgataacgcacagacaattaagatttataatctgcgctcagatacaaatgagtttattggtgctggagatacgtatattcctccgcacaccggattaccggcaatttgtacggatattgcgcccctgacattccagccagtcatattgctgtattcgatgctgaaaccaaggtgtggattctgcaagaagactatcgcggcgagacggtttacgacacaacaaccggtaatcaggtttacatcaccgaacccggcccgttgcccgaaaatgtcacatcagtttcaccagatggtgaataccagaaatggtatggatgaaggatga

SEQ ID NO: 374360 - DNA, 144 bp, Salmonella enterica
atggcgatgaacttctgtcggcaagttttggagatgattatactgttacaacaggaaccaggggggcattttttgctgacggtactacacgcagctattctttacatccttagtttccttttcagtgagggggactgtaaataa

SEQ ID NO: 374361 - DNA, 261 bp, Salmonella enterica
atgatcggggaagacccgctggggggcttcttcagccaaggcgtggtgcagctcaaccttttcgatgataacgcgccgcgcgccggtagcgagaagctgatggaagtactggatcacctgaatgcaaaggaaggcagggggattttgatttcgctgggggagggtatccagcaacagttggctatgaagagagatatgcggtcgtcccgtatactacccgctatgaagacctgcttcaggttaagtgacaggtttaattaa

SEQ ID NO: 374362 - DNA, 1641 bp, Salmonella enterica
atggaatctaaaaaaggggaagccaaagtacaaaaggtgaaaaattggtcgcctgtctggatattcccgatcattactgcgcttatcggagcctggattctgttttatcactatagccaccaggggccggaagtcaccttaatcaccaccaatgcagaaggcattgaaggcggaaaaacgaccatcaaaagccgcagtgtggatgtcggcgtggttgaaagcgcgacgctgaccgacgatctgacccatgtacaaatcaaagcgcgacttcattccggtatggaaaagttgctacataaagactcggtattttgggttgtaaaaccgcaggtggggcgtgaaggcataagcgggcttgggacgttgttgtcaggcgcgtatattgaactgcaacctgggaacaagggcagccagccggaaagctatcagcttctcgattcaccgccattggcgccgcctgatgcgaaaggaattcgtgtgattctggacagcaaaaaggccggtcagctaagtcccggcgatccggtcttgttccgtggatatcgcgtaggttccgtagaaaccagtatgttcgatccacagaaacgttccatcagttatcagcttttcatcaatgcgccgaacgaccgcctggtgaccagtaacgtccgtttctggaaggacagcggtattgcggtggatctgacttctgctggtatgagagttgaaatgggctcgctgagcactttgtttggcggcggcgttagttttgatgttccggaggggcttgaacagggacaaccggttgcggaaaaaaccgctttcagcctgtatgacgatcagaaaagcattcaggattcactctataccgatcacatcgattaccttatgttcttcaaagattcgattcgtggactccagccgggagcgccggtcgaattccgcgggatccgtttagggacagtcggaaaggtgcctttttttgcgccaggtatgcgacaagcgtttaatgacgattatcgtattccggtgttggttcgtattgaaccggaacgtctgaaagcgcagcttggagagaataccgacgttggagctcatctggccgatctgcttaatcgcgggttaagggcgtcgctgaaaaccggtaacctggtgacgggcgcgctatatgtggatctggatttctatcctaaagaaccgcccttgaaaggcattcgcgagtttggtggttaccagattattccaacagtcagtggtggcctggcgcaaattcagcagcgactgatggaagctctggataagatcaataacctgcctttgaatccaatgattgaacaggcgactaacaccttgacggaaagccagcggacgatgaagcatctgcaaaccacactggataatatggacaagattacctccagtcagtcgatgcagcagcttccggcggatatgcaaacgacgttacgcgaacttaatcgcagtatgcaaggcttccagcctggatcagcggcgtataacaaaatggtggcggacatgcagcgtcttgatcaggtgcttcgcgagttacaacccgtgttgaagacgctgaacgagaagagcaacgcgctggtatttgaagcgaaggataaaaaagatcccgagcctaagagggcgaaacaatga

SEQ ID NO: 374363 - DNA, 195 bp, Salmonella enterica
atgcgcaagattcacaccaatgtcatatttgtgagctatacggtaaatcatttgtacaaaaaacgtgcgccagaacaactattttccggcgttgaaaaaaccgcttcagtcgcacggcctgaagcggttaaatttacattacttttatctcagggaagccgttttatctcatcggccatagcggtcgcttcctga

SEQ ID NO: 374364 - DNA, 168 bp, Salmonella enterica
atgaagagacaaaaacgagatcgcctggaacgggcacatcagcgtggatatcaggccggcatcgccggacgctcaaaagaaatgtgtccctatcagacgctgaatcaacggtcatactggctaggaggttggcgacaagccatggaggacagggtggtaatggcctga

SEQ ID NO: 374365 - DNA, 1761 bp, Salmonella enterica
ttgaccattacgaaacttgcatggcgtgatctggttccggatagcgaaagttatcaggagatatttgcacagccacacgcgactaacgaaaaagacaccttactcagtgatactcagccacgtctgcaatttgcgcttgagcaacttattcagccgcgggcctcatcctcttttatgctgactaaagcgcctgaagagcaagagtatctcactttactttcagatgtcgtccgcgctctgcaaaccgatgccggacaattaaccggcgggcattatgacgtttccgggcatactattcattaccgtgccgcgcaggatgtacaagacaactttgccaccctcgcacaagtagttagcgcggactgggtcgaagccgaacaactctttggttgcctgcggcagtataaaggcgatattaccctgcagcccggtctggttcatcaggcgaacggcggcgtacttattatttccttgcggacccttctggcgcagccattgctgtggatgcgcctgaaagccatcgttacccgcgaacgttttgactgggtagcgtttgacgaatcgcgtccattaccggtttccgtgccatcgatgccgctcaaattaaaagtgatcctggttggcgaacgtgagtcgttagctgattttcaggagatggaaccagagctcgcggaacaggctatctacagtgaatttgaggacaacctgcagatagcggatgcagaagccatgactctgtggtgtcagtgggtgacacatatcgcttcacgcgataatttgcctgccccggcgccggacgtctggccagttctgatacgcgaggctgtccgttataccggtgaacaggacaccctgcccctttgcccactgtggatagcccgccagtttaaggaggcggcgccattatgcgaaggagagacatgcggtgcagaagcgctcagcctgatgcttgcccgacgcgaatggcgagaagggtttctggcagagcggatgcaggacgaaattctgcaagagcagattctgattgaaaccgaaggcgaacgtgttggacaaatcaatgcgctttcagttattgagtttcctgggcatccgcgcgcttttggcgaaccctcgcgaattagctgcgttgtgcatatcggcgatggcgaatttaacgatattgaacgaaaggccgaacttggcggaaatattcacgctaagggaatgatgattatgcaggccttcctgatgtcggagttgcagttggaacagcaaatccccttctccgcctcgttaacctttgagcagtcctacagcgaagttgatggcgatagcgcctcaatggctgaattatgtgcgctcatcagcgcgctggctaatgtgccagtgaatcaaaacattgcgattaccggctcggtcgatcagtttggccgcgcgcagccggtgggcgggcttaacgaaaaaattgagggtttcttcgccatctgcgaacagcgggagttaagcggtaaacagggcgtgattattcctgccgccaatgtccggcatctcagtcttaaatccaggctgctgcaggcagttaaagaagagaagttcactatctgggcggtagacgacgtgaccgacgccttaccgctactgttaaatctggtgtgggatggcgaaggacaaacgacgctgatgcagactatccaggagcgtatcgcgcaggcgacgcaacaggaaggtcgtcatcgcttcccgtggccattacgttggctgaactattttattccgaactga

SEQ ID NO: 374366 - DNA, 222 bp, Salmonella enterica
atgatggtattgagtggtagcgcgtctgccgtgtcggcgttgagcctcagtagcgcggacattcttactatgggatcgttgacgctaccaattggcgaaattgcattacgtgtggctacctgttggtggcgcgatttacggccacatttcgcccacattatcgatgtttgccctgtcaggtacgttaactacgtcctgtatgaaccttcactactgttatga

SEQ ID NO: 374367 - DNA, 219 bp, Salmonella enterica
gtgagtgaaatggtatttacagcagtatttattgcttccagtcagaaaatcagcggggttctcctttctgtaacgttgagggcagccagtacaggcgatgccctttatcaggcagaacgggaactgatggagcatggttattataatattgaacacctgtcagtttgcattgctgaagatgatagttttctagggataaaaattattgataattattga

SEQ ID NO: 374368 - DNA, 276 bp, Salmonella enterica
atgcatattctgggtcagtggatacgtacgttcaccatccccaaccagtcctcggaggcaaaagcctggcaggaattcgatgaaaatgggcgaatgaaaccctctgcatggtatgccaggatcgtcgacgtcactgaagaactgtttaaagtcacgctcctgctgaaaggatatactggataccttgcgtatcgccacagcgcaagcaaagaaagtcatcagccattgccagctcgcattaaccaagaaaaatctggtatctggaatcaccgctaa

SEQ ID NO: 374369 - DNA, 150 bp, Salmonella enterica
atggaacaatttcctaccctgatggttgattgctttgatgagcgaattgctgaacgccagcatctgcaggaaccaccacacattctgatcctgtatggttcagttagagaatgttcgtgcagccgttttgctgcgaaggaagcgggatga

SEQ ID NO: 374370 - DNA, 342 bp, Salmonella enterica
atgctacggcctgttcaacttttcaaaattctgtctgacgaaacacgtcttgctatccttatgcttctccgggaatccggagagctatgcgtctgcgatatttgtgctgctacctcggaatcacagcccaaaatttcgcgtcatatggcaattttgcgtgacgctgaaatggttatagaccgccgtgaagggaaatggattcactaccgtctgtcacctcacatgcctgcctgggcggctgagacaatcacgatttcctggcagtgcctgcggaacgatgtacgtaaatggctcgacaaatcggcctgcatctcttgccagaccagagaaacatatatataa

SEQ ID NO: 374371 - DNA, 357 bp, Salmonella enterica
ttgcttggcgctgccgttgctgcactatttgccaacgatggcgtggcgctgatcctgacaccgatagtgatagttatgctgcttgcgctggggttcagcaaagagacaacgctggcctttgtgatggccgcggggtttattgcggataccgccagtttgccactcgttgtctctaatcttatgaatatcgtctcggcggattactttggtctgggttttacgcaatatgcttctgtcatgcttcctgtagatatagcggccattgccgctacgctggtgatgttgcatatgtttttccgtagggatatcccgacaacgtatgatgctttgttactgaagtcatcagccgcgcgataa

SEQ ID NO: 374372 - DNA, 471 bp, Salmonella enterica
gtgctgcgtggagcgccctggcagattgtcattttctccatgggcatgtacctggtggtttatggcctccgcaacgccggtctcacagagtatctgtctggtgtactgaatatgctggtaggtaaaggtttatgggctgcaacgtttggtaccggtttcctgacagccttcctgtcgtcagtcatgaataatatgccaacagttctggttggggcattgtcggttgacggaagcacagcttctggcgtcatcaaagaggccatagtttatgccaacgttattggctgcgatttaggccctaaaatcaccccgattggtagtctggccatgttactgtggctgcatgtgctctctcagaaaaatatgaagatcacttggggatattatttccgcatcggcattgttatgaccctgccggttctatttgtcgctctggccgctttggtgctgcggctctctgtcactctgtaa

SEQ ID NO: 374373 - DNA, 411 bp, Salmonella enterica
atgagcaaaattacaatctatcataatccggcttgcggtacttctcgtaacacactggagatgatccgcaacagcggcaatgaaccgacgataatttattatctcgatacgccaccgactcataatgaactggttaaacttattacagatatgaggattactgtacgtgctttgctgcgtaagaatgttgaaccttatgagaagcttgtcctcgctgatgataagtttaccgatgagcaattaattagttttatgattgagaatcccatcttgattaatcgtcctattgttgtgacatctgtgggcacacgactgtgtcgtccttccgaagttgtgctggacattattccagattcccaaaaagatgttttcacgaaagcggagggtgaacaagtggttgatgaaaaatga

SEQ ID NO: 374374 - DNA, 882 bp, Salmonella enterica
atgccaataactcaagcaacaccagaaaaagtagcaaagtatttgtgtgcagccggagtcggtacgaaagaggcaatggaaaatgcaacatcaccgcagggcatatgtgaatggattgttaacttttttacctgtggcagagtaaaaagaaacaatgaaaaatgctttcgggaggtagtggaaaaactgaccacggcgttattacatgtaaataaagatgatttttatagtggtgccaaaatatttctggaggatatcaacgggtgcgttacaagtttctcatatggagaagtgttcgaaagctccagccctatggtcactgtagaagttagtaaaaatggaaagactgtaacgcgcacaattgttgccaagacatttttggatgcatgccgaatgttaaagcttatgaataaatataatatacaaccgcaagaggatagcgcccttttaaccgatgaaggtaagcttgatctgcgtggagcaaacctgactcataaagatttcaatggagaggatttgtcacatatagatgcctctaatgcagatttccgtggttcgaatctttctgacgtaaatttaataggtgcaaatttgtgttgcgcaaacctacatgctgtaaatctgatgggctcaaacatgactagagcaaacctgactcacgcagacctgacttatgctaacatgtcctctgtaaacttaaccgctgcaattctattcagctcagacttcactagcaccaacctaaatagtgcaatattagataagatagctctaactttagcgaaatcattaacaggagccaatctgacaggtattcaacatacccccaccccactcctggattacaatgatgaaactcctttcccccgcctgatattttag

SEQ ID NO: 374375 - DNA, 1059 bp, Salmonella enterica
atgtttaaatctatacataacaatggttcatctaacattgtatttgatatggtgaagaaagatgttattggttgcatggacgatgtagcggagtatagagaaaaaataaaacaattatctgaagtgtctttacaattttctcaattatttttccattttgaagatttttgtaaaaaaaataacatactcattttttgtcatagtgaggaagagctggctcagtgctttgctaatgaaaatccccaatataccttttctgaaagctttaattatatctcccgaactcattcttatgggtttactgcattaacagaaaatagaatttattctatttctggagcacgaggaaaacatggtgccaatcatgagatgatgcacctattatctgctcccggagggaagacaaaaatgttattgcaaatttccgcaaatatgatggaaggaaccaatgaattttttacacgtgaagtagaaaaatatatgtcagttattgaaccggaaattactgaggcatactcattcacttatcctaaacaatatgaatttattacaaccatcattaatgtatgtggtgaaacagtaaaaaatgccttataccagattcatttttgtggtgaagacaccgattgtcttattgatgctatgctcctccaatggaaacaaaaaagtgtcatgggaaatatgaagccagtttacaaaacaccacctaatgagacacaggcaaagaattttttaaaaaggtttttaatagaaattaccagtaatatggatggagaatctgataatagtattgcgcttacggggtttcacaaacgctttcctacacctgaaccagagatacccccgcctccaccactaccaccattacctggtgcgccacgaccgttacctgttgcgccaccgatattacctggtgcgccaccgccattacctggtgagccacaaattttggatgcgatagatgccggctttaatgaggaggaagcatacaatatttttaaattacagatgatggattttctgcatttggtgccacctccccctccgttgctattctaa

SEQ ID NO: 374376 - DNA, 897 bp, Salmonella enterica
ttgaatattcagcatattaaacgaaaacttacccactgggaaacatcttcttttcccatatatagagacaccttcgaacaatatggtggtagcgttaacatgcatcctgatatcgtggaatatttcatgaaatatcatgactggaaattttcgttttttcactacaaaaaatatgacgaaattaaaggggcgtattttgtatgtaacaatcaaaacattggaatacttatgcgcagagcatttccgctttcatctgatgaagtacttattcctcttgcccctgagctacgatgcttccttcctgaacgtaccaataagctttctgtataccacaggtcacaaattattaatgccacatggcgtcttgccagaaagaaacagaactgtctggtaaaagacaccttctctactaaatttggaaaaaaccgtcgtaatgagtatcaaaagtttctccggaatggtggaaacgtcaaaagcctggatgatttttcaggtgatgaactggtgtggatttaccagtcattattccgctcacggtttggtgatactctcccgtgttatccgacaggcaacctgaccgactttttttcccaccttcgccacctcttgtatggttgtgtgctctatgttgaaaactcaccatgcgcttttgatattgttttaaaggcagagagccgccttaatgtatattttgatgttccaaacggcggtgtaaaaaaagaatgcatgaatcttagccccggaagtatactcatgtggcttaatgttaataatgcaaagagttattgcaaggcaaaaaataagaagtttattttttctattggcgccctcagacctgagtgggagtacaagctacgttgggctgaaccattttttaccggaaaatctttttgttaa

SEQ ID NO: 374377 - DNA, 231 bp, Salmonella enterica
atggaagcatcttgttatgtccatggcggttcgctttgtgcggcgtgtacaggctttttctgcggcgtggttctgtacgaccccagagggtgcctgaaaaacgtgatgacgacttcccatgagggtcaagcggctaatacaaataaaattcactgcttatttagtttctggattttttacgctgtcaggagcatagatggccgcctgactatcaatttttatagcttctga

SEQ ID NO: 374378 - DNA, 408 bp, Salmonella enterica
atgaaatatcaaaaattattggcaggaatgatggttattactgtcatgatgatgacgggatgttcaacgtttaatcccgtacaactccgtcagcatcaattagaaagaaactatacctactatcttcttgatcctccgctatatgaaggcgatgtagtacaatataaatgtaaagatggcagtcaggatacggtgactattcagaaagtcacgccacaatcgttaattaccagtaccgatcaagtaattccgttggcagacctgacctcacttgagaaaaaagatatctctaaagggaaaactgccgctgctgtcggagctggcgttggcgttaccgcggtggctattgctgcgatttttgctgcaaccctgtctgcaggtttagctgcgatgattgtcaatggttaa

SEQ ID NO: 374379 - DNA, 1758 bp, Salmonella enterica
atgctgccaatgaataattccgggcgtattccgatagtgacaccagaaatactgccggctacaggtaaagactatcctgctatctggcgggcctgggcacgggaagcgcccctgggaggccatgaattgagggagatggcggtcgaaagattactggcctgtctggaaaaagaggaaagcctgttagatctcagcgaactcaacttgagttcgctgccggaactaccgccattgattaccacactactcgctaatgataatcatctctcctcgctcccggagctgcctgaatcattacaaatactcatctgttcgtttaatctactggaactattgccacctttacccggctcgttgaaaaagcttatctgttcatcctgcaatctgaaaaaactgccttcattgccagactctctggaagaactcacctgctcatggaatcctctggaaggactccccttactccccatgtcgctcaagtaccttacctgcacaaacaatggttttgagtcgcttcctgctctaccagaatccctactcactctgatttgctcaaaaaacccactgcctaatttacctgatttacctgcctcactctattcgctcaactgtgcagagtgtcagttagaaacactgccagacttaccagagtcgctaaattctctcatctgcccacgtaatcagctccgggtaattccagcattaccttttaatctggacgaacttaattatctggaaaatccgcttctgcaatttcccattttgccgccctcactaacttcacttaataatagcccctatgagggcggcgcggcaggtgctgctcgtccgttgacggacagtgccgcagactggtttccggccgtccaacaacgcgatattcgtgaacgcttcagagagatcactcatgaaacaaacgccggcattttcagtgagtttctggacaggttacgcaaccgttacgccgattcgaagtatgagaccttcaggcatcaggtcatgcattgcctgatccgcttagccgcctcccccggattacgcgaaaagttatttatgtgcgcgttggaaacaacggcacgctgtgacgatcgcatctcgctgagctggaacaacatgcgcatcgcggaaatggcttacaccgttgagcaactcggcaccgaacagaatctcggcaaaatgatcagcctcgcccgcgaggtattccgtatggaattgcttactgagattgccagtcagaaaatcatccaaattcggcatgcgcacgaacactttgatgaggatttagaagtcctgctgggataccaaaccgagctacaacatgcgcttcatctgacgcaagtcgtaccggatatgtatttcttcacctgttcatatctgacagcagaagaggtaaaagcggcaaaaacgcaggttcagacggcagaaaatcaacgcttcctggaatggcttagcctgtgggagccgtggcaggctatgctcaaacggcttaatcctgccgcctggggcgctgcggaaagcgaaaaaaacgcctttacggttagcgaagaatttcagagccgaatccatgcgaagctgaaaacgcgcggctcgtctgaattcgcttccgatgaggcgatacagaaggctggcctcgaagtgatgaaagagaaactgcgggaattatttatgccctgtacgctcagtacgctggaagccaaagcgcagttatcgctagtggaaccggtctgggatttatcaggggaccaggcaggcgtataa

SEQ ID NO: 374380 - DNA, 2094 bp, Salmonella enterica
atgcttgatttagcgggacttaacttgcgtaccttacctgtattgcctgagtgtgtttcaacgctgaatgtcagcaataatcatttatctgccttgccaaatctccccgaaggattaacagatcttaattgcgctggcaatacattgacttcactttccgcgctccccccgtcgttgcaactacttgattgttcacaaaacagtttacccgaactacaaaacttacctccttcactaacggcgcttaattgttcaataaataaattgaaggatcttccttatttaccttatacgcttaaatcattagattgttctggtaatgctattattgcacttccagaattaccagacagtttagaaatgctcgattgttcaggaaacttactcgaaatcctaccagatcttcccacttcattacaatcacttaattgttctgtaaataaattaataggctttccatttatgcctttttcactgagaacactcaattgctcatacaatgaattaaccggtctccccccatttcctgattcactcataaatctcgatatctcctataatgaatttaagtctctaccacaactccctccttcattggctacatttatatgtacaggcaatccactttatgaacttccggcattaccttcttcattgcaaatacttacctgcgccagcacgtcactaacagcactcccgccgctgccatctacactgcaagaactttattgccagaataatgatattatcttactgcctgagttgcctgcttcattaaccgatttgaattgctcaaataattatgtggtgagaatgcctgcgctacctgactcgctcatttctcttgattgctcatacaatcgtttagaaacgcttgctgtcttaccccattcacttcaattgatgattgtcattcacaatcgattaatagttcttcctcaattacctgaatcgctgagatttctcaactgttcgagcaataggcttaccgcactcccagctttgcctgatgcgttagatagtctttattgccacaccaacgaactggaaatacttcctactttgccaaacggcctgcaagagcttggctacaatggtaatcctctggcaacgttacccgtattgccagcctcactcataaacctgaataacgatccatttgccggaggcgctactgcgcctcttcagctcattcaaagtattgaatattggtttccgttatcgcagcgcgctgaaatgctcactcgttttgagagtatagccagcgaagagaatgccgacatattcagcggttttcttaacaggcttcgacatcgttacagagaaccacagtatgaaggtttcagatcccaggttaaggagtgccttatccgactggttgacaatcctgaattgagagaaagattatttatgtgtgcctatgaatcaacccaaacctgtgacgatcgcatttctctcacatggaatatgatgcgggtcgctgaaatggtttttaccgtagaacaagagggtcatgagggcaatctcccggaaatggtcgatatagctcgtcaagtatttcgaatagagatgttgacggatattgccactagaaaaatccagcagctccagaggatacacaatacattcgatgaagatttagaggtaatgttaggcctacaaacccaactgcgcgacacgctttgcttaacgcatgtcgccccagacatgtatttcttccgtttttctcaacttactgaaatagatgtaaaaaccgcagagcgtcaggtgcgaatagcggaaaacaggcagtttgaatcatggctcaacaattgggaaccgtggcaaatgttgctaaaacgtatcgatccactgtggtatgaaaaggctatggatgaaaaatacgcttttgtgaatggcccggatttccaaaatcgactggacgaaaaattccagttacatcaggttcctcctgagatccgtgatgataccagccatattttagggaagatcgttatcgcagaaaagacacaagaaatttttgcaaatcagacacgtaaaattttagaagcgaaggagcaatcatcattgttggaaccagtatggaccgaataa

SEQ ID NO: 374381 - DNA, 297 bp, Salmonella enterica
atggtaatgtctgcaactggacacattgtttgcagtagttacaacactctatacggacgttctctctccggcgatcatcttgccatcgtaaaatctctcatcttttccgttactccccgtatccatgacgtcatgtttggtgcgcgtagccgtgcgtggcgtcgtttcaaaaagcaagctaaggcttacaaggaagccaaccctcagatgtgtgtgcgcataatcgtgttcaacagaacgcgggtgatgtatacctacaactcaaggtgccatccatgggaagacaaaaagcagtga

SEQ ID NO: 374382 - DNA, 1149 bp, Salmonella enterica
atgaaaaattctaagaaaatgatgacgctaatggcgctatgtttatcagttgctatcaccacctcagggtatgcaacgacgcttcctgatattccagaaccactgaaaaatggtacaggcgctattgataataatggcgtgatttatgtcggcttaggttccgcagggacatcctggtataaaattgatcttaaaaagcaacataaagactgggaacgtataaagtcgtttcctggcggagctcgcgaacaatcagtgtcggtatttttaaatggtgagttatatgtttttggtggtgtaggaaaagaaagcaatgaagcaccattgcaggtttatagcgatgtgtacaaatacacaccagcaaaaaacacatggcagaaagttaatactatatctccagttgggttgacaggacatacggtagtaaaattaaacgaaacgatggcgctcattaccggaggagttaatgagcatatctttgataagtattttattgatatagcggctgcggctggcgacgatagtgaaaaaaatagagttatttataattatttcaataaaccgtctaaagattatttttttaataaaatcgtattcatctataacgctaaagaaaatacatgggagaatgctggtgagctacctggagcggggacggcgggatcgtcatcggcgatggaaaataattctctgacgttgatcaatggcgagcttaaaccaggtttacgtaccgatgtaatttaccgtgccatttgggataacgataaactaacgtggttgaagaacagtcagttaccgccatcgcctggggaacaacatcaggaaggtttggccggagcattttctggatacagccagggtgttctgcttgttggtggcggcgcgaattttccgggagcaaaacaaaactataccgatggaaaattttatgctcacgaaggaataaataaaaaatggcgagatgaagtctatggtttaattaatggccattggcaatatgtgggtaaaatgaaacagcctctcggctatggtgtatcagtaaattatggtgatgagattttccttataggtggtgaaaatgctaaagggaaacctgtttcatctgtaatatcctttgccatgcatgatggtaaattattaatagaataa

SEQ ID NO: 374383 - DNA, 939 bp, Salmonella enterica
atggagataattttttatcacccgacatttaacgccgcctggtgggtgaatgcgctggagaaggccctcccacatgtgcgtgttcgtgaatggaaagctggtgataatagccccgcagactatgcgcttgtgtggcagcctccggttgaaatgctggccggaagacggctaaaagctgtttttgcactgggggcaggggtagattcaattctgagtgaactaaatacgcatccggaaatgctggacgcctccatccctctatttcgtctggaagatactggcatgggcctgcaaatgcaggaatatgccgttagccaggtattacactggttccgtcgtttcgatgattatcaggcgttgaaaaatcaggcgatatggaaaccgttaccggaatatactcgcgaggaatttagcgtcggtattatgggcgcagggatactgggctcaaaagtggcagaaagtctacaggcatgggaatttccgctacgctgctggagtcgtagccgcaaatcctggcctggcgtggaaagttatgcggggcgtgaagaactggacgccttcctgaaccagacccgtgtgctgattaatctgctgccgaatacggcccaaacggtgggaattatcaatagcgaattgctgaacaaattgccggatggcgcttacgtgctgaatcttgcgcgcggcgttcatgttaatgaggcggatctgcttgccgcgcttgagagcggcaagctaaaaggcgcgatgttggatgtctttagccaggagccgttgccgcaggaaagcccattatggcgccacccgcgagtcgccatgacgccgcatattgcggcagtaacccgtccggcggaggccatcgagtatatttcccgcaccattaaccaactggagaggggggagccggtgacagggcaagtagatcgggcgagagggtattga

SEQ ID NO: 374384 - DNA, 153 bp, Salmonella enterica
atgtcagttaatgtcaacgcaaagagattagaagaaaaagagataaacgatatccataatcgccagtatcgactaaagaaaaacgtaaagcatgaaatgttcgcgaatattattaaccagaaaaagaaagagacgacgcatagcttaccttaa

SEQ ID NO: 374385 - DNA, 525 bp, Salmonella enterica
atggcgtatcgggtcaaacagcgtattcctgtactggcggttttactgtcgcttactgtttgcggtcttgtgcatggggcggacattaatcttagtggtatcgtgatagcttcagcctgcaccattgacacagcaacgcaaagtcaaaaagtgacgtttgaccaggccagagcaaccgattatcaaacgcccggtgcaagtggggaatggcaggatttcagcctgacgctatcatcctgtccaacctcaaccagtagcgttactgcgacattcagtggcgatcctgacagtgatgatccaacaaaattcgctaacactcagggagacgctgccggaatggcgctgcaaatcatgtcacgggatcacctcacggagattcgacctgcgggtacgtttacggtaaatgtagacggtgccagtcaccgtgctgaatttccactatcagcgcggatgtatgctccaacaggagaagtgacagcaggaagtttttacactgtcgtgcagttcaccttcacttaccagtaa

SEQ ID NO: 374386 - DNA, 528 bp, Salmonella enterica
atgaaaactatccatggaagaaaaaccgcgttgttattactggctggtggcatgctattccctgcactcagtcaagctggaaataccgttatcgacattaccgggaaggtggttgcgtctccctgtgttatcaacagcggcgaaccgactctggcagtcaatattggcaatgatatacaggccgatagcctgtctaccgccggtagcgcatccgcatggaaggattttacccttaaggtttccaactgcccgagctcaaccaccagctttaacgtgacgttttccggaacgcccgacaccgacgctaattattatagaaatactggtgacgcaacgaatttagcagtggagcttgccacgacaaatgacaaaaccagcctgaaaaatggcacagcgctaaacaatcttatcattgacaccagtacgcgtggatacgacctgttgatgagcgcccgtgcggtttctaaaggcaacgtcatgccaggctctatcgccagccaggttcaacttacatttacttatcagtaa

SEQ ID NO: 374387 - DNA, 999 bp, Salmonella enterica
atgaataaaacatcaattatcgcttgcacgcttgcgaccatactgtatacaacaccaggcatatcatttgctattgccattgataccaaggacgcaggtcgcaacacgtataactatgatttatcctcatggtcaatccccactaacgtcggcggaatggcgtggtttgatgaccatggtctttacaaactaaacacactagacgaaacgggtacagcaagggtcaccctgactatcaacggcacgccgataggcaccgcatcggatggttccaccgtttacgcgacgaacaacccagggataggtattgcttacaaccttaactattccacgccgacaatcactaccccgcaaaatgacagcgttgcaccttatgaattcgtcttcaataatggctactatgcgtctggctatcttcacgtcaaatataccatcgtgcgtctgaccgaccagattccttccgggcaaataaccacggcccccgtggttaccgtaaattactttaatgaacctgcacgaacggactatccggatatctcttttaccgcgctttccggcaccgtcaccaaacagccagtcataactgcatgtagcattaacgcccctaccgaagtcaagttgccgacactttatggcaataacttatccaacggcgcgcagggtgtaaccgacgtccctacgatcacattaacgaactgtccaggtgcaagaaacggcatctcctacaacttatccgctgtttatggcacccatcgggccagtaatgccgagctaaagaccgttactggcgaaggttatgcccgaaatgtgtatatacaggtacaaaatgatgacggcaccgcgcatatcgttaatggtgacattcctcttagtgattacatcgggtctggtaactacaccatcccgaagtttaaagtggcgtattacattgatgacgtcaataacgtcaccgctggcaatgtcaaatcggcgatagaagtaaaactcgcttataactaa

SEQ ID NO: 374388 - DNA, 2544 bp, Salmonella enterica
atgcgaaagaataaaataacgctcagtcatatcgcttgctttgttgctttgcaatgttcattacctgtagcccttcctggttatgctcgggaatactttaaccccgctatgctcggtatcgacggaccaggtaaagatattaccgatctgtctgcctttgaggaaggcgtaggtcaaatgcctggcacttatcatgttgatgttgtcatcaacaatgcagcacagggaacttatgacatccccttctcaatgcaaaaaaacgcccaaggtcagcagagcttacagccctgcctgagcattgatatgctcaaaagcttcaggattcgcacagaactgtttccccagctcgttggcgacggacagtgcgccgtgctcaacgcgatccccatggctagcgccgaatttgatttcaaccatcaacggctgttgctgtccattccacaggcggcggtatccaccatggcccgaggctgggtcgcgccggatcgtctggatgaaggtatcaatgccctgttacttaactatacatttacgggtgggaacaccagcgcgcgccagtcaggcaacagcgattccgatagctattttctcaacttacggccagggctgaacctgggaccatggcgtctgcgcaactacagcacctggaaccagaacaaaaccggtgacacaaaagaggaaagctgggattccgtctatacctatgctcaacgcgatattatcgcgctaaaaagccaactgacgctgggcgatagcactgctccttcggatatgtttgacagcgtgccttttcgcggcgtgcagttagcttcagatgacgacatgctgccagaaagtttacgtggctatgctccgatcatccgtggcatcgcccgcactaatgctcaggtgagtgtgaagcaaaatggctacgttatttatcagacatacgtttcacccggcgctttcgagatcgcagatatgtttcccactggcagtagcggcgatctggatgtaacgattaaggaaaccgacggcagcgagcagcaccaggttatccccttcgcctctctgccggttttacaacgggaaggccgtctgaaatacagcgtgacaagcggacaataccgcccctacgatggcgacattgataaagaatggttttcccaggcgacggcgatctacggcctgcccgcaggattcaccctctatgggggtggacagttcgctcaacactatcaatctttactggctggtttcggtaaaaacctcggcgaactgggtgccttttcagtagacggtactcaagcctggtcaacccagcaagatacggataaagaaagcggacaatcctggcgcgtacgctacagcaaaaacatgctggcgactgggacgaatatttccatttccggctaccgttactccacttcgggatattacagtctgtcggagacgcttgacacctggcgcgaaaacgaatggaaaaccagcaacgagcggcgacgtaaccgggcggaaatcatgctcaaccagagtctgggggacgttgcgggttcactgtctgtcaacgccgtcagcgaagattactggaacagcgatcgcgaaatgcgttccatcggcgtcggttacagtaacagtttttcaggaattacctggaacctcaactacagctataaccgcaacacgactgctggtcgcgatagcgataaagtctacagtgaagatcaggtcttcacgctgaattttaacatccctctagactgctggcttagcaatagctgggcaagttacagcctcaataccagcaaacgcggcgataccagtcacactgtaggtctgaacggcaccgcgctggaaaatcaaaatctcaactggagtatacaggaaagccagaccaatcacggccagggcaatggcggttatgccaacctcgattaccagggaacttacgcgcgtgtgaatgccggttatggttacgaccacgatcaaagaaatcttaattacagtatcgacgggggcatcattgcccacgcccatggtttgacattcagtcagtcattgggggaaacggcggcacttgtcgaagcgcccggcgtcagcggcgtcgaagtcactaatcagaccggggtcaaaactgacttccgcggctataccgtcgtgccttatctctcgccttatcgggagaatacggttggcctcaaccccgagacgctgccggatgatgccgatttaacgctgactaatcagatccttactccgacgcgcggcgccatcgttcgcgcccgtttcgatacgcgtgtaggtaaacgtgtgctgatgaccttgacacgcagtaacggcaaaaccgtccccttcggggcaatcgtttctgttcacggggagaatcaggcacagagttttatcgttggcgatgcaggccaggtctatcttaccggcatgccgttaagcggctcactgttggcgaaatggggaaatgccgctagcgaaatatgtaaggtgacgtttcagcttccagaagaggataacactatcggtgtaatgcaaaccaatgcccgctgtaattaa

SEQ ID NO: 374389 - DNA, 678 bp, Salmonella enterica
atgaaattctatagcccactcctcgcattcgtacctttattcgctattgctactgtggcagaagcgggtgttattgttggtggaacacgtattatctacgacggtaataagaaagaaacctcaatcagcgtcaaaaacccggataaattttcctatcttattcagtcatgggccgatattagcgaaggcagcaaagaaaaagcaccttttatcgttacacctcccttatttcgcctgggcgccggtcaggaaaatatgctgcggattatccgcaccggcggcaacctaccggaagatcgcgaatctctgttctggatgaacattaaatctattccggctacggagaagcaggaaagcgccaatgtcttgcaaattgcggtcaaaacccggatcaaaatcatttaccgaccgcaaacattgaaaaacgtcccggaaaactttgctgataaattaacctggcaacgtatgggtaatcaattacgggtaaacaatccaacgccctattacatgaattttagcctggtaaacgttggtacgaccatgatacaggacgccacctatgttgccccaatgagcaactcgacttttaccattccaactggcgcggcaggagacgtatcctggactctgattagtgattatggtgcagcaggcgcgaaacactccagccacctgtaa

SEQ ID NO: 374390 - DNA, 549 bp, Salmonella enterica
atgatgaaaggaaaatttgccgttgtagcattcgctgctttactgggagtaagttcaactgcaatggccgataacaaggatggcgacgggaaaattgaatttttcggtaatattatcgatgcaggctgccaaattgatactggagcctcaaacctcagcgttaaattaggtgatgtcgcaaaaacaacgtttactgcggcgggggatactgcggcaacgacgaaatttgttctgacattgaaagattgcccggatacgctgaatagcaaacctgtgaccatcaaatatagcggaacgccagacactacggacaatgattacctgcaactgactcaggaaactggcgtagcgaaaggcgtggcaatccagttactcaacagcgacgcgtcgccattaccgctgggttccgcatccacacaaaccgtgacggttgcatccaataaagcggagcttgacttcttcgcccgctacattgccaccgcagccgcctccggaattgaggctggtaaagcgaacggttccgtcaacttcacgatgacctataactaa

SEQ ID NO: 374391 - DNA, 810 bp, Salmonella enterica
atgtttttgatcgatggtaaatcaacggatacgctggccgttaataatcggggtacgcaatttggcgatggatgtttcacgacggccaggggggtaaatggccgcatcgatttgttgtcgatgcatttgcatcgtttgcaatttgcctgcgacaggctgggcattcgctttcaggactgggaattgctggcagacgagatgcagcatctggcggccgggaaaagccaggccgtgttgaaggtaatgattactcgtggtgtcggagggcgagggtatagcgctatgggatgcgaaacgccgacgcgagttgtcagcgtttcgccatatcctgctcactattctcactggcgagaaaaagggataacgctggcgttaagcccgatacggctggggcgtaaccccgctttagctgggttaaaacaccttaaccgcctggagcaggtgctgattcgttctcatcttgagcagacggacgccgatgaggcgctggttcttgacagcgagggatgggttacggaatgctgtgcggctaatgtgttctggcgtacaggcgatattgtttctacgccgcgcctggatcaggccggggtaaacggtattatgcgacaattttgtttgcgcaaactggcgcaatcccctttccacgtcctcgaagtacaggcgagagaggaggcggtaaggcaggctgatgaggttatcatctgcaacgcgttaatgccgattattcccatacgcgcctttgacggcacgtcgtactcttcgcgaacattgtttcaatttttagccccattttgtgagcatccgaattag

SEQ ID NO: 374392 - DNA, 1011 bp, Salmonella enterica
atgccgatcacaatagggaatggttatttaaaaagtgaaatatttataaatgccccgagcaaaacgagagaaccatggtggaaagctttatgggaagctttgaaagacttgttcttttctaccggcagagcaaaagcagatagctatatacatgagatgttcttttccgatccccctcccacacgagagcggcttgcagatatttttttcgagttgaaagggttagcttgcccatcacacaaagaaagatttcaagtctataatcctcatgaagatgattcaacaattatttatcacattctggatgaaaacggaaaggacgagctgttatgcatcatacaaaataccgataccgttcactgtaaagccatggggaatagctattttgcagtaagagaacaacctgtttgtttaaaatcttatccacaaatgacgtacactgtaaataaaaaatatagtgagattgtagagagctcgctcccctcaactttatgtctcaagcttgctggcacgccatttttatcggtccccttaaataacatagtgaagtatttatactctgaattggataacagaaatttagataagtggaaaacgcaagaaaaagctaattacctggcagagaagattcggtctggtattgaaaaagcaatgcgcattttataccatgcggatatatccgaaagtatgcagcaaagagcatttttagaaacaatgtcgatgtgtggattaaaatcgactgaaacatcaccaccgcctacacacatacccattgtaaaaatagtacaagaggtcttactggcggataagaagtttaaaaggttcctcgcaacggataccaacgccagccaaagcatgttagctgagataatcgaaatagtctctgatggcgtttttcgcgccctttttagaacagatccacaggctatacaaaaaatggcggaagagcagttaacaactttacatgttcgctcagaccaacaagatggcagattagggggttttttataa

SEQ ID NO: 374393 - DNA, 687 bp, Salmonella enterica
atgcttccaggcacctccagagtatcatctcacagtggaacatccacatacggattaaataccgcagatacaccggttttccccgatattcccgaacatggacaaaacccctcacagctacgtcttgcttatgacacccttgccataaacagtgaattccgtctggagccagagtatgcggtggagtatcttatctcaggcgcgggaggaatagaccctgatacagaaattgatgacgacatttataacgaatgctatagtgaactatcctccgtacttcaaaatgcctacacccaaagcggaacattccgcagactaatgaattacgcatatgaaaaagaactatatgatgtggagaagcgttggttactgggggcaggcgaaacctttgaaactaccgtgactccggaagacctcaatctttcaggaggcaggagagtcatatgtcttaatctggacgatactgatgatgatgatgtatatcctgagcattatgaaagtaacgaaggtccacaactttttgacacaacacgttcgtttatgcatgaaattgtacatgcgctgaccaatcttcaggatgaagaagaaaatcatccaagaggccctgttgtcgaatataccaacattattctgaaagagatggggcatccttcacctccaagaatagcctacaccagcaataactag

SEQ ID NO: 374394 - DNA, 147 bp, Salmonella enterica
atgacaaaaccagcatcaaccaacaagaagccacgtaaacaacacacacctgagtttcgcaaggaagccctgaagcttgctgaacgtgatgaagagctgtccatcctgcaaaaggccgcgacatacttcgcgaagcgcctgaaatga

SEQ ID NO: 374395 - DNA, 1068 bp, Salmonella enterica
atggtgactcgccgtgagcttcttttgaaaacagttggtgtagcagtttgtagctcattagagcttaattcgtttgcgggtataaaagatacatcactcaatgtgccatcctgggattttttaaaggaaggggatgtcattgatgttatagctccatcctcgccaattgatgatccacaagaacgttataaaaaaatagaaaagtactttaaagaaaacacgccttttaagataaacattccggaccatttaatagagcctacagcgttactggatgaagcaaatacaatctggaagcgcgcgaaatttgtctatgatgctttcagttcggagtcaaaagcgatctgggcgatatcaggtggaggttggggcgctagtatacttggcgaattgatgagttatccgaaaccagataaaataaagccaattattggatattctgacattacggcattacatatttatgcaaatgaatatttaaattttccctcgatacactccgttgtgctaggtattaatggcgatatttcccctggatacaataaaaatggaataggagcaacactggatattcttagcggaaaaaaaacagaggtcatgtatgaattatcaccgctcaataaattagctgcttcaatgacagaggttacaggtaaaattgttggtggaaattctcttttggtatctgcgcttaatggagcgccgggtctttcgcttaaaactaaggggaaatttctattccttgagtctattgcagatgatccaggccagttttccaggaagttgatggggctggcctattcgccagtaataaaggattgcttaggggtaatatttgggaatgttattaaagatggtggcaaaataaactcacctctggtgcaaagtcagtttgattatattattcaccgattcgcagaacaattcattgaagataaaattgctttgaaagcaaataatctttttggccatggtgcgataaatatgccattgccacttaatacttttgctgtggtaaagcgtagtggagcgaatataactgctacaattagtactaatagagtttga

SEQ ID NO: 374396 - DNA, 2457 bp, Salmonella enterica
atgcggggtattggagctgttatccatcttcacccaccggcaggtagtagcgcaccgcccctcaacttcagcgggatgtggaacaatctcagggactggttcgccctgcccgctcaggatgaggccgcacaatgctttcgcgcgttttatcagccggatgaaggaacgtcgtcgtcggacagactgatgtgtttttttaagctaaaggcgctggcgtctccgggacggcaggctaacttcaccgcggagcgaagaatcgataccggtgaaaccatctgcgtgattgcctccggtaaaaacaacgatttccccaccgtcacacttcacctgagcgaccaggaatggcatacggcacaatctcaggaagaaacgattgacagcacactattgccgctaaacgctgataacccggtagctaccacaacagaagagagcgccgaaaaaagccgaaaaggaacccgcattacaaatgcacagattcaggcatggcgggacctgccgccggagacgaaacgagaggcaggaggctggaaaatatgggcgcatacacagggaatatccatcagcggtgccagacattatctgacaaacaccggactgaccacctacggtatggtgcggctgcaacagcctgaagagaaggggtattccattacaaatgcacagattcaggcatggctggacctgcccccggagacgaaacgcgaggcaggcggctggaaaatatgggcgcagacacagggaatatccatcagcggtgccagacattatctgacaaacaccggactgacccctcaaggtatggtgcggatgcaacaacccgaagagaaggggtcctctattacaaatgcacagattcaggcatggcgggacctgccgccggagacgaaacgcgagacaggcggctggaaaacatgggcgcagttacagggaatagcctccggaagtgcaggaaactttctgaccaacagcgggctgactctcgttggtacagagcgcctgaaaccgccaggggaaagaagtacacccattacaaatatgcagattcagacatggcgggacctgccgccggagacgaagcgcgaggcaggcggctggatgaagtgggcgcagttacaggggataaacatcaaaagtgccagaacctttctgacaaacagcgggctgactctcgttggtacagagcgcctgaaaccgccagaggaaagaggtacccccattacaaatacgcagattcagacatggcgagacctgccgcaggaggcaaaacgcgaggcaggcggctggatgaagtgggcacaggcacaaggggtagacatcagttgtgccagatcctatctgacaaacacgggactgaagcccaaagggatagtacgactgcaaccccccggagaaagaggctccccgatcacacaggcgcaacttctggcatggtttaacatgtcaccggaggagcgccacacatcaggaggatgggcagcatgggcgcagacacaggggatatcctacaggagcgccagaaagtatctggcactggcagaccacaaaatgtccccccgtcacacatcgcgatcatcgccgtccgcaaccgtcacaagtgccagtccacaagtatcgtcatcctcagacactggcgatgagataaccgtcatcgtgagtccccccccgcagaaccacggggaaaaacgctcacttccccggaccaacgaagataactccaccccgccggcaaaacagatcaaggaagaggaagacgccgtgacctggcggacacaccagataaacaatgacctgcccatcctgcagcactggcgtgatccgacgatatcggttatggcgcaggcggaaggccggattgaaaccctgcgggtcacacggtggggaccgctttttagcacgttatcccggcagaccaaagccaggattaatcaggtgatcggctggtttctgcaaaatgaaggaaaccatgatgtgcgaatgaatgagatgatgtccgtcgctatcccccttgatgacagcgatggttacagggggcgaacagtctacgcaagaaccgatctggcggcgtttaccgtactgggtccctactccggtcgcctgctggacagtgaaaaggtacggtgtgaatatgagaaagaatatgggaaggatgccagtaattattattttgccacgcgaagccaggagcgcctggtgtccggcttcccgcagggtaatctccttagcctgattaacaacccggtatttatccatcggacggcggaaggagaagcaagacagaacgtcagcgcggtgcttgtcgggaagaatattcactttttcctcaccacacgcgacatcagcgccggggaagaactctggtttgattacggaccggactacatgcattttgagtcaggtgaagcgctacgctcagtgcaggttaaggaagagtcgccctcttcggatgaagggtaa

SEQ ID NO: 374397 - DNA, 948 bp, Salmonella enterica
atgcgtttaaaacttctgggaattgctctcaccgcccctgttgcattcaactctttagcctcaaccgaattcagcttccttacccctgaaaaggtaagtgcagatatcagtttgggaacgctaagcggaaaaacaaaagaacgcgtttacgagccagcagaaggcgggcgcaaagttagccaacttgactggaaatacaataacgctgcaattattaaaggtgcaatcaactgggatctgatgccatggttatctgttggtgctgccggatggagcaccatcgacagtcgtggagccaatatggttgataaggactggcaggatgccagtcatgccggaacatggacagatgaaagtagacatcctaatactcatcttaattacgccaatgaattcgatcttaatattaaaagctggtttttaaatgagccggactatcgacttggtcttatggctggttaccaggaaagccgttacagcttcaatgccaccgggggtacctatatttacagcgagaatggtggtttccggaatgaaactggatcattccttgatggcgaaagaggaataggctacaaacaacaatttaaaatgccttatgtcggtcttacgggtagctaccgttacgataactttgagtttagcggcgcatttaaatacagcggttgggtacgtgcatctgataacgatgaacactacgcaagggagatcactttccgtagtaaagttaaggatcagaactactactctattgcagcaaacgcgggttactatgttactcctaacgcgaaattgtatgttgaggggacatggaatcgcataaccaacaaaaaaggcgatactacgctttatgaccgcagcaataatacctctgaacacagtaaaaacaccgcaggtattgaaaattacaatttcatgactactgtcggtctaaaatatacattctaa

SEQ ID NO: 374398 - DNA, 291 bp, Salmonella enterica
atgattaaaacggtatccgcttatgcactggtacttctcctctcaggctgcgctcaacaaacatttaaaatgagttcagaaccggttacctcacccaaacaaattattacccatcatttcttcatttccggactggggcagaaaaaaaccgttgatgccgctgcaatctgtggtggtacagataaggtgatgcgtacggaaactcagcaaacctttgtgaacagtctgttggcctttgttactcttggaatttacacgcctcttgaagcccgagtgtattgctcaaactaa

SEQ ID NO: 374399 - DNA, 252 bp, Salmonella enterica
atgaagctcagaaacatattcgtcatatcattggctgcctcatcgtttagttgcctggcgttcaaagcgccgcccaacgtgacatctacgacgcctgataaaactaacgctctcgaaagtaagattctgggcagcttctacagtcagcatggcaccctaccgcaggtcactgtccttgggacgtgtgacgcctcacccgttccaggttgctcatgcccattctgcaaaatgctccgtagccatatccgctga

SEQ ID NO: 374400 - DNA, 402 bp, Salmonella enterica
atgaaaatcaagcgtatcggtaaagccgtttttcttttagcgcttctaacctcaacgtgtctggcggctggtaagaacataaatgtcgagttcaggaaaggacattacagtgcccaatactcaggaataataaagggatacgattacgatacctataagtttcaggccaaaaaaggacaacaactacatgtcaatatttctaatgaaggcgtggatacttacctattcggaccagagataagcgactcggtcgacctgtccaggtattcatcggcacttaatgacaacggtcagtacacgctccccgcatccggtaactatgaactgagaatacttcaaacacgcaatgacgcccgtaaaaacaaagctaaaaaatacagggtcaatattcagattaagtag

SEQ ID NO: 374401 - DNA, 4155 bp, Salmonella enterica
atgaataaaatatatgcactgaagtatagtgtcagacaaggtgctcttgtgcctgtttcggaactggcaacccatgcaaaaaaatcatctcgtacaggtctgataaaaagacttattccatcggttattattaacacccttcttttaggatattcagtcacatcgctggcctcagtcgtcaggtatgatatcccctaccagacaataagagactttgcggagaataaagggcaatttacgccgggtagtatgaatattcctgtttacagtaaaacaggcacagttattggttatctgaataatgctccaatgcccgatttcagtagcgccaaccaccagtcagcggttgccacacttgtttcgccacagtatatcgtgagcgtaaaacataatggcggctatcagagtgtcagttttggtgatggcgaaaatgggtatcgtcttgttgacagaaataatcagcctggacgagattttcatgccccacgtttaaataaattagttaccgaagtcgagccttcattgatgacgcagtcggggatggtgtctggggcttatagtgacaaaaatcgttatcccgcgttttaccgtgtagggtccggaacccaggaaatcaaagagacagatggccatataatctcaatttctggggcatacagttatctgaccggcggtacggcaggtgcgccgggatcttataatcagggccagatgatcagtactaatactaataaagagttgtatagcctggcgcaggggccgatgggaacacacccacgcgttggtgatagtggttcacctttattcgcctatgattctgttttacaaaagtgggtcattgtcggggtggatagctccggcggcggcggtggaactaactgggcagtggttgatgcgaattttgtaaaccaggccattcaggacgataccgatgcgcccgtaacttttatggcagaccagggccctctgcgctgggtgtttaattcaaccgatggtacaggaacgcttatccagcaagagactgtctatcagatgcatggtcagaaaggcacagacctgaatgaggggaaaaatctggtattcaatggcgctgacggccagattgcgctggaagacgcggttaaccagggggcgggggcgctggcttttaatggtaattatacggtattcaccactaacggctccacctggaggggcgcaggcctggacattacccaagatgcggaggtgagctggcaggtgaacggtgttcagggcgacaatttgcataagattggcgagggcgtgctgaaggtcaatggaaccggtattaacccaggcggactgaaggttggggacggtacggttattctggctcagcgtcctgatgaggacggaaaggttcaggccttcagttcggtgaatatcgccagtggccgaccaacggtgatccttaccgatagccggcaggtgaacccggataacattagctggggctttaggggaggccggcttgatataaacggcaatgatgtcacttttcataaaattaacgccacggataatggcgcgaatatcattaataccagtgatacctttgctaccgtttcaattaagcccctcacggacatgacggttactattaatgactgggataaaaataagccttccggcggtgctgccgggttattgtataaatataataacatttacacccatacagtagattattttatccagaagcgaaaagggtatggatattatcctgtaaatcagtcagacaacgacagttgggagtatgtaggacacaatgagatgcaggctattgaacgggtaaaatcgcggcgacctattgatgatagaatttatcacggtaatatcgtaggcaatattcatcttaatattgatacctctcacagtaacggcggcgttatttttgacggcaatatcgatacgcctgatggcgagttgatgcagtctggcggccaactgactttccagggccatccggttatccatgcctataacggcaaatggttgactgataagcttaaatcacttggtgatgactctgtcagaaatcaaccaacgtcttttgaccagcctgactgggagaaccggacatttcatctgaaaacattagtactgaaaaatacctatttcggcctggccagaaacgcgtccctgaacgggaatattgaggctgttcattcgtccgtaacgttgggtacgccgaatttgtatattgacctgaatgacggtaatggcacaaaagtaacgccacaaaagggaatctcggttgccggacaagaatcggatatgagccgctatgccgggaaagtgacgcttagcgagcagtcaactctcgacgtgcgtgaaattttcaccggcagtatccaaagccaggacagcgacgtcaccgtttcctcgcgtcatgcgaagctggatgattacagccggttcggcaacacgtcactgactcttcaggaaggggccagattaaccgccaccggcgggtggtggagtgattcagacgtcattgtcggaccagccgctacgctgagcctgacaggtacgcccgcagctagcctgccagggcagatgagtccggcgttttattccaccaattatggtgcgggttatcaactgggggccgctagtgaattgcaattttctccttacacctttgtaaccggcgatatccgggcagcgggagatgcccgtatcgccattggtagtagtgataatgttgtcctggcagataatctacctctggaagagcagatgatgtacggtttgtttaatggtttccgtaacgtctattcaggtaatgttagcgccccgcaagggcgaatggcgatgacggatacgcagtggcagatgcccggcgattctcgtataggggcactgcgtatgacacggtcgctggccggctttaccgggcgcggatttcacaccctggctaccgacacattacaggccaaccagtctgcttttgcgctcagaacggacctgaaggacagtgacaagattgtagtaaaccagaacgcagagggccgggacaacaccctgtttgtgaacttcctgaaaaaaccgtccgggaaagaatccctgaatattccactggtcagcgccccggcggggacaagtccagcgatgtttaaggccgcagaacgggtgaccgggtttagtctggtgacgccgaccctgcacacgacagagcaggatggcaaaatacagtggatactggacggttttaaaaccgcgccggacaaagggacagccacgtcggctaacagttttatgggcatggggtataaaaacttcatgaccgaagtgaacaatctgaccaaacgtatgggtgatctgcgggatactcagggcgaggacgggatgtgggtacgtatcatgaatggtgccggaaccggtgacgccggatattctgatcgctacacccatctgcaaacggggtttgataaaaaacatcggttgccaggggctgacttattcaccggtgtcctgatgagttataccgacagcagcgccagcggtcgggcctacagtggcgacacacattcgctcggcggcggattgtacgcctccgtgatgtttgattcgggggcatatatggatgttatcggcaagtatatccaccatgataatgactataacgccggatttgccggtctgggtaaacggaattacggtacacactcatggtatgccggtctggagggcggatatcgctatcatctcacagaaagcctgtatattgagccgcaggcggaactggtttacggaaccgtgtccggaacgacgctgaaatggaacgataatggcatggatgtgtcgatgcgcagcaagacgtataacccgttgatagggcgtacaggcgtggccctggggaaaacgttcagtggaaaggactggagcgttacggcccatactggcgtggattaccagtttgacctggtaaccaatggcgagacggcgctacgtgatgcatccggcgagaaacgttttaccggtgataaggacagcagaatgctgtacaacgtgggcctgaatgcgcaggtgaaggacaatgtacgttttggcctggagctggagcagtcggcatttggcaaatataatgttgaccatgccataaacgctaacttccgctatatgttctga

SEQ ID NO: 374402 - DNA, 264 bp, Salmonella enterica
atgaagcatcatgcttttatgctttggtcattaattattttttcattacctgttttagccagttcataccgttctcccggtttacaacaggcatcctgggaaatttttatctacgattttggtagtaaaaccccgcaaccccctgcaaataccgataaaaaacaagccaggaagattaattcgccgttctgttctactacaaaacctatgatgcccgcgccaaccaatgggtctaaaaaagaaaatactttaaccagaatgtaa

SEQ ID NO: 374403 - DNA, 519 bp, Salmonella enterica
atggatcgtcatcaccatcttttattaaacgaagagttaactattcttaatattaatatgttttatatagagataagcaattttattgaatattcaatatttgcggttgttattatttttgtggaatgtaaactttttatcaatacaggcgatatttatgttgggattgtgagggttgattctattcttataacaagaaatgttgtaactgatagatatgttaaaaaattaattggaggagggaatgatgcatgttgtgaaatttttgcaaccaatagtactgggcatcatagtgaaacatgtttgcagcgccaacgatggcatataactgtatttcgtctggagagtcaagtgaggactatgaagcacaatgcgatatcttctggttatatggcgaatttgcttactgggcatgttttgggctggtcggcgtcagctatttcggtatacgagagatgcagaatattttatttgaatatcaactacttaaaacataattgttttttctgtagtggctaa

SEQ ID NO: 374404 - DNA, 174 bp, Salmonella enterica
atggtcgccaaaaataaaattcacggtcgtcgtatgcgtcaacctctacaacagttacacaatcgttgtttttttcagcaactggcagtaagcccaccgggaacaaaatatgtttcagtcaccgctggcacaaaaacctggcttattcatcttgtcacgtcagaggaccgttag

SEQ ID NO: 374405 - DNA, 1044 bp, Salmonella enterica
atgaaattagcgctcatcaatcgacagaaaattatacctgcaagtagagccgcgcctttccagtgccatgcttctacgctggtatgtctaccgtgcggtacgcttgtggccgcatggttcgcgggtctgcgcgaaggaagtgaagatacggccatttggctatctcgttatgaacataatatctggacgaaaccgcagcgagtagcagcttgcgaaggggaagcacactggaatccggtgctcttttccccgtcggacagattgtggttattttataaagtgggcagcgatgtacatgtgtggaaaacctggtttatcacctccagcgatcgaggatttacctggagcacgccaactgagttggtcaagggtgatattctgccgcgcggcccagcaaaaaataaactcctgctggcatcaaatggcgcctggattgcgccgggatcgattgagaacgctgaacattgggaggcatttgtggatcgttcctgtgacgaaggaaaacattgggatatctcttttgttccgctggagcctcataacatgatttccgcgaaaaacgtagcgttgtgggagggaataaaaaagggcatgttgtgggagtgttgtctggaaaaccttctgcgctgggatggcgttattcagcctacgctgtgggaatcttctccggggcatatccatatgttattacgaagtacacgcggggcagttttccggagtgattcaacagattatggcgctacctggtctgttgctcgcgccacagccttaccaaataacaatagcggtatcgatttggttagtatgcaggacggtacgctgattctcgcgttaaaccctgtcaacggcaactggggaaagcgttatccgctctcactcattgcttcctgtgataatggcacatcatggctaccattactggaacttgaaagtaaccgtggtgagtattcttatcccgctattattaatgaggagggagttgtacatatcacctacacgtggaaccggaaaaatatcgtatactgtcgattacaaactaagtaa

SEQ ID NO: 374406 - DNA, 273 bp, Salmonella enterica
gtgcatatcgcgctttatctaacttttcttaccttaccgctgctgggcgtcgcgatgatggcgttaagcgggaaaaactggagcttttttggtattactgtaccggtatttttgacttcagatagtacgctaaaatcggatataaagcgcattcatgaagtgctggcgaatatcggttatttcctgattgcaatgcatgcggcagcggcgttgtttcacctttacatacaaaaagacgatactttttcaaggatgttgcccggtaaatcgtaa

SEQ ID NO: 374407 - DNA, 147 bp, Salmonella enterica
atgtcccgccgcaaactcattcagaaggttatgaaaaatcaggcacagaacgttgatgcctcttcattattaacgaaaaagggagggttaaacccccctttgtttatattagatgtcgtcaggcgtctgaaacaaaacggcttctaa

SEQ ID NO: 374408 - DNA, 756 bp, Salmonella enterica
atgacaggcttattcttgttggcaaccgcaggacacgcggaaccaaaagttctgcgtgtcggggtagatttaacaaatcctccactccaggtcagagatcaatgtggcaatccgacagggtttgtgattgatataacaaacgcgctgtgtcaaaccataaatgtaaaatgtcattatgtcgtgaacagctttgatgcccagatcccagaactgctggcgcgaaaagttgatttcatcatgccgcttggcgttacgccaaaaagaagggcgtcaattgcttttagccgctatgtataccatgaccccacggtactggttgccagaaaaacggtgaatatactgccgcaggctgcgcggcttaagggcaaaaatattgcggtggagcaaggaagcattcaggaaacatgggcaaacacctactggctgcctgcgggggtagtgataaaaagctatcctgatatgacgtcgatttatcaggacttagtgaccggacgcctggatggcgcgctgtgtccagccatcgcgctgaaatttggttttttacaaactgcgcaaggcaaggcgtttgaagtaaaaggttcagcagtgacggatacgcatttattcagcattggttcggcttacggtatccgtaaagaggatgaggcgacacaacgattaatcaatcagggactggagcaaattaagcgtaacggcgtctggttagcgataaaagaacgttattttggtgatttggatataagcgtgacagaatag

SEQ ID NO: 374409 - DNA, 252 bp, Salmonella enterica
atgaaatttatgtggattgcattgccaggcgtattgttgctgagcgcttgttcatcgtcggaacctgacgcttccaggcagtcgcgcatcggtatgcctaatccggcagccgtctattgcgaacaacagggcggtacgctggcaccagtgcagactccgcaaggcgtgcgttccgattgtaaattgcccaatggcgaggtgattgatgagtggacgttgtggcgcagagatcactccaatacgaaaaagtga

SEQ ID NO: 374410 - DNA, 348 bp, Salmonella enterica
atgctaatccagtgtaagcgcgtctattttccagcggaaaaaaatgatggctatcgggtgttggttgacagactatggccgcgtggcatcaaaaaaacggcgctgatctatgatgaatggaataaagctattgcaccctcacctgaattgcgcaaagcctttcatagcgaactgattgattttaaccacttcgcgcaacaatatcgggcagaacttgcacaacagccggaggaaggcaaacggctggcggatattgcccgtcaacaaccgctcacgttgctatatgccgccaaaaatgctcgtcagaatcatgccattgtcctggcggagtggctacgaacgttgtaa

SEQ ID NO: 374411 - DNA, 1491 bp, Salmonella enterica
atgaatttgcatcataaagcgctcaggcactttatctcagcaagcgtcatcgttttgacatcgtccttcctgatttacgaacttattgccagcgacagggcaatgaatgcctatatgcgttatatcatggagagagccgactcgtcgtttctgtacgataagtaccaaaatcaaagtatcgccgcacatttgatgcggacctttgaagcgccgggagagccagtcaccacggagaaacgccgcgcgttttgcgacgcatttgaaaccattaacggtacgcacggcgtcaacctgatccgtcataattatccggcgctacatggcacgctgcaaaccgctgcgacacagtgtaccgataatattgatgacgtctttttgctgcctgcgtttgatcaggcggtaagtatcaaccgggcgcaggacgaccacagtcacggactgggcacacttgagattaaattccgctattacgttgatttaaagaaacattatgtttatttctacgatctaatcaactcgcaacgcttcgccatgcatcgttggacttttttacaaaaaggcacaatgggcattaacaggaaagatatagataaactttttaccggccgtacggttatttcaagtatttacatggatgatattactcaggaaaatgtcatgagttttttaacaccagtctatctgtcgggcacgttaaaaggtatagtgatggtggacgttaatcaggataatctaaaaaatattttctatacccaggaccgtccgctggtttggcgttatcttaatatcaccctgaaagatctgggctcaggaaaagagattattattaacaaaagtaaaaacaatctgtttcaatatgtgaattataaccatgatattcctggcggactgcgcgtttctttctcccttgatttaacctattttattgtctcgtcctggaaagcactggccttttacttactggcaacggcgctcctgcttaatatggtgcggatgcactttcggctttatcgcgacgtcacgcgcgaaaatattagcgatgccatgaccggactttacaaccgtaaaatattgacaccggttttggaacagcgactgcaacgactggtcaataccggtacgccagtgacatttatcgccattgattgcgataagttaaaactgatcaacgataccctgggacaccaggaaggcgaccggatcattaccctgctggcgaaagcgattaaaacatcgattcgtaaaagcgattatgctattcgtctcggcggcgatgagttctgtatcattcttgtcgattacgctgcggatctggctatccatctgccagagcgcatcattcgtaacctgcaaattatcgcaccggataagtcagttcatttttccgccgggatttataatatgcagcccaatgacacaattaatgatgcctaccaggcttccgacgcgcagctctatctgaacaaacaacaaaaacagcgtcgttcataa

SEQ ID NO: 374412 - DNA, 840 bp, Salmonella enterica
atgcagttacaggttaacgcgacggaaatcaaaacggtttatgagcagcagctcttcaatggcaaaaatttccatgtgtttatctataacaagacggaaagcgtcaccgggctgcatcagcacgactactatgaatttaccctggtattaaccggacgctattaccaggaaatcaacggaaagcgtgtgctgctggaacgtggagattttgtttttatcccggtgggatcgaatcaccaaagtttctatgagtttggcgcaacgcgtattctgaacgtaggaattagtaaacgtttttttgaacagcattatcttccgttactgccgttttgttttgtggcatcgcaggtatatagggtgaatagcaccttcctgacctatattgaaacggtgattgcatcgctgaattttcgcggcaatgggctcgacgaatttatagaagtagtgacgttttacattataaaccgcttacgccattaccgcgaagagcaggtttatgatgatattccacaatggctgaaagcgaccgttgagataatgcatgataaatcgcagtttggcgaaaatgcgctggaaaatatggtgcgcctgtcggcaaaatcccaggaatatctgacgcgtgccacccgacgttattacagcaaaacgccgatgcaaatcattaatgagattcgcattaattttgccaagaaacagttggaaatgaccaactattcggttacggatattgcttatgaggctgggtatagtagtcctagcctgtttattaaaacgtttaagaaaatgacctcattcacgccgaatagttatcggaaacgattgacggaaattaatgaataa

SEQ ID NO: 374413 - DNA, 1011 bp, Salmonella enterica
gtgcatgccgttaagcccgaaccacactgggctattccgcaatggcagagcgcgcatgacactttctgggactatgtttccttacagcctgagacgctgcacaacgtgatgtgggcaatgtcggatcgcggcattccgcgcagttatcggacgatggaggggttcggcattcacaccttccgcctgatcaatgcgcaaggaaaagcgacttttgtccgtttccactggaaagcgttggcgggtaaagcctcgctggtatgggatgaatcacaaaaactgaccggccgcgatccagattttcaccgccgtgatctgtgggaggctatcgaagcgggcgattccccggaatatgagctgggtctgcagctcattgcggaagaagatgaatttaaattcgattttgatctgctcgatccgaccaaactgatcccggaagaattgctgccagtacaacgcgtcggcaaaatggtgttaaaccgtaatccggacaactttttcgctgagaacgaacaagcggcatttcatccgggacatattgttcccggcattgattataccaacgacccgttgttacagggacgcctgttcacttataccgatacgcaaatcagccgtctgggcggccaaacttccacgaaattccgattaaccgtcccacctgcccctataataatttccagcgtgacggtatgcaccgaatggatatcgacaccaatccggcgaactatgaaccgaactccattaatgacaactggccgcgcgaaacgccgccagcgccaaaacgcggcggatttgagtcctgtggatggtcataaaatccgcgaacgtagccccgcactagcaggcgatgcccgacggtttaaggcgatattaaacattgatagccagggggaaaaagggctggttgaggcggataacgttgaccaccactttatggacaccctgctaacgctgatggcggcgcactgtgtctggtcacgtgcgggaaaaattaacgcgattcctgcataa

SEQ ID NO: 374414 - DNA, 426 bp, Salmonella enterica
atgtggggcgtggatgcgttgataaatcgtagacgctgctcgcctaactttaaaaaccgtaccgatgagtccactgagcgggctgttgttgattatgctgtcgcattcccggctcacggccagcaccggaccagcaacgagcgacgtaaacagggcatttttatttacggcagtggtgtccgttccatctggttacgtcatccccctgagaacttcaaaaaatgcctgaaagcgctggaggagaaagtgaccagcaatggcatcgaactgaccgacagccagatcgcggcgctggagcgtaaagtcagtgatgacgaagcctgtggagagattgaaaccgctcatctgggttatctgggttcacaggacgttctgtgtgggcaacctgaaaggcgtcggacgtatttatcagcagatatttgttga

SEQ ID NO: 374415 - DNA, 156 bp, Salmonella enterica
gtgggcaacctgaaaggcgtcggacgtatttatcagcagatatttgttgatacgtactcgaaagttgttcactgtaagttgtatatcaccaaggcgctgattactaaggcggatctgctgaataatcgtgtgctgccattttacggctggtgctga

SEQ ID NO: 374416 - DNA, 177 bp, Salmonella enterica
atggagcaccatgatgatcagctttatctggcgataaatgatatcgaccacacgaaaatcaaagcgatgtcgccgcagactaacggcatctgcgagcggttccataaaacgatactgaatgagttttatcaagtggcgttccgtaaaaagttatatgtcgatcttgatacattataa

SEQ ID NO: 374417 - DNA, 1143 bp, Salmonella enterica
atggttgataagattattttaactgttacacctattttttctattccgccacgcagcgcagcagccgtcgagacctggatgtatcaggttgccaagagaacaaagataccaaaccggatagtatgcataagggaagaaggatatccggatttcactacagttaacgaaagatgctctattcaccgcatcgggttcagtagaatttataaacgtatatttcaaaagtggactcgtctggacccaatcccttactcacagcgtattctgaatattgcaaaagacttcaatattactgacgaaagcgtaattattgtacacaatagtatgaaattataccgacaaattcgtcagcgcgctcctcatgtaaagatgataatgcatatgcataatgccttcgaaccggaagggttagataaagatgtcaaaatgatcgttcccagtgagtttttgaagaattattaccgcaatcatctcccttatgcagatatttctattgtccctaacggaacagatccttattccctcgataaagacctggagaaattaaagaaatctgatctaaatattccctctgataaaaaagtaattttttacgctggccgcatttctcctgacaagggcgtaactttgcttttacaggcttttgaatatttgctcaaagaacgcagcgatatagaattagttgtcgttggtgactatatgaataaaagcaaaggtgaaaaagccgcctatcagcgcgaagtgcgagaattagcagaacggctaaaaccgcactgccatatgctgggaggggttgccccagaaaaaatatatagctattattctttggcagatttagttgttatcccctctcaatttcaggaaccgttctgcatggttgcaattgaggcgatgggcacaggaaaacctgtgctggtcagtacacgcggtggaatgacagagtttgtaaaagaaaatgaaaccgggtatcacttgcaagagccaatgacaccattgactattgcacaagatatagaaaaagtgctcgatgctcctgacctgagcaatatagcaaataatggaagaaaatatgttcttgaaaattatctatggtggcatgttacaaataaattcgaaaaagtaattgaaaaatggtttgattaa

SEQ ID NO: 374418 - DNA, 270 bp, Salmonella enterica
atgcgactgatcaaagactacacgccacctacgccggaagatctgaaccagttaaaagagaaactgggttataccggagcacagatggctgaccttgctggcgtggcaagtaacagccagtggcgtaaatacaccggcggtgaatcccccagagcaatgtcgcctcatatcctgttttttatggcggcacaacttgctttagacgataaggaattagcttccattctggaaaaaatgcaagaaatcggagcttcgtttgagaatatataa

SEQ ID NO: 374419 - DNA, 156 bp, Salmonella enterica
atgagcactaacgaaatgacccaggccgaattagcaaaaatcaacgctgaaatcgctaagctgactgctgagacatcgaaactcaacagggagtcagcctggtatccaatcgtcattgctatgggtcttattggagccgtagcaaaactgatttaa

SEQ ID NO: 374420 - DNA, 420 bp, Salmonella enterica
atggactttttcagacctacagagttgcgtggagttatttctctcccatttttcagttacttagtgccgtgtggattccccagtcccgcggcggactatgttgaacagcgtatcgatcttaacgaattgctcgtttctcatcctggctcaacgtattttgtcaaagcaactggtgattcaatgattgaagcaggcatcagcgacggtgacctgctggtagtagatagttcacgaactgctgaacacggcgatattgttatcgcggctgtggggggggaatttactgttaaacgtctgcagctgcggcctacggttcagctcaatccgatgaacagcgcctattcaccgatcatcatcggcagtgaagacacgctggacgtattcggcgtcgttactttcatcgttaaagtagcgagttga

SEQ ID NO: 374421 - DNA, 1035 bp, Salmonella enterica
atgttcgcgctttgcgatgtaaattcgttttacgccagttgtgagactgtattcagaccagatttgaagggacgccctgtcgtagttctctcaaataacgacggatgcgtcatagcgtgcagcgctgaggcgaaacagctcggtatcgcaatgggcgagccatacttcaaacagaaagaactcttccggcgatccggtgtcgtttgcttcagcagcaactacgagctttacgctgatatgtcgaatcgggtaatgaccatgctcgaagagatgtcgccgagggttgagatttacagcatcgatgaggctttttgtgatctgacaggagtaagaaattgccgcgatctgacagattttggtagggagattcgcgccacgatacaacaacgaacgcgtttgactgtgggggtgggaattgcgcagaccaagactctggcaaagctggctaatcatgcagcaaaacggtggcagcaatcaacgggcggcgtagtcgacttatcgaatgttgagcgtcagcgtaaacttatggcggtattgccggtgagtgaagtctggggtgtggggcatcgtatcaacaagaagctggaagtcatgggcatcagaacggttctggatttggctgattccgatatccgctttatccggaaacacttcaatgtagtgctggagcgtaccgtgagagagcttcgcggagagccatgtctggaacttgaagagtttgcgccgacaaagcaggaaatcgtttgtagccgttctttcggcgagcgagtcacaagctatgaggagatgcgccaggctatttgcagctacgctgcgcgcgcggcagagaaactccgtggcgagcatcagtactgtcgtttcatttcaacattcgtcaaaacatccccctttgtcctgaacgagccatgctacggcaacagcgccagtgtgatgcttctcacccccacgcaggattcacgcgacattatcaatgcggctgtgaagtgcctggataaaatctggcgagatgccaccgctaccagaaagcgggtgtga

SEQ ID NO: 374422 - DNA, 234 bp, Salmonella enterica
atgctgggtgacttcttcagccagggcgtagcgcaactcaaccttttcgatgataacgcgccgcgcgctggtagcgagaaactgatggaagtgctggaccatcttaacgcaaaagacgggaaggggacgctgtacttcgccgggcaggggatactgcgacagtgggctatgaagcgagaaatgctttcgccccggtacaccacaaggtactctgatctactgcgtgttaggtaa

SEQ ID NO: 374423 - DNA, 312 bp, Salmonella enterica
ttgctgctcagttatctgtgcaagattgaatccatctccccgctggtgaactttggcgcgcttttcgctttttttgtcgtgaacctgtgtgggttcaatttccggatgaaatcccagcggcgtatttttgcccatgtcattttgccgatcatggggataatagccatcggctacgtctgtttaagcatgaacattcacgctctgttagtcggcattagctgggcagcgatcgggatagcgattctgtgctatcaaaaagcgcacaaccaaaatattgccatcgacctggaagggaaaaagttgctcgattga

SEQ ID NO: 374424 - DNA, 3063 bp, Salmonella enterica
atggctaatttaacccgtcgtcagtggctaaaagtcggtctcgccgtcggtgggatggtcacttttggtttgagctaccgtgatgtggcgaaacgcgcaattgatggcctgttaaacgggacgtccggcaaggtaacgcgcgaccgcatctttggcaatgcgttaattccggaggcgcaggcgcaaacgcactggcagcaaaacccacaacaaaccatcgccatgacgcaatgcttcggctgttggacacagtgcggtatccgcgcccgggttaatgcagatggcaaagtgatacgcatagccggcaatccctatcaccccttgtcgcaggaacacccgattgatccgtccgtcccttttagcaaagccatggaacaactggcgggagaaagcggtcttgacgcccgctcaaccgcctgcgcgcgcggcgccacgctgctggaaagtctgtacagcccgctgcgactgcttgaaccaatgaaacgcgtgggtaaacgcggcgaagggaaatggcagcgcatcagctttgagcagcttattgaagaagttgtggaaggcggcgatctgtttggcgaaggtcatgtggacggactgcgcgctattcatgcgccggatacgccaatcgacgcaaagcaccccagtttcgggccaaaaaccaatcagttattggtcacgaataccagcgacgaaggccgcgatgcgtttctgcgtcgttttgcgctaaatagcttcggcagcaaaaatttcggcgcgcatggcgcctactgtggactggcttaccgggccggctccggggcactgatgggcgatctggataaaaacccgcatgtcaaacccgactgggaaaacgtggaatttgcgctatttatgggcacctccccggcacagtccggcaatccgtttaaacgccaggcgcgccagttggcgagcgcccggctgcgtgagaattttcagtacgtcgtggtcgcccctgcgctgccgttatcaacagtgctggccgatcctcgcggccgctggcaacctgtcctgcccggcagcgattcggcgctggcgatggggatgatccgctggatcatggataatcaacgttatcatgctgattacctggcaattcccgccgtacaggcgatgcagcaggccggggaacaaagttggaccaacgccacgcacctggtaattgcggatgaacttccgacgcttgccggacaacacctgacgctgcgtcatctcacacccggcggcgaagagacccccgtcgtgcttaacaccgacggcgaactggtcgccgcgtccacctgccgacaggcgcggcttttcgtgacacaggtcgttacgctcgccgacggccaacgggtcacggtgaagagcggtttgcaacgcctgaaagaggcggcagaaaagctctcgctgacgcaatacagcgaacagtgcggcgtcccggaagcacaaattatcgcgctggcggaaacctttactgctcacggacgtaaagccgcagttatcagtcacggcggcatgatggccggtaatgggttctataacgcctggtcggtcatgatgcttaacacgctgatcggtaaccttagcctgtccggcggcgtctttgtcggcggcggcaaattcaacggcgtaagcgacggcccccgctacaacatgaacagttttgccgggaaaatgaaaccgtccgggttaagtattgcccgcagcaaaaccgcgtatgaaacatcggaagagtaccgcgacaagattgctgccgggcaatctccttatccagctaaagcgccgtggtatccctttgtggcaggccagcttaccgaactgttgacctccgcgcttgaaggctatccttatccgcttaaagcctggatttccaacatgagcaacccgttttacggtattcccggtctacgcgccgtcgcggaagaaaagctaaaagatcctcgtcgactgccgctctttatcgcgattgacgcctttatgaatgaaacgacggcgctggcggactacattgtgccggatacgcataatttcgagagctggggctttacggctccctggggcggcgtagccagtaaaaccacaaccgcacgctggccggttgtcgcccctgctaccagccgaacagcggacggacagcctgtttcaatggaggcattttgtattgcggtagcaaaacggctgcggctgcccggattcggcgaccgggcaataaccgatccgcagggcaacgcttttccactaaaccgggcggaagatttttatctgcgcgtagccgctaatatcgccttcatgggcaagacgccggttgcgccggcaaatcaggaagatattacgcttaccggcgttacccgcattctgccagcgattcagcacacgcttaaacctgatgaagtcagccgcgtggcgtttatctactctcgcggcggccggtttgcgccagagggcagcggctatacggatcaacggttgggtaacgcctgggaaaaacctttacaagtctggaatgcggacgtcgccgcccaccgtcacgccatcaccggcgagcgcttcagcggttgcccggtctggtatccagcgcgtttgtcagatggccgggcaattgatgaccagtttcccgttggacagtggccgctgaaactgatttcatttaaatcgaatactatgtccagctcgacagcagtcatcccgcgcttacaccatgtgaagccagcaaacctggtggcgctgaatccgcaagacggcgagcgttatggactgcaacatggcgatcgggtacggatcattacacctggcggtcaggtcgtgacgcaaatcagtttgttaaatggcgtgatgcccggcgtcatcgccatcgaacatggatatggccatcgcgagatgggcgcaacgcagcactctctggacggcgcgcctatgccgtatgatccgcaaatccagtcaggtataaaccttaacgatctgggttttgccgatccgacaagaaccgtcaccaatacctggctcgactgggtttccggcgcggcggtacgtcaggggctgccggcaaaaatcgagcgtatataa

SEQ ID NO: 374425 - DNA, 1023 bp, Salmonella enterica
atgacgcatttactcatcattgaagaagtgctggctcacccgcaggacattagctggctaccgtgggcggtacaatatttcttttttattggcattgccgcctgcgccgcgttgtttgcctgttatcttcactggcgaaaaaaagacgccgcgacagaagaaaatcaggcgttactgattgccgttacttgtgcgattaccgcaccgctggcgctgacggcggatctgcatcagaccgcgcgcgtctggcatttttacgcctggccgacgccctggtcgtggatgccgtggggagcgttattcctgccaatgtttaccggatttctcgttctgtggttcctcgcccagcagatgaaacgaatgctaaataaaagttacaacgtcactaagtggttggcgctggccagcgcgctttgcgcgttgggtctgctgatttataccggccgcgaagtctccgttgtgatggcgcgtccgatctggtttagctatgccttccccgtggcgatgtttcttagcgccttacaggcatgcttcgcgctgatgattgtcgccgcccgacgcgactctgcgcgactgccaaaaatactgtggggacaaatctggacgctggcggcgctgggtctggtcgtggccatgtgggttagcggcgataccctttccgggacggcaatccgtcggtggattaccgtcgccctgtcagccaaatattacgctgccggctggatagcgctgtgggtattaacgctgttgttctgtagcctgacgctacgtcatcccttatcgcagctaagacgtgtcctgctggttctgagcgcgctggcgttatgttggctgatgcgctggaccttattgattcaggtacaaaccgtaccaaagttcaacgcgcaatttaatccttactcgttaccaggcggaacggatggctggctggctattctcggcaccttcggcctgtggatcgcgctactgattattattcgtgaaacgctcaacggactcaccaggagattacaacatggctaa

SEQ ID NO: 374426 - DNA, 735 bp, Salmonella enterica
atggacagcagtaaacggctacttctccagcaacttggcatcctgaccgttggcgcctcactggttccgctggctgaagcaaaatttcctttttcgccggagcggcatgaaggctcttcccgccaccgctacgccatgcttatcgacctgcgacgttgtatcggctgtcagtcctgcaccgtaagctgcactattgaaaaccaaacgccgcagggcgcgtttcgcacgacggtgaaccaataccaggtccagcctgaaggcagccgggaggtcacaaatgtgctattaccgcgtctgtgcaaccattgcgataaccctccctgtgtgccggtctgtccggtacaagccacctttcagcgggaagacggcattgtggtggtggataacaaacgctgcgtcggctgtgcctactgtgtacaggcgtgtccttacgacgcccgatttatcaatcatgaaacgcaaaccgccgataaatgcacgttttgcgtccatcgtctggaagccgggctgctacccgcctgcgtagagtcctgcgtcggcggcgcgcgtattattggcgatatcaaagatcctcatagccgcatcgccaccatgcttcatcaacatcgcgacgctatcaaggtattaaagccagaaaacggcacgtcgccccatgttttctacttgggtctggacgacgcctttgtcacccccttaatgggccgtgcgcagcccgcgctttggcaggaggtctga

SEQ ID NO: 374427 - DNA, 258 bp, Salmonella enterica
atgacaactctgacgcagttagaagatttgctgcttcattcccgtgaagaggctaaaggaataattttacaattaagagcggcccgccagcaattagaaaaggcctgcggtaagatacaggacccacagcaatatcagcagaacaccttattgattgaagcgatcgaacaggcagaaaatattatcaacattatttattatcgttaccataactgtgcgcttgtggtgagcgagggaccgcaaaaaactcttagttag

SEQ ID NO: 374428 - DNA, 348 bp, Salmonella enterica
atgttaaagaaaaaggttgtttttagtgatgaatatcgtgacttagagcagagttacatgcagctaaatcattatcttaaaaaatttcatcaaatcagggctaaagtgagtcaacagatttccgaaagagcacagtgttcaaaaaaaaacagagagccagatactattcttgataccttatttccacaaggcgttgccggggttaaccgggaggctgagagagatttaaagaaaatagtaaatatgtttaaacaacttgaagcacggctgcaacaacttaatactcaatccacggtggataatactcaatccacggtggaggtaccctcaggtaaaacaaaaaggtaa

SEQ ID NO: 374429 - DNA, 597 bp, Salmonella enterica
atgtctgcaggaaacatcttttggggaacaccaaaccccactacggttaaaaataatttcggcgtcagaaattttgattctgatacagagagtcaagatggtttatatgagcaaaacccttttgccgaaggttatagtgttttgcttattctccttacggtcattcaggctatcgcaaacgctaaatttatggacgttcagaagaatgctgaacgtgccagaaatactcaggaaaaatcaaatgaaatggatgaggttattgctgaagtatctaaaggggatcctaaaaccaaagcggcggtgcctgatgatgtagctaactacatgcgaaaaaatggtattaccatcgatggtttgacctttgatcagtatatggctaaatacggcgatcatgggaaactggataaaggtggtctacaggcgctaaaagcggccctggataatgacgccaaccggaataccgatatgatgagtcagggacagttaacaattcaaaaaacggctcagatgcttaacgctgtccttagccaactgacggggcttatcagtaagtggggggaaatttccaccatgattgcgcagaaaacgtattcatga

SEQ ID NO: 374430 - DNA, 1455 bp, Salmonella enterica
atgaatcgaatccacagtaatagcgatagcgctgcgggagtaaacgccttatcacatcatcatttaagcaatgtcagttgcgtttcctcgggatcgctgggaaaacgccagcggcgtgtggattttgcttttggcaatggtaacgcaatgtgtgcggtaacgaggaaaattagccttcaggaggcaaacaacgcgttgaagaaactacttgatgcggtccccggaaatcataagagtccaccattgcctgactttttgcggataaatcccacggttttatcaatgatgatgacgatattaatactcaacgtctttggtagtagcgctcaatcgttatgccaacagcttgagcgggcaactgaggtacaaaatacattacgtgataagcaggtgaaggagtatcaggagcagatccagaaggcgatagagcaggctgataaagcgcgtaaagcgggcatttttggcgctatttttgactggattaccggcatatttgaaaccgtgattggcgccttcaaagttgtggaaggttttctgtcagataatcccttagaaatggctagcggcgtagcctatatggccgcaggttgtgcaggaatggttaaagccggagccgaaaccgcaatgttattcggcgctgaccccgatacctgtaaggcgattattaacgttacaagtaagattcagcttggctgtgaaaccgtcgcgctggtactggatgttttccagatttgtcgtgcttttatggcgacgagagccttgtctggcgccgctgaaaaagtgcttgactctggttttggagaggaattagctgagcgtatggcagacgcaggcgaagcagaaatagacgcgctggctgaagagtttggcaggcaggtgtgcgaaaatttttccaaacaattcgagtctcttgatcgtgaaatggttgagctgggagagatggaagaggaatctgctgagttctctcgtaccgccgaaaaaaatatgacacgaagggcgggaaaaagctttacgaaagagggggtgaaagccatggtgaaagaagcggcaaaagaagccctggaaaaatgtgcgcaagaaggggaaaaatttctgttaaaaaatattcgtaaacagatccttgtcaaggtgtttaaaaaaattatgtctgcattactgagggattgttcatgcaaaagcttacaggcaatcagatgtgcaaccgaaggaggcaatcagacgaatgctggggtgattaaagcagaaaaagcgaagctcgaaaaaaaaatagagcaattaataactcggcaacagtttctggatttcataatggaacaaacggaaggtcaaaaagagatggaacaaaaacgcttacaggtactttataaaggtagcggcgcagcgcttaaagatacattagatatcattgatgattatagtagcgttcaggcgaaaattgctggctggcgcgcttaa

SEQ ID NO: 374431 - DNA, 588 bp, Salmonella enterica
atggaaacgagtaacgtaataccggtattaacgacgtctccctcgttagcgccttcttccactccatccccatctggggagaaagtggatgctgaatcattgctttggttatttgataaaatctgggagacgctaatagagcttgccaaaaagctgcgcaatatcatgcgcgcctataacgtagtaaaacagcagttgagttgggaactacaggtcaatgcctttaacacgcaactgaaaacgattgatcaaacgtataaagcctcaatacttaatggggttggctcaatttgttcgggaatgctgacgataggattcggggttacaggcggggaggccggcgttatgttcggtcaaggcgcagggcacatcgctgcgggtggctttagcctggggggcagtgctgcgcaacgtcaaagcgatcaaactagtacgattgccgaactgcaacaaaagggggcccaatcttatagcaaaaccttgacggaaattatggataaagcggctgatattatgcagcaaatcatgggcatggggacatcactggtcgatgttcttgctcacatacttcagtcattaacgaggtaa

SEQ ID NO: 374432 - DNA, 417 bp, Salmonella enterica
gtgcaagaaatagagcagtggttgcaccggcatcaggtgttaactgagcctgcatatttaggggaaacctctatattccttggtcagcagtttatattatcaccttatctggtggtatatcgcattgaggcagaagaaatgattatttgtgagtttaggcgcctgacgcccgggcagcctcgaccgcagcaattatttcacttactgggccttttacgcgggatatttgttcatcacccgcagttaaaatatttaaagatgttgataattaccgatgttctggatgaaaaacaatcaatgctacgcaggaaattattgcgcatcctgacagcaatgggagcgacctacactatgcttgatggcgataaatggacaattttatccgcagagcaacttatccagcgacattttaaatga

SEQ ID NO: 374433 - DNA, 615 bp, Salmonella enterica
atgcattttattcaatacaccattcgtgcactgggtgcagccgtcgtatttggattatcgatcgctgcagcggtaatttctggcggggcagggttacccattcttattcttgcgggggttgcgctagtgattgccactggagatgcttgctgcgcatatcataattatcaattgatatgtcatcaaaaggaaccgttacaaaccgccagtgatagcgttgcttttgtagtcagtaagctgtcgttagaatgcggagcaagcctaaactgcgctaacacccttgccaactgtctttctttattgatacgttcagggatcgctatttcttccctggttatacccatacagtttccactgcctgccgctgacaacatagcggcctctttggtcatgggaacagtaattacctccgctagcctgactgcgataggtgcggtactggattattgccgtgtccgcccccaaaatgccgatcaggaaattacttttgatgagcgccctgccgatccctgtgtgttattggctgaaaaaattacagagttttgtcaatcagatactccacctgcattaatggaatgtattgataatggatatcggggagagggaggaccatga

SEQ ID NO: 374434 - DNA, 276 bp, Salmonella enterica
ttgaatatttctgatatcagcagagtaatgtcggcaaacactcaatcttctgtaatgccctctacggactcaggccaggaacaccaggagcaagttaatctttttaaacaattattgacagatggtatgtcaaccagtaaagacgatgtcttactacctcaggttatgttggccagacaaatgaattatatggaattgacagtagatatggattttcttgccaggatatcaggctcaacctctcaagcgcttaataagctggtaagcatgacatga

SEQ ID NO: 374435 - DNA, 750 bp, Salmonella enterica
atgaaggttcatcgtatattattccttactgcgctggcattccttcttacgggatgtgatgtggatctttatcgttcattgccggaagatgaggcgaatcagatgctggcattactaatgcagcatcacatcaatgcggaaaaaaaacaagaagagaatggtattaccttacgtgtcgagcagtcgcagtttattaatgcggttgagctactgagacttaacggttacccgcatcgccagtttatgacagcggataagatgtttccggctaatcagctagtggtatcaccccaggaagaacagcagaaaattaattttttaaaagagcaaagaattgaaggaatgctgagtcagatggagggagtgattaatacgaaagttaccattgcactaccgatttatgatgagggaagtaattactctccgagttctgttgccgtatttataaaatattcacctcaggtcaacatggaggccttgcggataaaaattaaagacttaatagagaagtcgattcctgggttgcaatacggcaggattagtatcttgatgcagcctgctgaattcaggatggtacctgacgcgccagcgagacaaacgttctcgatgatggacgttatcagtgccaataaagaaaaggtggtgaagtggttgatcaaatacccttatcagttgatgttatcattaacaggactgctattgggggtgggcattgtgatcggctatttttggctgaggcgccgtttctga

SEQ ID NO: 374436 - DNA, 675 bp, Salmonella enterica
atgagtttcacttcactaccgctgacggaaattaaccataaactgccagctcgaaatatcattgaatcacaatggataactttacaattaacattatttgcgcaggaacaacaagctaatagcgtttcacatgctattgtaaacgccgcttaccgtaaggctgaaaaaatcattcgagacgcctatcgctcccagcgtcaacaaaaaatggagcagcaacaggaaatagagaggttgcgtaaacatacgctggaagaactggaggcagaatggctggaacggcatgtcaaatatttactagaagatgaaagtcaatttcggtccttggtcgatcaagcggcacatcatattaaaaatagtatagaacaggttctgatgtcctggttcgaacaacagtcggtagacagtgtgatgtgtcatcgtctggcacgccaggcgatgactatagcggaagagggggggctttatttgcatattcaccctgaaaaagaggcgttgatgcgtgagacctttgggaagcggttcactttgattatcgagcctggtttctctacagatcaggctgagctttcttcaacacgatattcagttgaattttcactctctcgtcatttcaacgcgttactgaaatggttacgtaacggtgaagattatagaggtggcgatggatattaa

SEQ ID NO: 374437 - DNA, 432 bp, Salmonella enterica
atgcgggcccgagttactaatagaaaaattacagcaaatactcaccgagtgattctggaaaccttgctggagataatagcgcgacgtgaaaagcaattacgaggcaaacttgccgtacttgatcagcagcaacaggcgcttatttctgaacagcaggtttgccagacgcgcgctttagcagtgaatgccaggttgaaagaattaacggactggcaaggaacgttatcttgtcatttactgttggataagaaactacaaatggccaggctattcacccaggcacagagttttttgacgcagcgccagcagttagataatcaatatcagcagcttgtctcccagcaaagtaaattacaggagaatgtcaatgctcttatgaaaagaaaagaaaaaattactatggtattaaacgatgcgtattaccaaagttga

SEQ ID NO: 374438 - DNA, 969 bp, Salmonella enterica
atgttaacaatagcgaatgaagagcgcccgtggatggatatactcccaacagaaggggctaccattggggagctgacattgcgtatgcaagaatatccggtacaggaagggatattatttactataaattataataatgagctgggtagggtatggattgcagaacaatgctggctgcgctggtgtgaagggttaattggcacagctaatcgatcagcgattgatcctgaattgctatatggaatagctgaatgggggctggcaccgttattgcaagccagtgatgcgacactttgtcagaaagagcctccaacattttgcagtaatgtaccacatcagctaacgctgaacatcaaatggatagttgaggaacatgaattccatagcattatttttaagtggccaactgcgtttttgcaaaatatagtcggagagctttctgccgagcgtcaacagatttatcctgctcctccaatagtggttcctgtatatttaggttggtgccaccttacgttaactgaacttgagtctattgaaattggaatgggcattcggattcattgctttggtgatgtcagaattggttgttttgttatccaattacctggacgtatctatgccagggtgttgctaacagaggataatatgatgaaatttgatgagttagtacaagatatcgaaacgttgcttgcgcaagaggggcctattttaaagagtgacatagcgtcttcagtcgaactggagcagttaccgcaaagtgtgctctttgagatcggtcgtgcgagcgtagaaattggacaattacgacaacttaaagcgggtgacgttttgcctgtaggtgggtgctttgcgccagaggtaacgataaggttaaatggccgtgttatcgggcaaggtgagctgattgcctgtgggaatgaattcatggtgcgtattacacgttggtatctaagcaaaaatacagtgtaa

SEQ ID NO: 374439 - DNA, 828 bp, Salmonella enterica
gtggcgcggataaagaaaatctcgatcacgctctgtgctttactttttactattctcccttttacgtcaatggctcatgcatccaggcaagccaaagcgacgcttgctgtttcttatgccactaaaacggtagagaaaaagaaaagcacaaccagcaaaaatatcagcaaaaccagcaaaaaaaacgtaaaaaaaacctcaaaaaccagccgttcctctttcgtctctgcaccaaaacgtactatcgcctccatgaaatctcatcataatacaactcatcgctatagcagaaccgtatccacgtcaattgcggccttcgacgtgatggaaaaatgcacgacgcgtaaagggcgtaagtcacattgcgtgaagaagaaaggaacattgccggtatccattgccgatgcgcatcgggataaagtacaaaaagcgacaaaaaccgcaatgtccaaactcatgaatcagattggtaagccgtatcactggggaggcgcgtcgccgcgtaccggttttgattgcagcggtctggtttactatgcctataaagatttagtgaagatccgtatcccccgaacggcgaatgagatgtatcacctgcgtgacgctgcgcccattgcgcgtagcgaattgaaaaacggcgatctggttttcttccgtacgcaaggacgcggcaccgccgatcacgttggtgtttatgtcggcaacggtaagtttatccagtctccacgcagcggtcaggaaattaggatcacctcgctgaacgaagtttactggcagcgccattatgtaggcgctcgccgggtaatgacctctaaaacaattcgataa

SEQ ID NO: 374440 - DNA, 1806 bp, Salmonella enterica
atggaaggtgcagatttattgatggcggggacgttgtttctcttcgcagcggtcgtggcggtgccgctggcggccaggctaggtatcggcgcggtgttagggtatttgctggcgggaatcgccatcggcccgtgggggctgggatttatcagcgatgtcgacgagatcctgcacttttccgaactgggcgtcgtgtttctgatgtttatcattggtcttgaactcaatccttcccggctttggcaactgcggcgctctatcttcggcgtcggcgccgctcaggtgctgctaagcgcggcggtactggcgggattgctgatgctcgccgatttcttatggcaggcggcgatagttggcgggattggcctggcgatgtcctcgacggcgatggcgctacaactgatgcgcgagaaaggaatgaaccgtagcgagtccgggcagttaggattttcagtcttactgtttcaggatttagcggtgatccccgcgctggcgctggtgccgttattggcgggatctgccgatgagcatttcgactggttcaaagtgggaatgaaagtactggccttcgcggtaatgctgattggcggtcgttacctgctgcgcccggtatttcgttttattgctgcgtccggcgtacgggaggtattcaccgccgcgacgctgttgctggtgctgggcgccgccttatttatggacgcgctgggactgtcgatggccctgggaacctttatcgccggtgttttactggcagagagcgaataccggcatgaactggaaaacgctatcgatccgtttaaaggtttactgcttgggttgttctttatctccgtcggtatgtcgctaaatcttggcgtactttatacccatttactgtgggtggcggcgagcgtcgttatcctggtcgtcataaaaatgctggcgttgtacctcctggcgcggctatatggaataagaagttctgagcggatgcagtttgccagcgtgctgagtcaggggggcgagttcgcttttgtgctcttttctactgcctcttctcagcgtctgtttcagggcgatcaaatggcgttattattggtggctgtcacgttatcaatgatgaccacgccactactgatgaaagggattgataagtggctatcgcgccgccttaacggtccggaagaacatgatgaaaaaccgtgggtcgaagatgataaaccccaggtgattgtcgtcggctttggtcgttttggtcaggtgattgctcgcttattaatggcgaataaggtgcgtatcaccgtgctggagcgcgatattggcgccgttaatctgatgcgcaaatatggttataaagtgtattacggcgacgccacacaagtagagctactgcgttctgcgggagcggaggcggcggagtcgattgtcatcacttgtaatgaaccggaagatacgatgaagctggtggaattgtgtcagcagcattttccgcatctgcatatccttgcgcgagcgcgcggacgggtggaggcgcatgagttattacaggctggggtcacgcagttttcccgtgaaacgttttccagcgcgctggagctgggacgtaagacgctggtgtcgttaggtatgcatccgcatcaggcgcagcgcgcgcagttgcattttcgtcggctggatatgcgaatgttgcgggagctgatccctgagcataccgacacaggacagatttcgcgcgccagagaagcccgacgtgagctggaggagatttttcagcgcgaaatgcaacaggagcggcgccagttagatggctgggatgaatttgagtag

SEQ ID NO: 374441 - DNA, 552 bp, Salmonella enterica
atgtctcagccagcgaaagtcttgctgttgtatgcccatccggaatctcaggactcggtcgctaaccgggtactgcttaaaccggccatacagcacagtaacgtaaccgtgcatgatctttatgcacgctatcctgatttttttatcgatacgccctatgaacaagcccttttacgtgagcacgacgtcattgtttttcagcatcccctgtacatctatagctgtccggctttacttaaagaatggcttgatcgcgtgttgagtcgggggttcgccagcggaccagagggaaaccaactggtgggaaagtactggcgtagcgtgattacgaccggcgagccggagagcgcttaccggtatgacgcgctaaaccgttatccgatgagcgatatactgcgcccctttgaattgactgcggctatgtgccggatgcactggatgactcccattattgtgtactgggcgcgccgccagtcgccgcaggcgctggccagtcatgcgaaagcttatggcgagtggctggcaaatcctgtgagcgcgggaggctattga

SEQ ID NO: 374442 - DNA, 933 bp, Salmonella enterica
atgagcgtatcagttaccgacgacattaccttccgcaagctgaccatcttcatgacctttatggagaaggggaacatcgcccgtaccgccgaagtgctggatatcagcggcgtcagcgtacaccgggcgttgcacacgctggaagagaacgttcgctgtccgctctttgtccataaagggcgtaatctgattgcccagccggcggcatggacgctgctggaatattgccaggaagtgatgcatgtgatggcccgtgggctggaagagacgcgcaaaacggcgggcgtcggccaggggcgcctgcgcgtcggcacgctctactcgctgacgctggaaacggtgccgcacctgattatggggatgaagctacgccgtccggatctggagctggatttaaccatgggctctaacgaagtcctgctgaaaatgctggaggacggtacgctggacgcgattctgatctcaatttccgaaagcgacatcgatcgcaatagtctggaagtgctgccgttgtttcacgatgatatttatctcgcggcgcctgcaacggctaccatcgatacctcatcaccggctgacctgcgcgattatcgggatcaaaagtttgtctcgctggcggaagggtttgccacctatgccgggttccaggaagcctttcatgtcgccggatttgagccggagattgtcacccgcgtgaacgatattttttcgatgctcagtctggtgcaggcgggcgtaggctttacgctgatgccggggcgaatgaagaagatgtatgagaataccgtgcagttactgaaactttccgagtcgtaccagatgcagcagcttatcgccattgtctttgcccgcaaccgcgagcgcgatccaagcctgctggcgctggccgccgaagggcggatgtacgcacgcagcctccagaccgtagggtaa

SEQ ID NO: 374443 - DNA, 897 bp, Salmonella enterica
atgaaaattctgtttacctttccggggcagggaacgcagcacacaggtatgctgcaaaaccttccgggaacagagttagcgcaggcgcgggaggtgctgggcgcggaagcggatacgcttgattctcccgatgcgttgaaacataccagggcggtgcaactggcgttgttgattgctggcgtcgcctgggcgcgcgagctggcgcgtcgcggcgtgtcgccggatatcgtcagcggtttgtccatcggcgcttatccggcggcggtagtggccggggcgctggattttgccgatgcgttgcggctggtggcgctgcgcggcgatttgatggagcaggcctacccgcacggctacggcctgacggcgattatggggctgacgctggcgcaggtggaatcactggtcgagggtagcggcacctggatcgccaacctgaacgccgaaacgcagatggtgattgctggtaccgacgaggcaatggctagcgtggcgaaacgggcgctggaaaaaggggccagcaaggcgcatcgtctggcggtcagcgtgccgtcgcactgtgaactgctggcggaaccggcgcaaaagctggtggcggcgttcagcgatgtgacgctctctcgcccatgctgcgcgtatttgagcggcagtacaggacgcgttttatggcagccggaacaaattgctgatgacctggcgatgaatatggcgcgcacggtgcgctggcaggaggcggtgatttccgccaacgagcgtgaggcgcggctggcgattgagatgccgccgggcggcgtgttgacctgcttaacgcgtcaggccgcgtgggaaggggagtctatctcgctggaacggagtggggtagatgtggctgtgcatctggcgaaacggcttaggtcgtag

SEQ ID NO: 374444 - DNA, 618 bp, Salmonella enterica
atgaacacaacattacgcccgcacgatttaatctggcttaacgcgcgagatgcgctggacggcatcatcgaatcctgggtggatgacgtctggcatagcggccttccggtggtggtgcggcgtgatgttgatgcgcaggggcgtgtgcccgttggcgtgcgcggtatgaagcgggaccagcgtgcggcgggctgggccaaaccggactccatcactcgagtttgtacgccggaatcgctggtcgacgcgcagacgttattgtgctcgccctttctctctcagccaccgcttcaggtggctttactgctggcacagcagacgtggccgtggacgtgggggataaccgggagtaccggctacgcgctggtgaccgggatcccggttatccacgcggcaagcgatctggacttgttgatccgcgcgccgcagccgctggcgcgtgaacagcttgagacgtggcatcagcagttagcaggcgggctgtgccgggcggatacccaggtggaaacgccatacggcgcgtttgccctcaacgaatggctgcgcgatggcaaggcactgttaaaaacctcgcaggggccgcggctggtgagcgacccgtggggtagggaggagtaa

SEQ ID NO: 374445 - DNA, 960 bp, Salmonella enterica
atgacttacgtgattgttcatgcccttgcaccgatttttatcatcatgctgctgggattctgggccgggaaggccaaaatggttgataacaagaatgtttccctgcttaatattttcgtcatggatttcgcgttaccggcgacgttgttcagcgccacggtacaaacgccctggacggggattctcgcccagtcgccgctaattctggtactgacgctggcgatgtggattacctatgtggctatttacttcctggcgacaaccgtctttaaaaagtcgccgcaggatgccgctgtgctgaccctgacggtggcgctgcctaactacgcggcgctcggtctgccgattctcggcagcgtactgggggaaggcgcgacgacctcgctgtccgtcgcggtttccattgcctgcggttcggtactgatgacgccgttctgtctgctgattctggaacgtgaaaaagcgcgcgcagaaggcaacaacactggttctactctggctattctgccggtgttgatgtggcgttcgctgaaaaaaccgattgttatgggcccgctactgggggtcattctctccgctatcgggatcaaaatgccggaacttttcctggcggcaatcaaaccgctgggtctgtccgcgaccgcggcggcgctgttcctgactggggtgatcctgtcagcccgtaaactgaaaattaatactatggtgattacctcgaccattactaagttactgattcaaccagcgattgcttggggtatcgtgctgatttttggtctgcatggctccgtggcgattaccgcgatcctgatgattgcgctgtccgccggctttttcggcgtggtgttcggcaaccgctttggcgtgcagtcgccggatgcggaagcggtgctgctgttgagctcggtactgtgtatcctgtcgctgccgctgtttatctcgctgacttcaggaatctaa

SEQ ID NO: 374446 - DNA, 804 bp, Salmonella enterica
atgatgagtaactcaacgagccgtggcgaattatggctggataccctcgcccccaacgctaaacgtctggaagggctgtgcccgtccgtgcaggccgccgacggcgagctgaacggcgaagcggtacgctttatcgccgtggtgccggatgcgaataatcactacccgcgcgcagccaaaggcgaggtagggctgctggaaggctggacgctggcgaaagtggtgagcgaaaccatcgccgccgatgccgataacgccgtgaagcgcccgattgtggcggtgatagacgtgccgagccaggcctacggtcgtcgtgaagaaggttttggtattcaccaggcgctggccggcgccgcggcggcgtatgccaacgcgcgtctggcggggcatccggtgattggcctgatcgtcggtaaagcgatgtccggcgcgttcctcgcgcacggctaccaggcaaaccgcctgatcgcctttaacgataaaggcgtgctaattcacgcaatgggcaaagagtcggcggcgcgtattaccctgcgtaccgtggaatctctggaaaaactggcggcgaccattccgccgatggcgtatgacatcagcaattacgccactctggggctgctttccgacctgctggacatcagtaacccggatgctccgtctgctaccgatctggcgctggtgaaaaccacgctgcaacaggccatcaatgacgctcgtcaggacccgacgctgaaaagccgtctgggcgcagacaatcgccgcagctctgcttttgtgcgcgaacgcatgcgggcgaactggtaa

SEQ ID NO: 374447 - DNA, 834 bp, Salmonella enterica
atgcgtgatgatcgtagctttattgaattaaaagcgcgccagcgtgcgcaggcgctgctggatgacggtagttaccgcgaactgctcgacccgttcgaaggcatcatgtcgccatggctgggcgcgcagggcatcgtcccgcaggccgatgacggtatggtcgtcgcaaaaggcaccatcaacggcaaaccggctgtagttgtggcgattgaaggcgccttccaggggggcagcatgggcgaagtgtccggcgccaaaatggcggcggcgctggagctggcggcggaagataaccgcaacggtatccccactcaggcggttttgagtctggaaaccggcggcgtgcgtttgcaggaagccaacctgggcctcgcggcgattgccgatattcacgcggcgattgtcgacctacgtcgctataccccagtggtcggcattgtggccgggaccgtcggctgcttcggcgggatgtcgattgccgccgcgctgtgcagctatctgatcgtcacccgtgaagcgcgtctgggcctcaacggcccgcaggttatcgaacaggaagccgggattgaagagtacgactcccgcgaccgtccgttcatctggagcatgaccggcggggaagtgcgctatcaaagcgggctggtggacgcgctggttggcgacggcgttaacgcggtgaaagcggcgatgaacgaggcgctggcgaaaggcgtaccggcgaaacatcgcaccgataactatgactggtatctcgatcgcctgacgaacttcgacacccgcaaacaggccgattctgaacagattaaagcgctcttcagccgggaggtgaaatga

SEQ ID NO: 374448 - DNA, 300 bp, Salmonella enterica
atggaacacattacgttaaccgtaccggccagccgcgtcttaatcggcaaagcgctggcaggcgtcgtgggctccggggatatggaggtgttattcaccgccgaccagagccagacgttaaccattgatatcaccacttccgttgataacagccgtagccgctgggaagcgctgttcaaccgtttgcaaacggtcagcagcctgccagcaggcaaactgacgatccatgatttcggcgcgacgccaggcgtggcgcgcattcgtatcgaacaggtttttgaagaggtgagctatgcgtga

SEQ ID NO: 374449 - DNA, 858 bp, Salmonella enterica
atgaaacttctgccccggatccaggctgaaggcggtgccgaatggctggcgcgaaccgccacgcagtgtctgattgacgaagcacgattaagcccgaaacccggtctggtggacagtcgggggaacggcgcgcatcacgatcttacgcttgcgctgatggagcgctccgcgcacagcctgacccccacgtttcaggcgctggcgctgcaaagctggcagcgtccggcggatatcgcgctcagacagaccgtagggcgactcggccgcgaaggcgagcagcagatgatggccgctaccggcggcgtgaacacccaccgcggcgcgatttgggcgctggggctgctggtgagcgcggtggcgatgcacggcggcgtgggtagcgcgcagcaggtggcgaacacagccggcgagctggcgaaactgccggacgacgccgcgccgaaggtcttcagtaaagggctatgcgccacgcaccgttatcgggtgccgggggcgcgcgaagaggcacagcaagcgtttccacatgtgatgcagcgtgcgctgccgcagcttcgactgagtagattgaacggcagcagcgaagcgcaggcgaggcttgacgcgctgatggcgatcatgacctcgctgaccgatacctgcgtgctgtcgcgcgccgggcttaaggggctggatgccatgcaggacggcgcgcgagctgtgctgaacgccggcggcaccgctcatccagcgggtcagttggcgctagcggcgctcgatcgccagatgctggcgctgaatgcctcgccgggcggcgcagccgatttgctcgccgccaccttgtttcttgaccgtatcgaatcgccctatttcaagcattaa

SEQ ID NO: 374450 - DNA, 1656 bp, Salmonella enterica
atgttatctgggcaaacgccagcacgcgtctggaacacccgccgcacggaaaaacagcgccgtctggcttccgttccggtgcagggtaaggtgctgccgaccgcagacctgaccgcgatgctggaaaaactgatcgcgccgggcgaccgcgtggtattagaggggaataaccaaaagcaggcagatttcctgtcgcgtatgctggctgaggtgaacccgcagaaagtgcacgacctgcacatgattatgccaagcgtcgggcgcagcgagcatctggatatcttcgagaaaggcatcgcccgcaagctggacttctccttctccggcacccagagcctgcgcatctcgcagctgctggaagatggcatgctggaaatcggcgccatccacacctacatcgaactgtactcccgtctttacgtcgacctggccccaaacgtggcgctgattgccggttataaagctgaccgcaaaggtaatctctacaccgggccgagtaccgaagataccccggcgctggtggaagccgccgcgttccacgacggtattgttatcgcccaggtgaacgaactggtcgacgatgaatgcgacctgccgcgcgtggatattccgggctcctggattgactacgttgtcgttgccgacaagccgttcttcatcgaaccgctgtttacccgcgacccgcgcctgatcaaacaagaacacatcctgatggcgatgatggccatcaaaggcatctatgccgagcatcaggtgcagtcgctgaaccacggtatcggcttcaataccgccgcgatcgaactgctgctgccgacctggggcgaacagctcggtttgcgcggcaaaatctgtaaacactggacgctgaatccacatccgacgctgattccggcaattgaaagcggttgggtagaaagcgttcactgcttcggcggcgagctggggatggaagagtatatccgcgcccgcccggacatcttcttcaccggttccgatggctccatgcgctccaaccgcgccttctgccagttggcaggtcagtatgcggtggatatgtttatcggttcgaccttgcaggttgacggctacgccaactcctcaacggtaacccgcggtcgtctgtccggtttcggcggtgcgccgaacatgggccacgatccgcacggtcgtcgccacgctacgccagcctggctgaacatgatcaccgaaccggacccgatgcagcgtggtaaaaaactcgtggtgcagatggtggaaaccttccaggcaggcgtgaagccgacctttgtcgaaaaactcgatgcggtggatgtggcgaaagcctccggaatgccgctggctccggtgatgatctacggcgacgacgtgacgcacgtgctgaccgaagagggtattgcttatctctatcgcgcagaaagtttggaagagcgccgcgcgatggtggcggcggttgcgggtatcaccgacatcggtctgggcgtggatgccaaacgtgtcgctgaactgcgtagtagcggcaaggtggtctacccggaagatatgggtattcgccgtaccgacgcgacccgttcgctgctggccgccggcagcgtcgctgacctggtggaatggtccggcggtctttacaacccacctgcgaaattccggagctggtaa

SEQ ID NO: 374451 - DNA, 288 bp, Salmonella enterica
atgctgtgggatacgtatagcgacctggcggataaacgtgttgaatcacgcggcgtcgtcagtgtgcatcatataattaaacagactttgaaactgggtgccattagcgtatcccttaatcaacagggcgaccagttgttcgacaagccccatcaggtcacgctggcggatgtgtttttgtatgagctccagcagcgcgacgcggtggtgccgcataatctcgtcgttcggcacgaccgtaatatcgaccagaggaaattcaatggcgtgacactacgcgcttgttag

SEQ ID NO: 374452 - DNA, 186 bp, Salmonella enterica
atgactatcgcagaaagattacgtcaggaaggacaccgtaacgggctacaacaaggcaagcaggaaagccagcggctcgccgcattgcgcattgcccgcgccatgctgaccgacggcttcgatcgcgataccgtgcttagggttaccgggctagcgcctgccgatctgacatctgaaagccattaa

SEQ ID NO: 374453 - DNA, 330 bp, Salmonella enterica
gtgagtacattaacgttggttttaaccgccgccggttccgtcttactgctgctgtttctcgtgataaaggcacgtatgtatgccttcgtcgcgttgatagtcgtctcgatgggcgcaggtcttttttctggtatgccgctcgatacaatcgccgcaaccatggaaaaagggatgggagacacgcagggcttcctggcgattgtggtcgcgctgggggcgatgttcggtaagatcctgcatgaaccggcgcggtcgattagattgccgttaaaatgcttaaatccttcggctataaccgcgcgcactatgcgattggccttgccgggctga

SEQ ID NO: 374454 - DNA, 1038 bp, Salmonella enterica
atgaccttacactgcgcatttattggttttggtaaaagtaccacccgctaccatcttccttatgttctcaaccgtaaagagagctggcatgtggcgcacatcttccgccgtcatgcgaaaccggaagagcaggcgcctgcctggtcgcatatccatttcaccagcgatcttgatgatgtgctgaatgatccggcagtaaagctggtgatcgtttgcacccacgccgacagtcattttgaatacgctaaacgtgcgctggaagccggtaaaaacgtgctggtggaaaaaccctttaccccgacgatagttgaagcaaaggtcttgtttgaactggcgcaaagcaaagggttaatcgtgacgccctatcagaaccgtcgctttgactcttgcttcctgacagctaaaaaagtgattgagagcgggaaactgggtgagattgtcgaaattgaaagccatttcgattattaccgcccggtagcggaaaccaggccgggtctgccgcaggatggcgccttctacggtcttggcgtgcacacgatggatcaaattatttcgttgtttggccgtccggatcatgtcgcgtatgacattcgtagcctgcgtaataaagcgaatccggatgatacctttgaagcgcaactgttttacggcgatcggaaggcgatcgttaaaaccagccatttggtgaaaattgactacccgaaatttatcgtacacgggaccaaaggctcgtttgtgaagtacggtatcgatcagcaagaaaccagcctgaaagcgaacattatgcctggcgaaccgggctttgcgacagacgaatctgtcggtacgctggagtatgtcaacgacgaaggcgtgaccgtaaaagaagaggtaaagccggaaacgggtgactatggtcgcgtctatgatgccttgtatgcgacgctcactaccggcgcgccaaattacgtcagggaatctgaggttctcaccaatctggagatcctggagcgggcatttgaacaggcctctcccgccaccataacccttgcaaaataa

SEQ ID NO: 374455 - DNA, 1743 bp, Salmonella enterica
atgaaatcaacgtttatgcgttgggtggctatcgctgctctgctggtcggggggacgtttagcgcagtggcccactctcccatcgcgccgccagcctcctggaatgctgaggaagatgtatttcatcccgtgcgagccacgcaggggatggtggcgtcaatggatgcattggcgacacaggtcggcgtgaatatcttaaaacagggggggaatgccgtggatgccgccgtggcagtaggctatgcgctggccgtcacgcacccccaggctggggctctcggcggcggcggtttcatgctgctgcgtactaaagatggcaataccacggcactcgattttcgtgaaatggcgcccaccagatccacgcgtgatatgttccttgacaagcgtggtaacccggacagtaaaaaatcgctgacgtcacacctggccgtggggacgccaggtaacgtagcaggtttttcactggcattggaaaaatatggcacgatgccgctgaataaagtgctacggccggccattaaactggcgcaagaagggtttatcgttaacgatgcactggcggacgatcttaaaaaatatggcagcgaaacgctcccccagcataaaaacagtaaagcgatttactggaaaaacggcgaaccgctaaagaaaggagaaagactggtacaacagaacctggcgaaaagcctgatcttgattgctgaaaacggcccggatgctttctataaaggcgcgattgcagaccagattgttgaggaaatgcgccaacatggtggattaatcaccaaagaagacctggcggcttaccgtgcggtagagcgtacaccgatcgtagggcgttatcgtgggtatcagatttactcaatgccgccgccttcttccggcggcattcatattgtagagatccttaatattctcgaaaatttcaatataaaaaaatatggttttggcagcgcagacgctatgcaagttatggctgaagcggagaaatatgcctatgccgatcgttcgaaatatctgggcgatccggattttgtcaaagtaccgtggcaggcgttaactaataaaacgtatgctaaatctatcgcggaacagatagacattaataaagcgaaaccgtcgagcgaaattcgtcccggtaaactggcgccatatgaaagcgatcaaactacacatttctcggtggtagataaagacggcaatgccgttgcggtaaccgtcacgttgaattcactgtttggcaccggaattgtggccggcaataccggtattttgttaaataatcaaatggatgacttctccgctaaaccgggcgtggcgaacgttcatggtctactgagtggtgatgctaatgcgattgcgccaggtaaacgcccgctgtcgtctatgtcgcccacgatagtggtaaaaaacggtaaaacctggttggtgaccggctcacctggcagcagtcggattattacgaccgtactgcaaatggtggtcaatactattgattttggaatgaatgtcgcggaagcgaccaacgcgccgcgttttcatcatcaatggttgccggatgaactgcgggtagaaaaaggcttcagccccgatacgctaaagctgctggagcagaaggggcagaacgttgtgctgaaagaggcgatgggcagcacccaaagtattatggttggaccggatggtgaactgtacggtgcatccgacccgcgttcggtggatgatttgacggcagggtattaa

SEQ ID NO: 374456 - DNA, 417 bp, Salmonella enterica
atgaaacgttttttacttattataagtttgttgccatttacagcctttgcgcagccgctcaataccatgaataaccctaatatgcagggttatcagatcccaagccagcagcgtatgcagacgcagatgcaaacgcagcagcttcagcagcaaggtatgctgaaacaacagatgcaaacgcagacgcgcagccagcagcaaaatctacagtcgcaattgaattccagtgcgcagcgggttcagcagggacagccgggcaacggtatgttcggtcagcaaacgcttcctaatacgcagggcgggatgctcagaggcactggatatccggaccgaatgctaaaccattcacagccaatgtcgccgcagaacagcgggacgccgaaacctggcatcccgctgaaaaccatcagtccttaa

SEQ ID NO: 374457 - DNA, 1110 bp, Salmonella enterica
atgaaacggaaagcgaaaacgataatcgcagggatcgttgcattagcggtcacgcagggggcaatggcagacgatattaaagtcgctgttgtcggggcgatgtccggcccggtagcgcaatggggcgatatggaatttaacggcgcgcgtcaggctattaaagatatcaacgccaaaggcggtattaagggcgataagctggtcggcgtggaatacgatgatgcctgcgatccgaaacaggcggtggcggtggctaataaaatcgttaacgacggcattcagtacattattggtcacttatgttcttcctccacacagccagcgtcggatatttacgaagacgaaggcattctgatgatctctccaggggcaactaacccggaactgacccagcgcggctatcagtacattatgcgtaccgctggtctggactcctcccaggggccgacggccgcgaaatatatcctggaaacggtgaaaccgcagcgcatcgctatcattcacgataaacaacaatacggcgaggggctggcgcgctccgtgcaggatggcctgaaacagggcaatgccaatattgtcttttttgatggtattaccgctggcgaaaaagatttctccgccctgattgcccgcttgcaaaaagagaatatcgactttgtctattacggcggctactacccggaaatgggacagatgctgcgtcaggcgcgggcgaatggtctgaaaacgcaatttatggggccggaaggcgtgggtaacgcgtcgctgtccaatattgcgggcagtgcggcggaaggcatgttggtgacgatgccaaaacgctatgaccaggacccggcgaataaagcaattgttgaggcgctgaaagtcgacaagaaagatcccagcggtccgtatgtatggatcacttatgccgccgtgcagtcactggcgacagcgatggatcgcagcgccagccatgttccgctggatctggtgaaagatcttaaagcgaacggggctgataccgtcatcgggccgctgaaatgggacgaaaaaggcgatttgaagggatttgagtttggcgtcttccagtggcacgcggatgggtcatccacccctgcgaaataa

SEQ ID NO: 374458 - DNA, 1464 bp, Salmonella enterica
atggcaaaagagaaaaaacgtggctttttttcctggctgggctttggtcaaaaagagcaggcaccagaaaacgagacagaagtaaaaaacgaagataaacaatcggttgcggaagaagcggcagcggttcacgcgcctaaaacgcataccgaggcggagtccgaggcatttgccgctgaagtcgtggacgtgacggaacaggttgccgaaagcgaaaagcagccttcgcagccggaaccgaccgttgtcgcggcggccattgagcgtgaagaactaccgttgccggaagacgtgtctcagcaagcgatagaagaggcgtgggtcgaaacgatttcgccgcaagagtggcaggccgaagcggaaaccgtagaaattattgaagcggtggaagaagagggcgaaaaagctgcgaaattcaccgacgaagagctggaagcgcaggcgctggcagccctggcgacggaagacgcggtgatggtcgttcctgtggcggaagaagaaacgccggtggaagcgatggcacaggagcaagaaaaaccgactaatgaaggtttctttgcccgtctgaaacgcagcctgctgaaaacaaaagaaaatctcggttccggatttatcagcctgttccgcggtaagaaaatcgacgatgatttattcgaggagctggaagagcagttgctcatcgctgatgtcggcgtggaaaccacgcgtaaaattatcgctaacctgacggaaggcgccagccgcaaacagcttaaagatgctgaggcgctgtatggcttgctgaaagacgagatgggcgagattctggcgaaggtagacgaaccgcttactattgaaggtaaaacgccttttgttattctgatggttggcgtgaacggcgtgggtaaaaccaccactatcggtaaactggcgcgtcagtttgagcagcagggtaaatcagtgatgctggcggcgggggatactttccgcgcggcggctgtcgaacagctacaggtttggggacagcgcaacaatattccggttatcgcccagcataccggcgcggactccgcctcggtgatttttgacgctatccaggccgcgaaggcgcgtaatgtggatgtgttgattgccgacacggcaggacgtttgcagaacaaatcgcacctgatggaagagttgaaaaaaatcgttcgcgtcatgaaaaagctggacgaagaggcgccgcatgaggttatgctgaccattgacgccagcaccgggcagaacgcggtaagtcaggccaaactgttccatgaagcggtgggcttaaccggtattaccctgaccaagctggacggtacggcgaaaggcggggtgatcttctcggtggccgatcagtttggcattcctatccgttacattggcgtgggcgaacgtatcgaggatttgcgtccgtttaaggcggacgattttattgaggcactttttgcccgagaggattaa

SEQ ID NO: 374459 - DNA, 558 bp, Salmonella enterica
atgcgcaatttggttaaatatgccggtattggcctgctggttatggggcttgcggcctgtgataacaacgatacaaaagcgtcggcagaaagcgccgccgcagaaagccaggcctccggtcagcccatcagcctgatggatggcaaactcagtttctcactgccggcggatatgaccgatcaaagcggtaagctgggcacccaggcgaataatatgcacgtttattctgacccgacgggccagaaagcggtgattgttatcgtcggcgataataccgatgaagcgttgccggtgctggcgaaccgcctgctcgagcaacagcgtagccgcgacccgcagcttcaggtggtcaccaataagtctattgagctcaaaggccatacgttgcaacaactggacagcattatctccgcgaagggccagacggcgtactcttccatcgtgctgggtaaagtggataaccaattgctgacgattcaggttacgttacctgcggacaatcagcaaaaagcgcaaaccacggctgaaaacatcatcaatacgttagttattaaataa

SEQ ID NO: 374460 - DNA, 777 bp, Salmonella enterica
atggggcgtcggcgtagtcgggtcatctcctggaacggtatcgtcacctacggcgcaatggcgatgggcgcgccgcttggcgtgctgtgttttgcctggggcgggttacagggactggcgctaacggtgatgggtgtagcgttgttggcgcttccgcgcccatcggtgaagacgaacaaaggcaacccgctgtcgtttcgcgcggtgctgggacgcgtctggttgtatggtatggccctggcgctggcgtcggcagggtttggcgtcatcgcgacgtttattaccttattttatgatgctaaaggctgggatggcgccgcctttgcgctcacgttatttagcgtcgcgtttgtcggcacgcgtttgctgttccctaacggcatcaatcgtttaggcgggttgaatgtcgccatgatctgctttggcgtggagattattggtctgttactggtgggaacggcagccatgccgtggatggcaaaaatcggcgttttactcacggggatgggtttttctctggtctttctggcgctgggcgtggtggccgtcaaagccgtgccgccgcagaaccagggcgcggcgctggcgacctataccgtctttatggatatgtctttgggggttaccgggccgctggcggggctggtgatgacctgggcgggcgtgccggtaatctatctggcggcggccgggctggtagcgatggcgctattgctgacctggcgcttaaaaaaacggcctccgtctgcactgccggaggccgcatcatcatcgtaa

SEQ ID NO: 374461 - DNA, 504 bp, Salmonella enterica
atggctttctacagttccggggttgagtacggcatccatagtctgatgtgcatggtggacagtaagggagatgcccgagaaatgagcgttcgcgagattgcggacctgcaaagcgtgccttatgactatttggccaagatttttacccgtttatcgaaggctggtctggtgcgtagcattgaagggaaggggggcggttttcagcttgccaaacctgccgagcatattacagtgctcgacgtagtcaacgcgatagacggtgataaacggatttttgaatgccgcgagattcgccagcggctgacggtatttgatgaacagccccccgcatgggcttgcgaagggatttgcggcgtacgctcagtgatggatatggcgcagcagcgcatggaagaggcgctggagcaacatactattctcgacctggcgcgtaaaatgtatcgtaaagcgccggatacttttgtgattgaagtgcaagcgtggatcgacgcgcgaaaaagctaa

SEQ ID NO: 374462 - DNA, 1203 bp, Salmonella enterica
atgcatcaacatattctgattgtaggggcgggattttccgggatgtgggcagcgctcagcgcggctcgtctggtagataaatatcaaagcgagaacattaagatcaccgtcatcgcacctcagcctgaactacgcatccgcccccgtttttatgaaaatgcggtgtcaacgttggttgcgccacttcagccgctgtttgatatcaccggcgttaacttcctgcgcggaacggtgcggcaaatccttccggattcaaaagaggtgaggtggacagatgccagcggcgaaacgcgcgtaagccgctacgatcgcatggtgcttgccagcggtagccacgtagatcgctcacaggtggctggcgctcagacacatgccttcgatctggatcaactggaaagcgcggcagttcttgagcggcatctgcaaggcctggcttaccaggctgaaagcgaagcgcgtaataccgtggttgtgtgcggcggcggttttacgggtatcgagatggcgcttgaactgcctggtcgcctgcgcgatatcctcggtgtcgatgctaagacaagagtagtcgtagttgaacgcagcacggaaccgggcgcatgctatagtgaagcattgcgtaacatcatcattgaagcctctgcggaactgggcgtggagtggatcgttaacgcagaagtagaaagcgtggatgccgtcggcgtgacgctgaaagatgggcagacgattgcatcgcagacagtgatctggacggttggcgtacaggccaacggcctgacggcgcagattgacgctccgcgcgatcgcttggggcgtctgcatgtgaataccgaacttcaggtgtcaggtcacgaagatatctacgccaccggcgacgtagcctatgccacgaccgacgatgaaggccatcacgcgctaatgacctgccagcatgcgattctgttaggcaagtttgccggtaataacgctgctgccagcctgctcaaagtcacgcccctgccatatcgtcaggaaaattacgttacctgtctggatcttggcgcttggggcgcagtctatacagaaggatgggatcaacaggtgaaactgacgcgcgccgaggcgaagaaactcaagatgtcgatcaccagcgagctgatctacccgccaaaagcagaccgcgcagtggcgtttaaaattgccgatccactggcgccgtttgtttaa

SEQ ID NO: 374463 - DNA, 1272 bp, Salmonella enterica
atgaaactacacattactgtactggcgtcatctctgatgctggcgatgccggcactggcgaaagatatttccctgtcccaggcggagttaatagcaaaaagcgtgacgccgaactcgacgagcgacgcctttaagagtcttgagtctcaatggttggcacagttgcgcaaggcattacaaggcgatggcgcagcgttgacccgcgacgatctgatccagatgcaacagaatcctggtcaggcggatactgcctggctacaggctagcggttatgattttcagaccagcgataatcaacaggtgggaattaccctgctttccgccttcaatacattgccggaagcggtattgaaagacaatctggcgatggtaacggcgattaaccatgatgccgatgttaatacccgtcaccaggcgctggcggatgcggaaagcgtgggctatctctatttcctgagcggtgcgatggggccgcggctgggacgggcatttcttaccgcttatgataaaggcgagctgggcaaagcggcggcgctgattaaagcatcggaaatcagcaccagcgcggcgaaaaaatattttcactatccgcgtcctttccaggtaccgggtaatactatccatctgacgccggacgatgtggtggtaaaagatggtcatccttatactgcggatggcgcttctttccccagcggtcacacgaacgtcggttatacggatgcgctattgatggcggaaatgcttccggagcgctttgatgcgctggtgattcgcggcgcgcgctatggctattcccgcctggtactcggcgtacactatccgctggatgtgatcggcgcgcgtatggtcgcgcagcgtaatgtcgcgcactatcttaacgatccgcattatcgaacattgttcaacgaagctcgcattcaactgcgtgaggcgttgatgaaagagtgtggtacgacaattgttgaatgcgcggcatcaaccgaaaaagaagatccgtaccgcgatccggctatgcatactttttaccgtttcaccatgacctataacctgccgcaacagaaaagcgagcatcagccgctaaaagtaccaaaaggcgccgatgttttgctgcaggccgcgctaccgaatttttcgacggcacagcgccaggcgctcatggaagagacggcgttaccggcaggatatccgttatcgggcgagactgatgatcaacagttctggcagcgtctggatttatccgctgcttacgagatggcaagaaaaacgcgctaa

SEQ ID NO: 374464 - DNA, 705 bp, Salmonella enterica
atgattgtaaaaaaacgccgtggttgccggacattgcgtcgtctggcgggccttgtggcctgttcgttttttatcaatactgcgtatgcctggcaacaagaatatatcgctgaagcggctccggggcatacgacggaacgctatacctgggacagcgatcaccaaccgaattacaacgacattctggccgaacgcattcagtctacgcagaatacggttggtccggtacttagcctggcggatgaaaccccgcttgatgcgaccagcggtatcagtatgggctggaactttccgctttccaggcgtgtgaccaccgggccggtagcggcgctgcattacgacggttcgacttcatcaatgtataacgaatatggcgatagcgcgacgacattagcattcaccgatccgttatggcatgccagcgtcagtacgataggatggcgggtaaactcgcagttcggcgatatccgtccctgggcgcaaatcagctataaccagcagtttggggaaaatatctggaaagcgcagtctggattgagccgtatgaccgcagtaaatcaggagggaaactggctggatgtcaccgtaggcacggacgtgctgctgaacccgcacctggcggcgtatgcggcgttttcccaggcggaaaatagcgctacggatagcgattatttatataccctgggggtgagcgcccgcttttaa

SEQ ID NO: 374465 - DNA, 813 bp, Salmonella enterica
atgaatcaaaaagctcaagcaaatgaaaattcgactgtaatacagattgcgggaaacttaactcaaggaatcagctttgctgagtgtgaacgattatttaatttattgctaacagaaaatttcccaagactcgaagctattgctgcctcaacagccaaggaaaatgttgacgcattagtcaaggcgacattcgaaaaaattgattcaaagattgatcaaatcagcgtagaaaaacttgctcagcccgatgtacaaagtacatttaacaacgcagttcaaggtgttgcaagaaaaggtaccaaaatagatatcgatttattggccgaattgttggaatccagaatcgaaaaagacagtactgactacatagataattgtattgaagcggcagtggagatggtaccaaaattaactagtgatatgctagcaatcttgccagcattgcattttattcaatcacttacttggagtaaccctgctgaagttgataatgtttatggcttaatctatgatcattttttgtcgcgaggtgacgatatgtcacgttcgaaactcaagacaatggcctctattggggtgggaagttacgtcaatattatgggaagcaatacctttgaaggtatgaaggaaaaaaataattacctacaagggattgatgcagaattgaaatatccgagaatgtatcaagctttaaatttctatgatcaaaaagacttgcaccaactcacgctcactacaccgggccaagtaatagccatcaaaatgctggaaaaaatatttccttcaatgaatttgcgcgattttttacagtaa

SEQ ID NO: 374466 - DNA, 213 bp, Salmonella enterica
atgcttgaatggttaaataaccacataggtactgattgggctacatacctcggagtacttctagcgatcctgtcattaatttggggagggaaaaaagtactaaaaaataagtcaatttcccaaaaagcaaaagtcaacggaggcatagttattcaggttggaggtgattttcaaggaggaaaggataatgaatcaaaaagctcaagcaaatga

SEQ ID NO: 374467 - DNA, 354 bp, Salmonella enterica
atggacgataacgttacgcgtagaaaacggttactcggtttgggaatgttagtcgtcggtgcagtggtatacctggtgggactctggccagcctgtcatacattaagcgaaaagggttatttttttgcggcaatggttatgtgcggttttccgctcttaattcgccaggaacatacgggtaatgaccgcctgctttctcgttgcaaatatttgctgctgcttggcgttggtatggtcgcggtcggcgtatttaatctggaactggcaggagcgctgaaaattctttgtctggtggcgctgggattcagtctctacggaacggatatttacgcgacttatagtgatgatgcatga

SEQ ID NO: 374468 - DNA, 303 bp, Salmonella enterica
atgaaacatgccgccttcgctctgacgctgatacctgcaatcgcgttcgcctcatcatggacctcgcctggctttccaacgttctcggcgcaggaaaccggacgctttaccagccagtccgcgttaacaaaaggtacgcgcgctttaacgctacacattgaccagcaatgctggcagcccgccgatgccattaaactcaaccaggtgttgtcgttaaaaccctgcgaaggcgcgccgccgcaatggcgtctatttaaagatggcgacgataccgtgatggtcgtctgggcgggccgcccctaa

SEQ ID NO: 374469 - DNA, 1251 bp, Salmonella enterica
atgacattttcacttttcggcgataaatttacccgccattcaggcattacccgcctgatggaggatctcaacgacggtttacgcacgccaggcgccatcatgcttggcggcggtaacccggcgcacattcctgccatgcaggattatttccagacgctactggcagagatggtagaaagcggcaaagccgctgatgcgctttgtaattatgacggtccacagggaaaaacggcgctactgacagcgctggccgcactgctacgtgaaaaactgggatgggatatcgaaccacagaatattgcgctgacaaatggcagtcagagcgcgtttttctacttgtttaatctcttcgccggacgccgcgccgacggcagtacgaaaaaggtgctattcccgctcgcgccggaatacatcggctatgcggattccggtctggaagacgatctcttcgtctcggcgcgccctaatattgagctgctgccggaaggtcagtttaagtatcacgtcgattttgagcatctgcacatcggtgaagagacagggatgatttgcgtctcgcgcccaaccaatccaacaggtaacgtcatcaccgacgaagagctgatgaagctggacagactggcgaatcagcatcacattccactggtgattgataacgcttacggcgtgccgtttcctggcattatctttagcgaggcgcgcccgctatggaacccaaatattatcctgtgcatgagcctctcgaaactggggctgcctggctctcgctgcggcattatcatcgccaatgataaaacgattaccgccattgccaacatgaacggcattatcagccttgcgcccggcggcataggtccggcgatgatgtgcgaaatgattaagcgtaacgatctgctgcggctgtcggaaacggttatcaaatctttctactatcagcgcgttcaacagacgattgcgatcattcgccgctacttgcccgaagaacgctgcctgattcataaaccggagggcgctatatttttgtggctgtggtttaaagatctgccgattaccaccgagttgctctatcagcgcttaaaagcgcgcggcgtgttgatggtgccgggccactatttctttcccggtctggataaaccctggccgcatactcaccagtgtatgcggatgaactacgtgcctgaaccggacaaaatcgaggcgggggtaaaaattctggcagaagagatagaatgcgcctggcgtgaaggctga

SEQ ID NO: 374470 - DNA, 1152 bp, Salmonella enterica
atggcagcttcaacattttttattccttccgtgaatgtaattggtgccgattcattaaaggacgcaatgaatacgatggcggaatatggttttcgccgtacattaattgtcacggatgccatgctgacaaaattagggatggcgggcgatattcaaaaagcgctacagaaacgtgatatttttagcgtaatttatgatggtacgcagcctaaccctactaccagcaatgtggcggccgggttgaagcttctgaaagaaaatggctgcgacagcgttatctcgctgggcggcggttccccgcacgactgcgcgaaaggtattgcgctggtggcggcaaacggcggcgatattcgcgactacgaaggcgttgaccgctccgcgaaaccgcagttgccgatgattgcgattaacacgaccgccggcaccgcgtctgaaatgacccgtttttgcatcatcaccgacgaagagcggcatattaaaatggccatcgtcgataaacatgttacaccgctactctctgtcaacgactcctctttaatggttggtatgccgaagtccctgacggcggcgaccggtatggatgcgttaacccacgcgattgaagcttatgtttccattgcggcaacgcctattaccgacgcctgtgcactgaaagcggtaacgatgattgcggaaaatctgatcgttgcggttgaagaggggagcaatgtccaggcgcgtgaagcgatggcttatgcgcagttcctggcgggaatggcgtttaacaatgcgtcgttgggctacgttcatgctatggcgcaccagcttggcggtttctacaacctaccgcatggcgtatgtaacgcagttctgctgccgcatgtgcaggtatttaacagccaggtggcggcggctcgcctgcgtgattgcgcagcggcgatgggcgtcgatgtatcaggcatgaacgaagcggagggcgcgcaggcatgtgtggcggccattcgccaactgtcgcagaaagtcaatattccggcaggactgcgtgagctaaacgtgaaggaagaggatatcccggttctggcgaccaatgctctcaaagacgcctgtggcctgacgaacccgattcaggctactcacgatgagattgtggaaatttatcgcgcggcgatgtaa

SEQ ID NO: 374471 - DNA, 381 bp, Salmonella enterica
gtgagtcttcaggataatgactttgctccaaaacctgctggtaaatggtggctggcgggtaaaaaacccgattatcgttttaccctcgccaatgaacgaacgtttttagcctggatccgcacggcgctcgcattaatggcaggggcggtagggatcgaacagttttctccacaactttcctctccttttttaaggcactctctggcgttatgtcttgtcgtcgctggggcggtacttggtgggcaggcgtggcgtcgctggcggcataacgagtatgcgatgcgtcttgaccagcagttgtattacagccgttttatctgtgcgctatccctgtttcttatcatcatggcgctattacttggggtaatgttgtggggctag

SEQ ID NO: 374472 - DNA, 882 bp, Salmonella enterica
atgagtgtgaataaagaaaacgtgcgcgtatatcttgccaatattctcggtagcctgggggaaactgatgcaaaaatcgccggttatatcctgcaacaaccggggctcgtggtgcaatttcctgtcaaaaagttggcacaggaaattggcgtcagcgaggcgaccatcgtgcgtttttgcaagaaagttggctatggtggattgcttaatctgaaagcggatcttaaacgggaactgttggcggaaaatgatttatcgttaccctcttctcctgacatttttcttgatgattcacgtaatgatgtggcgcagaaaattgctctgactattgaaacctcagccagggaaacgatagggctgctggatatgaaaatcgtcaagccagtggtagagcgttttctttccgcccgcagggttatgttcgttgggtttggcgcatcaggattagcggcgctcgaagcccgcgacaaaatgaatcggctgggcattgattcagacgcctttaccgatcgtttcacgatgacgctaaaactcgccaatctgaaaagggatgacctggtcgtagcattttcacactccggagagacgccggaagtagttaacgcgtttcgccttgcgcagaaaaaaggcgcatatacgctggcgatcacacatagtcctcactcaccgcttaatgaacttgccaacactttctggctgaccagcggagaagcaggtcctatgcagggagattctatctcaacgcgtatttctcagctttttattattgagttcttatgtaccgaaattacgcgccacaatctgcgcgacagcggtatgactggcttatcgataaaagaaattttgataaaagaaaggattaaacgtgagtcttcaggataa

SEQ ID NO: 374473 - DNA, 864 bp, Salmonella enterica
atggaatggtatttagaaaatgcccgttttcggatgatggtcagggacatcggcgcggagctgacgctgctttgggacaaacatcgccagcgcaactggatatggcaaccccagcctggggtgtggaataactcggcgacgcagctctttccggtggtagggcaattgattcacggcggattatggcaggatgagcgctttttccctctttccgcgcacggttttctacgccagcaaacgtttcgttgcctggcacatgatgctacacacctgcggcttgaggttagcgataacaatgacacgcgagaggtatggcctttcaaatggcgtattcaacttgactggtcattagaggatgaggggctgaacgtcacctggaaggtgcttaacgaagaccatcaggcatggggttactcgcttggctggcatccgggtttcgcgctgccggtagccagtgaacctggctggcaggtgcgattcaaccatccttgtcaggggccttttcccaccgttaaccgaacgctggagatccccaggacacccgccacgtcgacactttttcagctccagccgcagacgtttgttagtggagcggtctatttagttccaggtgaggagaatcaatgggcggtgtgttcgcccctgggacatgagcagatcgtgttttccgccagctcgccctggcttgcgctgtggggcgtgcctggcgcagatttgctgtgtgtcgaggcgttatccgggacgacggatgatccgcattttgatggacaggtcgcccataaacgcggcattcaatggttgcgttcgggcgagcaacatcgccattggatctctgtcaggttcccggcagacaccgaacaataa

SEQ ID NO: 374474 - DNA, 1728 bp, Salmonella enterica
atgaaagcagttatgttgatgtttgacaccctgacgcgcaatcatcttgccccctatggcggcgatgcaatcacgcctaactttacgcgcctggctcaggagtctgcgcagttcgataatttctatgtcggcagtatgccctgtatgccagcccgccgtgaactgcatacgggacgctacaacttcctgcatcgcagttgggggccgctggagccgtttgacttttccgcgatgcaggcgctgcgtcagcatggcgtgcatacacacatggtgactgaccataagcactactggcgagatggcggggcgacctaccacacgcgctattccacctttgaatttattcgcggtcaggagggcgactgttggaaaggacaggtagagaaaccagtgattcgctggcagggcaatgaagatgaagaaacgctacgccgccgtgctgggcgcatgacccaggatctgatcaatcgagcggccatgccaacccaacaggaacattttactcatcgtacgataagcgccgggatggagttccttcaaaacaactgtgagcaggataactggtttctgcaaattgaatgttttgatccgcatgaacccttttttgtcccggaaaaatatctcacgcaatatggctgtaagccggaagagtttgatggttgggttccttattactgcggtgcgccgggcggtaaggatgatgagaaggtccgcaaattctaccaggccttgatcactatgtgtgatgattaccttggacaggtgatggataagctcaaggcgctcaatttgtgggatgacacgctatttattgtctgtaccgatcacggtttcttattgggcgagcatcactggtggggtaaaaacatcatgccggtgtataacgagatcgccaatacaccgtttttcatccgtgacccgcgatgcaaaatacgcggtgtccgacgtcaggcgttggcgcaaaccgtggatatccccgctactctgatggaatattttgagatacccagaccggcaacaatgaccggacaaccgcttcgctcagccattgagcgtgatgagcctgttcgtgattatgctctgtttggttatttcggtggtcatatcaacatcaccgacggtgagtacgtctatatgcgatgcccgcgtgagcaacataaagcgaatctgtatgaatacacgctgatgccgacgcgcattgacagtccgttcaaaattgatgagctgaaggatatccgcattcaccctggctttgatttcacccaagggacccaagtgatgcaaataccggcgacctttggttatcttaatccgtggcggtttggcgataagcttttcgaccttaagaacgatcccgaacaatgtcacccactcaatgatgaagcgctgtctcatcgctatgccagcgccatgatcccgttgatgcaacagcatgatgcgccgccagagctgtatacccgttttgaactggacccgctatctcctgagcgtgatgcagatttcgcctgccgccagaagcaaaagtgcaacggttatgaatgtgcgcatcccggtgtggctgaggccttgtcttttctgatacgcaatagcgcggcggatgccttcacgctacgccatgataaaccagttgaggaggcggacatctataaacttatagataccttattccatggtgataagcatcgcgcgatggtttaccagacgcgtctgttattacgtactgcctga

SEQ ID NO: 374475 - DNA, 1539 bp, Salmonella enterica
atgagcaggttattttctggagcacagaatctgggtaagtcgtttatgttacctatcgctattctccccgccgccggtttgttactgggattcggtggcgtatttaccaaccccattacggtgtcgacttacccttttttgaacaacgaaatcgttcaggcgatttttaccattatgcgcctgtgcggcagtgtggtttttgacaatttatcactgttgttctcggtgggaattgccgttggcctggcgcgcagcgacaaagggactgccggactggcggccgtgctgtgttttctgatgatgaataaagccatcaacgccttattgcttttgactggcacgctggcgacagagaatttagccgccgtagggcaagccagcgttttgggcattaccacgctgcaaactggtgttctgggtggggtaatgtgtggtttgctgacatcatgggtgcatggtcggtatggtaaaacgcagttgcctaatatgctggcatttttcagcggctcacgctttgtgcctatcatgacctcgtttttcgccatttttcttggcatcgtcttgttttgggtgtggccgcatattcaggctggtatttcttacctcggcattctggtggaaagcacgggttatctcggtacgctgatctacggcataatcctcaagtgtctgatccccctcggccttcatcatctcttctatatgcctttttggttaaccagcgtcggtggtgaagcggtcgtcaatggacacgttgttgaaggcacgcagaaaatcttcttcgctcaattggccgatccttcagtcacgcagtactacatcggcgtttcacgctttatggccgggcgctttgctgactttatgtttggcctgccgggcgccgcgctggctatctatcactgcgcaaaacctgagaacaaaaagaaagtcgccagcctgatgctttctgcggcgttaactgcatttgtaacgggtattaccgaaccgctggagttcgcttttatgttttgtgcgccgctgctgtatgtggtgcatatcgtgttaaccggcttcgcgtttatgttctcgcatattctcgaaattaccgttgggcagaccttctctggcgggctggtggattttctactcttcggcgtactgcaaggtaatgccaaaacaaactggataatgatattcccgctgggtgtggtcatgttctgcgtctactacttcacgttccgttttttgatccagtggcggcagctaaaaacgccaggtcgggaagatgaatctgaagatatcgtcaccgctgacgtgggcagcaatacgcgcgctgcgggcattgttgaggcattaggcggtcgcaataatattgctgatgttgactgctgtgctacgcggttacgtataaccgtcaatacgccggaaaaggttaatctggagcgctttaagtccttggggagtaaaggcgcttttattcgcggtcagggagtacaggttgtgtatggcccacatgtcacgctgattaaaaacgaagttgaagaatttatcggttcataa

SEQ ID NO: 374476 - DNA, 255 bp, Salmonella enterica
atgtcgattgttgcgaccactatgtttaccctgaacatcatccggggagtttacgctgcgaatggcgattcacctgtcatggtggttaccctaagcatcgtatctgtcctgcagctcatcgctggcataacctgttattatgaaggttataaagcgatgttcagtcatatggccccttatatgcgatttatggcggcacaaatacagcgtcaacaaccgcctgccgccatcatggaatttccctcgacactttaa

SEQ ID NO: 374477 - DNA, 1674 bp, Salmonella enterica
atgtctggtaatacaacacgaacgattctccgcaatctgaagttagaacatgattctgcttggcagcaaattcatatgaaatataataaatttgctcctaccattgatactcctttaattattaccgacccctatcggtgcaatatgctttcagctttactttgttttagaacagagagtccagcgcaaattagtattacgataggtattggtgatacacaaacagatatcgcttttgatttttctaagcaaggtcaatggcatctggatcattttatacctgttgcaggtctttatcttgatagcgctaataaggttgatgttacagtaagttatgaagatggtaccgttgaaactaaaaattacactattcaaacacaagctttacctgacgtccctgtattaatgccagcgttaggcaaaatcgaaaatttcgaatatacagaaaaatttgatcttatggcagaaggacttacgtttatggccccgcagtccgcctatatttttggtgtagacagtaaacgtaacgtacgctggattttacagggggactatgttaattctgaatggtcggatattgagcgtctagcaaacggtaattttcttatcagtttcggtttttatgaacttcgtgaagtagatatactgggacgatgcctgaagcaaactattttaacttcccgtatgcatcatgattggttcgaactcgataacggtcaattactaattactaccgaggatgattctcatcctgataactttgtcatggatgtgtcggaagttatcaattatcccgaatcttcagatactgtttatcagttaagaatgcgtgaagtgctggatactacacgcgtggctattcctaatgtgaatgcacaaagtgataatgacgataaagattggtttcataataaccgttctgtttatgacgtaagaaaccagagctttattgtttcagggcgtcatcaggatgctataatttcttttatccagacagccgcagaactcgatcatacattagagttagatgatattaactggattatgggtcctcatgataattgggtcgaggcttaccagagtaaattgctaacacctattgatgagaatggaaacattattgatgatactactgctaatctggagttttggaactgggggcagcattctgtttcaatccccgccgatcagccggaagatgataaccttgcagattatatcatttttaataatggtaactatcgcagttatgatcagacactggctgttccggcttcctcaaattattcacagtgctcacgttatcgcattaatcgtagcactatgacgattcagaaagtttggacgtttggacaagaactcggaagcggacactatggttcattcgttggtagcgtgcgcgatcatgatactacctatatcgtcaatgcggggggaatttgcctgaatggtgaaggcatcaacgtgggtacacattatggcgatcctgataatgagcttatccttaatgatatttatcctcacgcttgtgtttatgaagttctgaaagaaacaaaagagattatttggggaatggaattttcttgggagttaactccttattttgtttacttcaattttaaagcaacccgtgccccaatgtatcctgaaaacataaatatttattctgcttaa

SEQ ID NO: 374478 - DNA, 1656 bp, Salmonella enterica
atgaatctctggcaacaaaactatgacccggcgggtaatatctggctttccagcctggtagcatcgctcccgatcctgtttttctttttcgccctgattaagctcaagctaaaaggctatgttgccgcctcgtggacggtggttatcgcactcgccgtcgcgctgctgttctataaaatgccggtggatcacgcgctggcatcggtcgtgtatggcttcttctacgggctatggccgattgcctggatcattatcgccgcagtcttcgtctataaaatttcggtaaagaccgggcagtttgacattatccgctcgtcaattctgtcggtgacgcccgatcaacgcctgcaaatgctgattgtcggcttctgctttggcgcgttccttgaaggcgcggcgggtttcggcgcgccggtggcgattaccgccgcgctgctggtagggcttggctttaacccgctatatgcggcaggactgtgcctgattgtaaacacggcgccggtcgcatttggcgcaatgggaatcccgattctggttgccggacaggtcaccggcctggacagctttgaaatcggtcagatggtcggtcgtcagctaccgttcctgaccattatcgtcctgttctggattatggcgattatggacggctggcgcggcgtgaaagaaacctggcctgcggtgatggtctctggcggttcatttgctatcgcccagtatctcagctccaactttatcgggccggaactgccggacattatctcttcgctggtctctctggtgtgtctgacgctgttcctcaaacgttggcagccggtgcgcatcttccgcttcggcgatatgggtgcgtcgcaggtcgatcagacgctggcccgcacccgctatacgaaggggcaaattgttcacgcgtggtcgccgttcctgttcctgaccgccacggtcactctctggagcgtaccgccgttcaaagcgctgtttgcccccggcggcgcgctgtatgactgggtaattaacgttccggtaccgtatctcgataaactggtcgcccgtatgccgccggtcgtacacgaagcgaccgcttacgctgcggtgtataaatttgactggttctccgccaccggcactgcgatcctgtttgccgcgctgttgtctatcgtctggctgaaaatgaaaccctcagccgcaatccagacctttggcagcacgctgaaagagctggcgttgccgatttactccatcggcatggtgctggcgttcgcctttatctcgaactattccgggctttcttctacgttggcgttagcgctggcgcacaccggcggcgccttcacgttcttctcgccgttcctcggctggctgggcgttttcctgaccggctcggatacctcgtctaacgcgctgtttgcctccctacaggctaccgctgcgcagcaaatcggcgtctctgatgtgctgatggtggcggcgaataccactggcggcgtaaccgggaagatgatctcgccgcagtctatcgctatcgcctgcgcggcggtgggactggtagggaaagagtccgatctgttccgttttaccgtcaaacacagcctgatcttcacctgtatggtaggcgtgatcaccacgcttcaggcctatgttttaacctggatggttccgtga

SEQ ID NO: 374479 - DNA, 450 bp, Salmonella enterica
atgaaaaaaccaacgcttgttattggcgtcattggcgctgactgtcatgcagtaggcaataaagttttagatcgtgtttttactgcccataattttcgcgtaatcaatctgggggtaatggtcagtcaggatgaatatattgacgccgccattgagaccggcgccgatgcgatagtcgtttcatcgatttacggacatggcgatatcgactgcctcggactacgcgagcgctgcattgaacgaggcatcggcgacatcctcctttatgttggcggcaatctggtcgtcggcaagcatgactttgccggagtagaagccaaatttaaagagatgggctttcaccgtgtcttcgcgccaagtcacgatcttgaagacgtttgtcagttgatggcgaacgatatcaaccagcgccacggcgtggagcagcattgtcttgaagaggctatgtga

SEQ ID NO: 374480 - DNA, 1389 bp, Salmonella enterica
atgcaaatagtttctgtcgatatcggctcaacatggaccaaggccgccctcttctccctggagggggacgcattaacattggttaatcacgcgctgacgccaacaacgacacatcacctggcggacggattttttgccagtctgaaccaggtattacatgtcgccgacgcgcgtcctcttttgcaacacggtgacatacaactcaaatattcttcttccgcgaaaggggggttggccgtcgccgcaatgggactggtgccttccatcaccctggaatcggcaaaaattaccgctcattccgcaggcgcgaaaatcgcccagtattatgcctataaactcaaccgacatgatatcgccgaactggaagcctcaccgccggatattttgctgtttaccggcggtaccgacggcggcgaagagagctacggtctggctaacgcccgcgcgctggcggagtcaacgctggactgcgccattatttacgctggcaaccgcgatattcaggacgaggtacagagaattctcggccataaagatctcatcacagtggacaatattctgcccgctctcgatcaccccaatccctacgccgctcgtcaggccatttgcgatgtcttcctgtcgcgcatcgtaaaaggtaaaggtcttgacgttatcgtcagtgaaaccggcgaagaaccgatgccgacgccgtggacggtttatgaactggtgaaggcgataagcaatatcgataacgcgtggaaagagttcatgctcattgatatgggcggcgccaccaccgatgtctattccgcctgcgccaatacactctcgcccgatacggtattacacggcgtgccggaaccgttcgtcaaacgtacagttgaaggcgacctgggaatgcgcgtctcggccatggtcgtgggagaaagcaccgaagagctggtgaaagtcgtgttcgctcaacacccggaacgtcagcaggctttttatcgctatctgcaccatctgacggcacagccggattatctgccgagcaatgaagaagagagatatttcgacaccgtactcgctggtttgtgcgtcggctatgccacggagcgccatgccgggacgaaaaaacaggtctgtacctgcgtcggtaatgtcgatttgcagatgggacgcgatctgaccaccgtgcgcaaagtggtgggttcagggggatggctctcccgcgccagacagttcgatatttacaactggctcaaataccgggaactcaatgacgacggcaaaagcattctcctcccgaaccagtttgactattaccgggattcgaagggcctgcttcctctgctggcgaatgtcgccagactctatccgcagctcgctgcgcgcaccagcattcaatgtttaacctgttaa

SEQ ID NO: 374481 - DNA, 1446 bp, Salmonella enterica
atggaactccgaaataagaagttaacccatgatgaattcatgaccgaacggcatcaggtgttgcagacctggcataccggtaaagaggttgaaaagtttgaagaaggcgtgaagtatcaacacaccattcccgagcaaaaacgtttctcgcaagccttgctaaaggccgacagggaaggcagaacgttgagccaaccgcgcgcgggcgtagcgctaatggatgaacatattgcgctgcttaaaacattgcaggaagagtgcgatctcctgcccagcaccattgacgcctatacccgtctgaaccgctacgaagaagcagcggtcggcattcagaaatctatcgaggcgggaacctccagactgaacggcttacccgtggttaaccacggcgtggcggcctgccgccggatgaccgaagcgctggaaaaaccgattcaggttcgtcacggtacgccggatgcgcgcctgctggcggaaatcgccatggccagcggcttcaccagctacgaagggggcggcatctcctacaacatcccttatgccaaacgcgtaacgctggaaaaatcgatccgcgactggcagtactgcgaccgcctgatgggcatgtatgaagaacacggcattcgtattaaccgcgaaccgttcggcccgttaaccggtacattaattccgccgtttatgtcgcacgcggtggccattatcgaaggtcttctggcgctggagcagggcgtgaaatcgatcaccgtcggctacggccaggtgggctgtctgacccaggacatcgcggcgatccagtcactgcgtgaactgtcgcatgagtatttccagaattatggttttgacgattacgagctgagcactgtattccaccagtggatgggcggcttcccggaagatgaatccaaagccttcgccgtcatctcctggggcgcggcggtcgcagggatgtcaggcgccaccaaagtcatcaccaagagtccgcacgaagcgttcggtattccaaccgctgccgcaaacgcgcaggggctaaaagcctcacgccagatgctcaatatggtgagtgaccagaaattcccgtcctgtccggcggtcgaccaggaagtggagctgattaagagcgaagttcgcgctgtgctgaagaaagtcttcgaactcggtaacggcgatgtggcgcgcgggacggtgctggcctttgaagcgggcgttctggatgtcccttttgcgcccgccgcctgtaacgccggcaaaatcttgcccgtgcgcgacaacaccggcgcgattcgcgtactggaagcaggcgcggttccgttgccgcaggacattctcgccctgcaccacgattacgtcgccgaacgcgcgcatgttgaaggacgcaaaccctcattccagatggttgttgatgacatcaacgcggtatcccacagtaaattaataggaagaccataa

SEQ ID NO: 374482 - DNA, 1242 bp, Salmonella enterica
atgaaaattaaacaggcccttttcaccgccggctactcctcattctattttgacgatcagcaggcgattaaaaacggcgcgggtcacgatggatttatctataccggcgcgccggtaacccctggctttacctcggtacgtcaggcgggcgaatgcgtttcggtacagctcattctggaaaacggcgcagtagcggtcggtgactgcgccgccgtccagtactccggcgcgggcggccgtgacccgctgttcctggcagagcactttatcccgtttctgaacaatcatattaaaccgctactggaaggccgagatgtcgatacgtttctacctaatgcccgcttcttcgacaagctgcgtattgacggcaacctgctgcataccgccgtccgttacggtctgtcgcaagcgctgctcgatgctaccgcgctggcgacaggtcgcctgaaaacagaagtggtgtacgacgaatggcaactgccgtgcgtaccggaagccattccgttatttggccagagcggcgacgatcgctacatcgccgtcgataagatgatccttaaaggcgtcgatgttctgcctcacgcgctgatcaacaatgtcgaagaaaagctcggtttccagggtgagaaactgcgcgaatatgtgcgctggttgtctgaccgtattttacgcctgcgtaccagccctcgctatcacccgacgctgcatatcgacgtctacggcactatcggtttgatcttcgatatggacccgctgcgctgcgctgaatatatcgccagcctggaaaaagaggcgcagggtctaccgctgtacatcgagggtccagtcgacgccggcaacaaaccggatcaaattcgcctgctgaccgccatcaccaaagaactgacccgccttggctccggcgtgaagattgtcgctgacgaatggtgtaacacttatcaggatattgttgatttcaccgatgccggtagctgccacatggtgcagatcaaaacgccggacctcggcggcatccacaacatcgttgacgcggtgttgtactgcaacaaacacggtatggaagcctaccagggcggtacctgtaacgaaaccgagattagcgcccgtacttgcgtacatgtcgcgctggccgcacgtccgatgcggatgctggtgaaaccgggaatgggtttcgatgaaggtctcaacatcgtgtttaacgaaatgaatcgcaccatcgcgttgctacaggctaaggattaa

SEQ ID NO: 374483 - DNA, 1371 bp, Salmonella enterica
atgggacgtaagtttaagatcttatcgccgaccgctattctgggttatggttttccggaagagagctttcgtaaagcgatggaggaatcgccggatctgattgccgtcgatgcagggtcctccgatcccggcccccactatctgggggcaggtaaaccctttaccgatcgggccggggtaaaacgcgatctgcgctatatgattaccgctggcgttaagcgcaacatcccggtggtgatcggcaccgccggaggttccggcgccgcaccgcatctggaatggtgccgccagataatccttgagattgcgcaggaggagaatctcgctttctcactggcgctgatcccctctgatgtggataaagcgatcgtccaccaggcgctggataacggcaaaattaccgccctggagttcgtgcaggaactaacccacgacacaattgaagagagcacttatatcgtcgcgcaaatggggatcgagcctttccagcgggcgctgaaagcgggcgcgcaggtggtgctgggcggacgcgcctacgatccggcctgctttgcggcgttgccgattatgcaaggctttgatgaaggactggcgctgcactgcggcaagattctggagtgcgcggcgattgccgccacgccagggtccggttccgactgcgcgatgggaatcattgacgacaacggctttacgctgaaaaccttcaatccacagcgtaaattcaccgaaacatccgccgcagcgcacaccctgtatgagaaatccgatccgtactttctgccagggccgggcggcgtgctaaacctgaaagagtgccgctttaaagccgttaacgacggagaagtgtacgtcagcggctcccgtcatgaagcgacgccatacgcgctgaaactggaaggcgcgcgtcaggtcggcttccgctgtctgaccattgccgggacgcgagacccgatcatgattgccggaattgacgccatccttgaagacgtgaaggccagcgtggcgcgtaatctctctcttaaagatgacagtatccgcatgaccttccatctgtatgggaaaaacggcgtcatgggcaaccatgagccgatgcaaaccgccggacatgagttggggatcctgctggatgtggtcgccccaactcaggatattgctaacagcgtctgttcgctggtgcgctctaccctgctgcactacggttatgaaaaccggattgccactgcaggaaatctcgccttccccttttcgccatcggatatccagagcggcccggtatatgagttttccatttaccacctgattgaagccagcgatgccctgcgttttgatttccaccttgaacaggtaacaccgcaaggagttcagtcatga

SEQ ID NO: 374484 - DNA, 318 bp, Salmonella enterica
atgaaacaatctatttgctcgctgacgcaggtcatccgttccaaaaacgctggcccctacgaactggtattagatattttatttaaaacccaagaggattatcagcgcgtcaaagtctcggaacagttaacgccgcaacttatcgccagtttatataacgtcaatcctgattttatacatcgtattatctggtttgatccggcgaatgcggtaaaaattgtcatgccacgggatattatttccggcaacgtgggcgacaacgatgtttatggcgcgcaacaacatgcgcccctactcgctatttcgttagatctgtag

SEQ ID NO: 374485 - DNA, 1308 bp, Salmonella enterica
atgaagaaaataagcttaacaaaaatgatcatcttaggattgattctcggtatgattgccggagtgatcattaataatacaacctcaactgaaacagcgaaaatatatgctcaggaaatctctattttcaccaccatattcttacgtctggtgaaaatgattatcgccccgttggttatttctaccctggtcgtcggtattgcgaaaatgggcgatgccaaaacactggggcgtattttttctaaaacttttttcctgtttatttgcgcctcgctgttatctattgcccttggtctggtggtagttaatttattcgaaccgggcgtcggcattaactttgtgccacacgatgcaggcgccgttgcgaccgttcagtcagagcccttcactctgaaggtgtttatttctcatgccgtgccgaccagtatcgtagatgcgatggcgcgtaatgaaatcctgcaaatcgtggtgttctccattttcctcggttgcagcctggcggcaattggcgaaaaagcagaaccgatcgttaaagtcttcgactcactggtctacgtaatgctgaaactgaccggctacgtgatgttgtttgcaccgttaaccgtcttcgctgcgatttccggcctgattgccgaacgtgggctgggcgtgatggtcagcgccgggatctttatgggcgaattctatctgacactgagtatgctctgggccatcctgattgggttatcagctctgattgtcggcccatgtatcagtcggctaaccagaatgattttcgagccggcgctgttagcctttaccacctccagctctgaagccgcctttcccggtacgttgaataaactggagaaatttggcgtctcgccaaaaatcgccagttttgtcttgccgattggttactccttcaatctggtcggttcgatggcctactgttcgtttgccacggtgtttattgcccaagcctgtaacgttcatctcagtatgggcgagcaaattaccatgctactgatcctgatgttgacctccaaagggatggcgggcgtgccgcgtgcatccatggtggttatcgccgccacgcttaaccagttcaatatcccggaagctggcctgattctactaatgggcgtcgatccgttcctcgatatgggccgttccgctactaacgtcatgagtaatgcgatgggcgcggcgattgtcagccgttgggaaggcgaacacttcggcgcaggctgtcggggcgtcgcgccgatcaacacgccggagcagaaaggctctgcctccgaaaactcagaagtggcgatgtcctga

SEQ ID NO: 374486 - DNA, 1653 bp, Salmonella enterica
atgtcaaaaccatttgtctggcagcaactttttgttcagagtaaagataatacagaatatgaattactaactaatcaacacgttacggtaagtgagttagatggagaggaggtgatcaaagtcgcgccggaagccttaaccctgttggcgcagcacgccttttacgaagcctccttctttttgcgtgccgctcacctgcaacaaattgccaacattctgcacgatccgcaggccagccataatgatcagtacgtcgctctgcaactcttacgtaacgccgaagtgtcggccaaaggcgttctgccaaattgtcaggataccggcaccgccacgattgtagcgagcaaaggacaacatatctggacgggcggcgatgatgccgaagcgctaagtaaaggcgtatatctcacctttcaggaaaataatctgcgttattctcaaaatgcgcccctggatatgtataccgaggtcaatacccagaccaatctgcccgctcaaatagacattagcgccgcgccgggcagcgaataccgcttcctgtttgtcaataaaggcggcggctccgctaataaagccgcactatttcaggagacaaaatctatcctgcaaccagaaaaactcaccgcgttcctggtagaaaaaatgaaaatgctgggaaccgccgcctgtccgccttatcacatcgcttttgttgtgggcggcttgtccgccgaccaggcgctgaaaacagcgaaactggcttcaaccaaatattacgataacttacctgaccatgggaatgaactgggccaggcgttccgcgatactgcgcttgaaaaggccctgctcaataccagccgcgaatttggcattggcgcgcagtttggtggtaaatatttcgcccacgatatccgcgtaattcgcctgcctcgccacggcggctcctgccccatcgcaatggcgctctcctgttccgccgaccgtaatatcaaagcgaaaatcaataaacacggtatctggctggaaaaacttgagcgccatccgggaaaatttatccccgaatcctgtcgcgtggaacacagcgcccaaagcgttcagctcgatctgaatcgcccgctatacgatatccggcgcgatctcgccgcgctaccggtgggcacgcggctgtcgctcagcggcccgattgtggtcgcccgcgacattgtccatgccaggatcaaagcgcgaatggataacggagaacccatgccggactatatgaaaaaccacattgtttattacgcgggtccggccaaaacgccagacaatcaggcctgtggttcgctcggtcccacgactggcggacgcatggatagctatgtggacgcattccaggctgcgggcggcagtttaattatgctctcgaaaggcaaccgcagccaacaggtgacagaggcttgccgcaaatatggcggctttagcctcggcagtatcggcggcgcagcggccctgctggcgcaacagtatgtgaaaaacctgcgctgcctcgaataccccgaactgggaatggaagccgtctggatgatggaagtcgaaggtctgcccgcctttttgctggtggacgacaaaggcaataacttcttcagccagtttgaacaacagcatcgctgtgcctcctgtccggcgggccagtaa

SEQ ID NO: 374487 - DNA, 603 bp, Salmonella enterica
atggaagcgcgagacaataccgaacgccatcgtcaacgacagcagaaattaaaaacacaggtggatagccgtatagcggcggcgacggttaaaaaaggggttctgatcgtctttaccggcaacggcaaaggtaagtctaccgctgcctttggcaccgtgacgcgcgccgtcggccatcgtaaaaccgttggcgtcgcgcagttcatcaaaggtcagtgggataacggcgaatacaacgtgctgcatccgcttggcgtggaattccatattatgggaaccggttttacctgggagacgcaagatcgcgaagcggacaaagaggcggcagaagcggtttggctggagagtaagcggatgctggccgatccgcgctacgatcttgtggtgctggatgagcttacctggatgctggcttatcactatctggagacgcaagaggtggtcgaggcaattatcagccgcccgctggagcagaacgtgatcgttaccggacgcggatgtcacgcccggctgctggaactcgccgatacggtcagcgaaatccgcccggtgaaacacgcttttgacagtgggatccaggcgcaggccggtattgactggtag

SEQ ID NO: 374488 - DNA, 906 bp, Salmonella enterica
atgagaggaaaaatacccaagaccgaattgttggtaaccttcgaagtagtcgcgcgtcacgaaagttatacccgagcagccgaggaactggcgctaacgcaaagtgcggtgttcagacaagtgaatgcgctggaagagtttttacatacctcattatttaatcatgccaaaaaaaggattttcttaaatgctgccggaaaatattacctgagcattgttaaagaaacgcttaacaaactggagcgagatactaactcaattatgacctggcagcccaccgttcaggttattgaactggctgtaaacccgacctttagtactcactggttaatcccgaacttacgtgaatttaataaattaaacccagatattattattaatattcattctctggccaatattggcgattttcttaaccgggagtacgacgccgccattatgcgggaggacttctgttctccgtggtcagaaagagaatatttattcgaagaagagatcttaccggtatgcagcgggagcttactgtctcagccgcaacaaaaactggcggtggatgaactgttgaacgaatttacgctattgcatcaaagcacgcgcatcaatggctggcaggagtggttcgcgctttcaggcatcagcagcccacaggtcaataacggaccgcgctttgatttgttgtcgatgctgatcgccgcagtgcgctctaatctgggcgtggcgctattgccccggtttgccattcagcacgatctggataatggcgacatggtgatcccgtgtgatgttccgatacgtaccgggaatcgttttatcatgacctggcgcgaagataaaacagagtcttgtcatttacggatcttccgcgagtggttattgcaaaagtcggttgtttcccgggagaactga

SEQ ID NO: 374489 - DNA, 879 bp, Salmonella enterica
atgtcaccgccatgtcgtcagaaacgctatttactacgttttcataccctcgccaggctttttaccgctgcgactgaatttaccacgttcatcgttgatattaatggaaatgcagggacagaaaatgtcgcctgtaatccattttgtactctgatgcgcgcccataattattacgcgaaatattgcccgcaatgcgacagatattgcgcctggcacgctttatctgcgtcaaaaccgcagatcctaaactgttatgctgggttaagttttttctctgtcccgctagtggagaatcaacaggtttgtggttttattgtttgtggtaaggtacgggtaaaaaatcaggaatataaagcgattgatttgatgaatattgaaccatgggagaatgatactgcattaagaaaagcatggtggagtctaaaggtcattgataataaccgtttggcggcggcagtaaatttactcagttttatggttaactcttttacatcaaatacagatactattttagtggaaaacctgttgacctcatcggagacggattattctctttcccgccatgaaaaaaaacgtattgcagtattacgctatattgaggctaacctctatagcaaactgacgcttgactctgtggccgcgcatgtttgcctgagcgcgaactattttagccgtttctttaaaaaacggcagggcataaattttaaaacctgggttaatcaaagaagaatgcaccgcgccggtgagttactgcgtaataccgatcagacaatcgatcatatcgccagaaagttgcaatatgcgcaaaccagttacttttgccgtgtttttcatgccacctatcacatgtctcctcagatgtatcgccgacacagatag

SEQ ID NO: 374490 - DNA, 933 bp, Salmonella enterica
atgctgaatattattcgcgcggggatttacacctctgtgcaggacagcggacgccacggttttcgtcaggcaggactgagccactgcggcgcgctggataagcccgcctttcagactgctaatctcctggtcgggaacgacgcgaatgccccggggctggaaatcaccctcggacaactggtcgtcgaatttgaaaacgagagttggttcgctctcaccggcgcgggctgcgaggcacaattggataatcaacctgtctggacaggctggcgattgccggtaaaagcgggccagcgcctcacgctgcatcgtccgcttcacgggatgcgtagctatctggcggtggcgggcggtattgctgtgccggaggtgatgggatcgtgtagcaccgatctgaagtctggtatcggtgggctggaagggcggttgctaaaagatggcgatcggctggcgacgggcaacccatcgcgacattttagcgggccgcagggcgtgaagcagttactgtgggggaatcgcatccgcgctttgccggggccggaataccgtgagttcgatcgcgcatcgcaagaagcattctggcgttcgccgtggcaactcagtccgcaaagtaatcgcatgggctatcgtttgcaggggcaatcattaaagcggacaacggatcgcgagctgctgtctcacggtttgctgcccggtgtcgtgcaggtgccttccaacggtcagcctattgtgctgatgaatgatgcccagacaactggcggctatccgcgtattgcctgcatcattgaggcggatatgtaccatctggcgcaagtcccgctggggcaaccgatccattttgtgcaatgttcgctggaagaggcgctcaacgcgcgccgcgagcgtcagcgctatctggaacagctaacctggcgactccagcatgaaaattga

SEQ ID NO: 374491 - DNA, 525 bp, Salmonella enterica
atgataaaaatacaatccggagtgacgaccatactgatgttgacgcttttgctgtgcgcagaaatacccgttcatgcggcggataaaaagctaacctcgctacttgccccctatgatgagtggtatttcaatttcctttatccaaatgcgttgccagcagatgtgacctatgtggaattgctggacacggatggaatactgtatcggtacaggatgctggatagcacgatacccagctcaacaacggttgcggaatgggaggatgaccttagcgttgggatggcgtcattcaataaggccaaaaatcctccccaggctatgcatttctgctgggattcgataattgataaaaaagtgtatgagacgtggataacgtttggttatccggtttgggaaatgatgctgaccccttactcgtcgccatgggatgccagcgtgcaggagtaccaccgttatctggtaattggtctggcgccggaaggcagagtgcgtgtctggctggtaaaaagcccaatacgcgattaa

SEQ ID NO: 374492 - DNA, 663 bp, Salmonella enterica
atgacgcgtaatttcaggttgttactgctgggcggtttgctggggctgtcgatgaccgcaaccagtaaagagttaacctcgctacttgccccctatgatgagtggtatttcaattttttctatccaaatgcgttgccagcagatgtgacctatgtggaattgctggacacggatgggatactgtatcggtacaggatgctggatagcacgatacccagctcaacaacggttgcggaatgggaggatgaccttagcgttgggatggcgtcattcaataaggccaaaaatcctccccaggctatgcatttctgctgggattcaataattgataaaaaagtgtatgagacgtggataacgtttggttatccggtctgggaaatgatgctgaccccttacccgtcgccatgggatgccagcatacaggagtaccgccgttatttgctaatcggtctggcgccggaaggcagggtgcgagtctggctggagaacactaaaaagcccaatacgcgattaacggaggataaagatattctggtcgagacggtatccggtgaaaaactggcgatgtgcaagggggtaaccagatttagccgtggatataaatatataaaagaaaccgaagattttatcaaagataaaaaatatccttacggaaactggtaa

SEQ ID NO: 374493 - DNA, 1092 bp, Salmonella enterica
atggtccaactgcgcaggatactgacggaagtggttggcgctcttcagggcaaagatattatgatcgcgggtttgcagtttgatgtctttgggttcagccgcggcgccgcagccgcccgccactttaccaaccgcgtctttgagcaagatcctgtgctggtcaggacgatcgcgaccgcttttcagcccgttgaataccggggaaaaccggcaggtgaggtgcaatttttaggccttttcgacaccgtcaccgccgtagggggaatgctggacggtcttgacccccatgacggtaataatctggcggttaaaataggtttaccgccgggggtggcaaaacaggtttttcacctgacggcgatgcacgagtgccgttataacttttgccttaatagcgtaaaagagcaatggcctgaattaagcttaccgggggcacatgccgatattggcgggggatataacccgcaggaagaggaatatctttttttgagtcggcccgctgttgaaaccgtattagccgacgtgccgacagaggcgaccggcgtctatcagaaggcggtcctgcaggcagaaactttgccgcattactttgcgctggcccccatgttgccgtcaggcgttatgaaggtcgagaccaatacggatgaaagggtatcgccggatcaccttggcaatgcgaaaaagcgcgtagccgctgcggtcaccttccagcgaatcgtcagcaatgactggtctaaagttgccctcagggtgatgtatgaggtcgccaaagaggctggcgttgtgtttgatgctatgcaggagaataatgattattcctggccgacggaactggatgcgatatgccagaaagccttatcacaagcaaaaaatgcctttaatggggccaattcgcttcagttttcttcagatgagttgaacactatcggcaagtatattcactgttcggccaactggaatgccgttgactatcacctgaaaaataatatttcatctgcagtctcgtcttccaagacatttagttttgttaaccggccggatgaaaactggacccggaccgtttatgacatggcagggaatcctcaaaaatga

SEQ ID NO: 374494 - DNA, 927 bp, Salmonella enterica
atgagcgatattatttatttaaaaatagtcggcgaacgtcaggggatcatatccgaaggctgcggcagtgaaccctctgtcggcaatcgttaccagactggacatgaaaatgaaatttttgtttttagcctgcaggcactggtcagcagtactgtggacggcgtcaaccatcatgggattcgcttttgtaagctgattgataaaagctcgccgctgtttacccaggcgataaataacaatgagtgttgctctctggattttagcttttatcgtattaaccgctggggaaggtgggagaaatattatcatattgaggttcgcggagcgggtattacagcatactcaatgcattcccgaacagagggaatgcctgaagaatttatcacaatacattatgattatatccgctcaaaacatctgatagctaatacggaatacagtgtcctgttaacgccagaaaactacaatcgactctttccggcaacccttcccgtggttgaacgacctgatatccctgcaaaaaaaagagaaattgtcttaaccattggcgtcttctttgacggtacggggaacaacctgctcaacacgaatttacggatgcagaaatgcaacccagaaaactatgggcttgatgtgcggacgttaacggagtttaaccagagttgcataaagaaagcggggtttgacggaacggaagcaggcagttatctgaattattatacgaatatttactggttgaataagttgtatcatatagatgtaaaaatagatgatgaattagtgcatattcagaaaaaatctatatcgaaggtattggcaccgagaataacaaagccgattctctgtgggggatggggctgggaaataacgataccggggttatcgccaaaaccgatcgcgcgatggtccaactgcgcaggatactga

SEQ ID NO: 374495 - DNA, 1680 bp, Salmonella enterica
atggccgcgcaaggatctttactgatcgccagttttttactgattttattggtactggcgaaaccgttgggttcgggcctggcaaggctcatcgccgcctctccgttgccgggcgtggctggcgttgaacgcgtcctttggcgcacgcttggcattaccggccacgagatgaactggcgtcagtatttactggcgctactgacgctcaatctgctggggctgagcatcctgttttgcctgctattctggcaggagtggctgcccttaaatccgcagcggctaccggggctttcctgggatctggcgctgaataccgccgtcagctttgttaccaataccaactggcaagcctacagcggcgaaagtacgctaagttactttagccagatggcggggctgacggtgcaaaatttcctgtcggcggcgaccgggattgcggtggtttttgcgcttatccgcgcctttacgcgacagaatatgcacacgctgggtaatgcctggcaagatctggtacgcattacactgtggatattatttcctgtcgcgttaatcatcgcgctgttttttatccaacaaggcgtactgcaaaacctgtccgcttatcagcccatcaccacccttgaaggcgctcaacaactcttgccgatgggaccggttgcctcgcaggaggcgatcaaaatgcttggcaccaacggcggcggtttctttaacgccaactcttcgcatccgttcgaaaaccccaccgcgcttactaatatggtgcagatgctggcgatatttttgattccagccgcgctctgtttcgcctttggcgaagcggcgggcgatcgccgtcagggacgcgcgctgttgtgggcaatgtcatttatttttgttgtctgtgtggcggtggtgatgtgggcggaagttcagggaaatccgcacctgttgactgcgggcgcggacagcagcgtcaacatggaaggtaaagaaacacgctttggcgtgctggcgagcagcctgtttgccgtcgtcacgaccgcggcgtcctgcggggcggtagacgctatgcacgactcgtttaccgcactgggcgggatggtgccgatgtggctgatgcaaattggcgaagtagttttcggcggcgtcggttcaggtctgtacggcatgttgctgtttgtcctgctggcggtgtttatcgctgggctgatgatcggccgcacgccggagtatctggggaaaaaaatcgacgtgcgcgaaatgaagatgaccgcgctggcgattctggtcacgccgatgctggtcttgttgggttcggcgctggcgatgatgacggatgccggacgcagcgcaatgctgaaccctggcccgcacggttttagcgaagtgctatatgccgtctcctctgccgccaataacaacggtagcgcctttgcgggtctgagcgctaactcgcctttctggaactgtctgctggcgttctgcatgttcgtcggacgttttggcgtgattattcctgtcatggccatcgccggatcgctggtcagcaaaaaagcccagccggctagtcagggaacgctggcgacccacggcgcgctatttattggactgctcatcggcacggtactgctggtcggcgcgctgacgtttattcctgccctggcgcttggcccggtagcggaacatttctctttaccttga

SEQ ID NO: 374496 - DNA, 1212 bp, Salmonella enterica
atgaagaccattttttccgctcgtttcatgcagcgcatggcgctcaccacggcgctttgtgccgcgtttatctcaaccgcacatgccgatgacctgaatatcaaaactatgatcccaggtgttccgcagatcgatgcggaatcctacatcctgatcgactacaactccggcaaagttctggcggaacaaaatgccgacgaacgccgcgacccggccagtctgacaaagatgatgaccagttacgtcatcggacaggcaatgaaagcgggtaaatttaaagaaaccgacttggttaccgtcggtaatgacgcctgggctactggtaatccagtatttaaaggctcctcgctgatgttcctcaagccaggaatgcaggtgccggtctcccagctaatacgcggcattaatctgcaatccggcaatgacgcctgtgttgcgatggccgatttcgccgccggcagccaggatgctttcgtcgggctgatgaacagctatgtgaacgcgctggggctgaaaaatactcacttccagaccgtacacggcctggacgccgacggacaatacagttcagctcgcgatatggcgctgattggccaggcgttaattcgcgatgtgcctaacgaatatgccgtttataaagagaaagagttcacctttaacggcattcgccagttaaaccgtaacggtctgctgtgggataacagtctgaatgtggatggcatcaaaaccggtcataccagcaaagcaggctataatctggtcgcttccgcaacggaaggccagatgcggttgatctccgccgtgatgggcggacgtacctataaaggccgtgaaacggaaagtaaaaaactgctgacgtggggcttccgtttctttgaaaccgttaatccgctgaaagccggtaaagagttcgcctctgaacccgcctggtttggtaataccgatcgcgcctcgctgggcgtagataaagacgtttacctgacgattcctcgcggccgtatgaaagatctgaaagcaagttatgtactgaataccgcggaactgcacgcccctctgcagaaaaaccaggtggtcggcaccatcaacttccagttagacggaaaaaccattgagcagcgtccgctggtcgtactgcaagagatcccggaggggaacttcttcggtaaaatcattgattacattaaattaatgttccatcactggtttggataa

SEQ ID NO: 374497 - DNA, 135 bp, Salmonella enterica
atgggcaaacagcacaaaacaacaactattttacattttgccgggctgtcaggctgctttatggcccttatcaatgatatactgcgtgtcacaaattcaaaaatagttgataaatacaactttcccttgaattga

SEQ ID NO: 374498 - DNA, 654 bp, Salmonella enterica
ttgaaagagatcatgctgacatcccatttttcccttccctttgccgaacacacgctgcatatcatcgactttgatgcgagtagctttcatgaaaacgacctgttatggcttcctcatcacgaacggctccggtctgccggacgcaagcgtaaagctgaacacttagcaggccgcatcgccgctgttcatgcgttgtgcgggataggtatcaggacggtgcccggtattggcgataagcgacagccgctatggccggacggcgtatttggcagtatcagtcactgcgcatcaacggcactggcagtcatctcccggcaacgcgtcggcgttgatatagaaaaaatcatgagccagcaaacggcgacagatctggcgccggccattattgataacgatgagcgccaaattctcaaggcaagctcgctaccttttccgctggccctgacgctggccttttccgccaaagagagcgtttataaagcgttttcaggcaacgccacgctaccggggttcgatagcgcaaaaataacatcgcttaccgccacgcaaatctcgttaaatctcctgccagcctttgccgccacgacgactgaacgtgatgtccggataaggtggtttcaacgtgataatcgcgttattaccctttgctcctga

SEQ ID NO: 374499 - DNA, 930 bp, Salmonella enterica
atgaaagcgaagttgttagttacttctggaacagcagcctgtctggggatcattgctgcacttctgcccgtctgtgtacacgctgcgaaagtgaatgcaacactgagttgggtgacgggagattacggtacgccatatgattacagtggtccgcgcctggatatgaaccttaatcccgacggttctaactggtactatgatttaggttttcgtaaacaattccacgactcccgccagcgctatcaacgtgctgaggctatggtcggctatcgtttccgttttgacgagggttggatccaaccgagctttcgtattcgtgaagatttaaccacttacgataacggcaatcgaactaccattaatttttataccgcacatttgaccggccagcgtctgttatctgaacgttttacatttgcgagcagtatgattctgggtattgaacgtgaagaggtaaatacggcatcgaatcagtctgtacgccgttcagatcgcttaacctgggaaattgaaccaggcgtacgtttcaagtcgagtgccaataccatgatgacgttgaactattttaatgccggtaaacgtagtgacaaaggcgatacctggggattgaccgataactcaagaaaccagcaaatgcgtttctattttaactggaatacgccaattggtctggtgctcaccccatatgttcgctatgcccttaattatggtgaaacgtccggatggtacgaaagcgcggcatacagtgaaaccaaaacaaaaagtaaagttaaccgtttagccctgcagatggcttaccctttatccgatagcttccgacttcaggcagaatactatattgaagatgttaaatataaaaaaggctataccatgggtaaagaaaactcttcatctaaatatatgaaagtaggcgtacgcgcaacattctaa

SEQ ID NO: 374500 - DNA, 2229 bp, Salmonella enterica
atgtctaaaaaatttagggcgaaagttctcgcggtcactatatccactattttactatcaacagcatttaatacagctgcgagtgcttgtccaccttatataccagcgggcagtacttgtgatgcaataattgcctccgatggtaaagccgtgaccttagcgtcagacttatacgttaccgaaggtaatggcctgacctatactggcagcacaccatttgtcgcccagtatatccgtaaaaacattactgttgtcggagagaatgcgtatgctatctacgccgatggtaatacgttttttaataacaacattaatcttgaaaaagggattaatgttatcagtgaaaatggcacagcaattaaaattgacggttcatttaaacaaccggccgttcctaatataggtatatcaataaaagatgggtcgacggttaaaggtaaagaaaatgccattgacttctcagaagcaaagacagcactgagaatagatgtcaacggtaacgtctacgggaatattataggtaatggtctggaaggaaataaagtcaactttgcttaccaaagcggagcacagcaagggttgtttgatggttatgttatttccggggttgagaaaatagaaaactggggaaatctgagtatcattgctaaagataaaaccattttctggagtggtgattttaataataaaaaaaatgcgattttaaattttaagattggtaattccgctaatttaaatacacctttattattgattgaaggcaagaccgtatttaatacaggaagtaaggcattattctcttatgtagggagtaacatcaacgatatcgtcaataaggatatcattctcattcaatcaaatggaggaatgagtggtactgttgaggtcggacaaggtggcgtaaacgcggttagcgatctttcgccattgctaaaacaaatcgactcctggataactaccaccgatccggttgtgaatggtggcattcaaggcaatcagctagtggtacgctacggggtgaactacgaaggcggtgataattttgtcaacatcgctaaacaaggtggcataagtgagcaaaggctccaggcagcaagttatatcgttaactatgcattgtccgaatacaacaaaactcagtccgtacgaagcggtgaactcctggcattgttaacctcagcgggtaacagtaatacaggcgacgacggtgcgaattcatctgttgttgacaacggcagcaatggtattgcccggttagttgaacaattaaccccgaatgctgaaggtagtgaggtccgcgccgccctgcgtgtggtcgataagatgcgtgaccaggcaaataaccgtagcttctatttacgcaatcaggagaccgcaacgccgtggaatttctgggcgcaaactctgtatacacatggacgccagggcaatgaggctgatattttcggttatcaaactaatgcttacggcataaatattggtatggatcgccgcttcagagatgaagctttattcggtgtcgcgttcggttatcaaaacagccatataaatataaatggttatggtaatacaaaagatgtaaatagctatgaagctatggcctatactggttggttcaacgaccgctattttattaacggtaacattaatatgggctataataaaaatagcagcacccgtaatattggttccttaaatggctatcagggaaataccaaggctgaagccgactataacagcttgcagatgggttatcaggccagcgccggtataacatttgaccttgatatcgttaaattacagccgcgagtagaatataactatcagtggttccgggtggaagattatgccgaaagcggttcaccagccagtctggaagtagatcggcagtcttattcagtgaaacacctgggtgccggttttaccgccttcaatacctacgatttggcgtttggtaaatttaccccatcactctccttaatgggataccgtgatttaaatgattcagaagtcataaccgaaactgcgggtttagtgatggatcagggtaaaggaaaaggccgttttactatcaccggcgatagcatcggtaatgatatttttgaagccgcactgaaatcttctttaacgctaaaaaataatattatcctggacggcaacttgaattactacaaacgtgatggttataacgaaggatatataggtctgagcgtttctaaatacttttaa

SEQ ID NO: 374501 - DNA, 3114 bp, Salmonella enterica
atgtatacacctttcagatttaaacttatagccctcaccgtcgcaaccttgctgggagcagcagcctgtacatcacatccatcagtgaataacgctaaaagtacaaataatgaaatcaataaaaaaatgctgatgcaggcgacaattattgattttgacggcaataacatccctgaatttgtctccgcaagtaaagattcaacgctgtcattgagccctgagcgctatatcatgggcaataaatcgcttaaatgggactggcaggcgggcagttccgtgacgattcatcaccctatcaaacaggtacccgactccgttgcgtctaagatatggggtcgtaaggccacgcaagtgctatcgttttggatctataacgaaagcccggttgacgattacatgattgttgatcttggccgtggtctgggtccagctggttcacctgataccggcattaaagtcaaaatgaactttagcggctggcgcgcaatcggcgtttcactgcaaaacgatcttgaaggacgcgaaattgaaggcttgggcatcagtgaaaacgaagccggtgagagtggcgcccgcaataccattgccagtggggcaaaaagtgatatggatgacattcgctttaaagcaccgcttaaagcgccctccggcactttttatatcgaccgtatcatgttgtctatcgatgacgctcgatatcaatggtctgatgaccaggttaaaacacgcatccaaattccagaaattgattttcggctacctaaaaagttaccgcccccaacggcaagtgaattagcagctactgatagcattcgcgatgccctggtgcgcatatttatccaagtgaataccgacgagaatggactggtcattgtcgacaattatgaaaaattacgtagtgactttgctgcattacgtattaaacgtaatgcagagggtaaattgtccgggcggcatataattacagataaacagaaggtgttgtatcaacctgaatttatgagcgccgtcgacaaacagcgctttaacgattatgtttatctcgctgattatgccacgctgatgtttaatatcagccgtacctatcaggtcagtactgcgcctgcacagcgacaggaactggccgacatgtatatactgatgacacaacatttattggatcagggattcgttgacggcagcgcgctggtcacgacccatcactggggatacagttctcgttggtggtatatctcggcgctgatgatgagcgatgaactggaaaaacatcagttacgtcagcaggtcgctgatgccctgctgtggtattcacgggagttcaaagctaactttgacatgcagccgggggcggagagttcggatctggactattttaatacgctttcgcgtcagcacttggctctgttaatgcttgagcccgatccggcgaaacgtattgcattattaaaacgttttggtgaatacatcaacgtggcgctgtcacaaatcccgcccggctcgcgagatggcctacgccctgatggtacggcatggcgtcacgaaggcaactatccaggttactcattcccggcctttaaaaatgccagccagctggtttacatgctgcaaggtacaccgtttgaggtcagcaaagaaggacgtgctgcgctgaagaaagcgatggtttcagcatggatttacagcaacccggcgacctcattggggctcgcgggtcgtcacccgttcaattcatcaagtgtgaaattattccaggactcgttccggtggttggccctggccggcaatccgcaaaccggcgataaagtggataaagatctggcagccatctatctgcaaattaccagaacgccagagagcgaaagcgaaacgctttttggtcagacgattaagcccgcttctttgcctcagggtaactggacctttaacggcggcgcgttcggaattcatcgttttagcgacaaaatggtgaccctgaaagcctacaacagcaatgtttggtcttcagagatttactatgccgataaccgttatggccgctatcaaagtcatggtgctgttcaggttctgccttatggtagccagaaagagataggttttacacaagacggttgggactggaaccgcaatccggggaccaccacgattcatttaccgttagccgagctggacagccctaacccgcatacgctgatgttacgtggcgatcagcctttcagcggtcattcatcgttggcgggtaaatatggtatgttcgcctttaagtttgatgcgccatcaatgccgaaatttgatagcagctttaccgctcgtaaaaccgcgttagagacggaaaatcgtctggtcttattaggcagtaatattagcaacagtacgactaaatacccaacagagacgacgcttttccagcacggcatcacggataaagcgcacgctctatgggtgaacggcgaacgcattaccgcattcccgtatcagcgtactcttggggaaggtgattggttaatcgacggtcatggtaccggttatttattaacggccggcgcgaaaggagaagtacgccgtcagcatcaggtctcggcgaataataaaacccgtaaaccaacggaagctgacatcagcgtggcgtggctctctcacggcaagaaaccacaagatgctgaatatgagtacctgatggtgcttgaagccacgcccgggagtatgcaacagttggctaacgattatcgcgcaggcaagaaaccgtatgaggtattgcgtaaagacaatgttgcacacattgtgcgtgataatgtgacccaaaccatcggttataccgcatttagtgcggtgacacctgccgacggcgtggtgaaaagtattcctcagcccgcgattattatgacccaatcacggggagacaaagaacttattgttagcggcgttacaccagacctgaacatgacccgtaccacggcggcaaccccggtgcctatttcagtgacgcttaacggtcagtggcaggctagcgtcccgaacccgcaggttagcgtcaggaccgcgggaggtaccacggagttgacgttctcgagctattttggtattccgcaggagattactctgaagcaacagctgtag

SEQ ID NO: 374502 - DNA, 351 bp, Salmonella enterica
atgcatcagggaatgactgttaccgacgtcgccagactactttgtgctgcccgctcatccgtcggcagatggataaactggtttaccttatatggtgttgacggactaaaaagcctcaggccgggacgcgcgcctcgctggccggtcacggatatcctgcacattctgccgcttctggtacagagtttcccgcagtattttggctggcttcgttcccgctggagcgccgacctgctttcccgtatctttgaacgtctggataaggcgaggctgaaagacaccgcgttcgttaatctggttacggttgcacagcgttcggtagtaaagcaccagaagtggagggagtattaa

SEQ ID NO: 374503 - DNA, 480 bp, Salmonella enterica
atgtttacaattgatagtactaacagggtggcgactacagtcgctctatatgcacatgtaagtagagttagtttagaggatgagactacatttgtaacttctgcaccttcagatgaacatacctcaatacacgagtatgagtcttctttgcaatgcttcgtcttaaatgatcagcatgttccgcagaatacattagctaagaatgttgaaggctacaatagaggtttacaggaacgtataaacctcgagtaccagcccctggaaagcaatgtttttctactcggcacccctgcagtcttagagactacagaatctttatcgttacctgtttccccgcaagctctaacccaaaaattattaagcattagtaacaatgataagtgtaaattatcaggtagcgcggccccagacagtcataacgcatcgtccggttatattgctcaatacagccattctgctgaggttttcccgcctgaataa

SEQ ID NO: 374504 - DNA, 378 bp, Salmonella enterica
atgagttgttttactactccagcaataatggaaatgttaggtcattatagatggcgggtttacgagccgttcagattttatctcagtaaagataaaaatgatgtaattgaagtaccagtcggtttcattaccgatctagccactgttccgcgtattttctggtcactgttgccaccggatggagaatacgctaaagcagcaatcattcacgattacttgtaccactattcactacgtaacagaaaagaatcggatctaatattcctggatgcaatgaaagtactcggtgtgccaaaacagaaacgaatattaatgtatcttgctgtaaggatgtttggatggaaatattacaattctcatatttcacagtgtgattaa

SEQ ID NO: 374505 - DNA, 351 bp, Salmonella enterica
atggatatccctgagcttaccgatgacgcaattgtggaactggcgcgtgaaggcggggtggcatttatccctaagctaaataagcagcgcaagatcgctttagcaccattgacggcctcccaacgccagcgggtctccgatattctgaagcagacgttacccgttggttctccgccgggccaggtgaactccccaggcaaaggcgatcagcgctatttccgaatccatataatctggacgcagcaccaacaggcacaatatacagacattgttattctggttcccgaaaatgatgcgccatcctctcttgtcgaactgtggcaaaaaggtgaagcgtgcatttgtgattaa

SEQ ID NO: 374506 - DNA, 1026 bp, Salmonella enterica
atgaatactatttcttgccacactgttatcccaccttatattttgcgccgtattatcgcgaacggctcggcgccccaacagcgatgcgctcgtttgacgttaacacatgtacaaaccctgatggcgcataaacctgtcaaatcgcctgtggcgcatcccgcgcatccaggtcggcttgaacgcgatatttacgacgccaaacaaggtcaggaattacctggattacaggttcgccatgaaggacaaccgtcaaacggcgatatcgccgttgacgaagcttataattatctcggtattacccatgactttttctggaaaatctaccatcgtgattcgctggacaataaaggcctggcgctgaccggcacggtacattacggacgcgactatcagaacgcattctggaatgggcagcagatggtttttggcgacggcgacggcgaaatatttaaccgatttacgagttcgattgatgtcgtcgcgcatgagttgacccacggcgtaacggaaacagaagccggattaatttattttgggcaatctggcgcgctgaatgaatcgctttccgacgttttgggttcactggtaaaacagttccatctccagcaaactgccgggcaggctgactggattattggcgaagggctactggctaagggtattaacggcaaaggattacgctcaatggccgcgcccggcaccgcatatgacgatccgctacttggacaagaccctcagcccgcccatatgcagaattttattaaaacccgtgaagataatggcggtgtgcatcttaattccggcatcccgaaccgggcattttatctggccgcctgccaaatcggcggttatgcctgggaaaaagccggttatgcctggtatgatacgctgtgcgatcacaatctcgcccagaatgccagttttgcggattttgccggacttaccatcgctcacggagaaaaacgctccggacaaacagtggcttcggctattgagcaggcatggaaaaccgtaggagtgttatag

SEQ ID NO: 374507 - DNA, 774 bp, Salmonella enterica
atgaaattagatttcagaatagaacatgaatttggcagcagtgaatcaataaaaccagtggaacttgcaactctttttcagggagtcacaaaacagttggatgaacttttagggactaaaagatcatggtatgaacaaggatactcaagaaaacaggccctacaatacaaaatatttactgaggaagggatatccgaagatgttcttgaccgttgggagatggagtataaaaaagactatcctaattggaccactggtatttgggatggtgggtctgatgaagatagcgcaggggtggattgctatccgtcatattctagtactcaccgtaggaaaaatcctttaaacttggttgtgagtttttctatagatttgagtcaaacaagacttaacgttgaaaaaatgattaattttctaagttttttgttacattcaaccaataattgtacttattcttgtgtggaatctggaggttatagtttctccgaaataattcctaaagagaatggttatgatgaggtgtataaaaaattatttcccgacagaatatcttgtggatggatgctcttcataccagccattattttacctgacttgattccagatgctgccagaattgttcctgtcctgaatggtaacaaacagattggaacaattgtggtttcaaccgaagaaatatttgatgggaataataaagaacacctgggcaaagctaacgacattgaaattaagcttctggatcttggcttgttgccactgatgacagagctttaa

SEQ ID NO: 374508 - DNA, 1083 bp, Salmonella enterica
atgctacctgccatgaaaatattcattactgctcaacaaaaaactgaacttgaacgccttcacgattccagccgtgacgggcgagtcagagatcgtattaaagccattcttctggcctccgaaggctggagttctgccatgattgcccaggctttacgcctgcatcagacgaccgttgaccaccatatcagcgaatttctgaataaagggaaactgaagcccgagaacggcggttcggacagcaaactcagtgctgaacaaagggcctttttaatcagccagttatccaataatttatttcatcatacccgcgatattattgcgtttttctcccgcacatgggacatcgttttcagtgttccgggaatgaacaagtggttacatcgcaacggattcacctacaaaaaaccgtcaggcgtcccccataaattcagtgaagagaaacaaaggcaattcattgaatattatgaggaactgaaagcgacggcgggtgatgaaccggttctttttattgatgcagttcatccgactcaggccactaaaatcagctacggctggatacgcaaaggccacaaaaaagcagtaaaaacaacaggcagccgcacacggttgaatatcatgggtacgctgaatctgaagacgctggcgaccccgttaatctgtgaatacaaaacaattaatgaatataacgtatccacttgtgcggtcgggaatgccaatttgaaaatttgtatcagggggaatgtaataaatgttaatgggaaattatcagttcatgttgatgcattagggttttatctgaaagacacttacgattttcttgatgacaataaacttggtattgatatacccgagtgcttagggatatgggggaaaaacaggatcttaaataagattgacacagcttcctatatgacatcttatgcctctggtagttttggaattttagttcaactgtactctggttttgtgcctgtatttaattcagattttagagaatggcaaaaaaaaacaacactggtggagattacatcgttttttctgatgtattatggactcctccacttgataaagatagggtga

SEQ ID NO: 374509 - DNA, 405 bp, Salmonella enterica
atgataaaacctgatgatatatcattcattgaacatttggttgaattattttttcatgcaaaggtaaaagtaagtgagataaaagaaaagtttgcagaccatgataaagttctgatttgctataaatttaaggagtttgaacaggaagttgtaaggcttatcacaaatgataatgaatttatcaattgcctttgtgaaaaaggtttagaacctccagacccagagtgtgtatttcctgataaggactttggtacttatggtagtctgcaaggagatatggagttttggtggcatgtatactggaaaccattttgggaaagtttgaaagaggaagaaagaaaacaatatctcgaacgaagcaatttatcgattggtaccattgaatttcttgaacaccaccattag

SEQ ID NO: 374510 - DNA, 885 bp, Salmonella enterica
atgactgagcattcaactttaactaatgaaactccacattcaacgtacgacataactggtatgttaatgccagcccgtgcatttttttttgtcgtcgtcgatgagccaggaaaagacggttttcttgttaggaaaatatatgcttcaaattctgatccctatctttcaaagatggacttatcagaggcaaagatgctttcagaaactaacccggaacgatatggtttaattccaaaggatttttcagcatcctactctgtagctgagcatgtaatggggaataacgcttcggcatatatttccactagctctgcctttccggaaggatctccaaggtttgaaggtaaaacaattattgttgatattgacaaagctgtaaggtcaggtgctaaattaatttctacagcagagatacttaagagccttgatgagtacaagaaccaaaacccacatttggggaaacgcattgataaaatatcaaagtatgttaatgatatagataaggaagtattgctacacggtgaaaagataccagcagccgcgattttcactccagagacattaaaatacacaaagtattttacacgtgccgctcgtgttgtacaggtaacaggaattgtctttacagcctatgatctagaacaggcgtcagaaaaatcgcttaaaaacgggagtgtgaaaccaataactgctgaagccatcaggcaagctggaggatgggggatggctgtcgctggagcaaaaataggtactgtggctggtgcggctgttggtattgagacggggccaggagcggcgttaacagggctgattggcggaattatattcggaaccgctggttattttggtgcagattgggtggcagatcatattgatgaaaattaa

SEQ ID NO: 374511 - DNA, 2472 bp, Salmonella enterica
atggataactggtcagcgctttttgacggacagacccgctatggtctggatatcaatgacagcaccgtgaaagctgatgtcctgcgttttcgcggcagggaagcactgagcgagccgttcaactgggacatcgagttcacttccctggaggcgcacatccccccggaacaggtgctgatgaaatatgcctctttccggatgcggaatggcaaaaatgtccacggcatggtaacccgcctggagtggctgtccacctcccgtgaccagtcacactaccggctcacactcagttcccgcctgacgctcctgggatacacccggcagtgcgcggtatatcagaaccagtccgttcctgaggtggttgagcaggtgctgcgtaaacacggtctggaaggtcctgattttgaattcagactggagcgcacctacccagcacgtgaacttatcactcagtggcaggaaacggatctgcaattcatccagcgtattttgtctgaggtgggaatttactggcgcacgatgatggacgatgtgcgcggtctggatacctatatactggccgacagccagcttaactaccagtttgatgtgcagttgccctacagcgagccatcggggttgttcgacggcgcggcagaatcggtctgggatgtgcgaacctggcacaacattgccaccggcaccgtcgccacgcggaattacaattaccggacagccaccacgccgatggatgcgacggtcagcgtgcgtaatgatgcggtcaccacgggggagcattaccgctacgcggcaccgtatcgtgtcgcaggtgatgacgccagccctgagccggaaaccgaatccggcgcgttttatgcgcgtatccatcacgagcgggagctcaacaggtcggcccgtattcacctgttcagcaatgcggcccacctcacgcccgggcaggtgctggagccgcagggggatgccattacggccctgaaggaaggcgttatcctcacccaggtgacctaccggggggcccgtgattcccgcctgcacgtgtcggtctggggaatgccttataccgaacgttactgcttccgtcctgtagaagtcccgcgtccggtcatcccagggacgcttccggcacggatagagagccgggagaagaacaacatttacgctcacctggacgagcaggggcgctaccgggtgaaactggacttcgaccgggaggggacggaatccggttacggctacctttggctgcggatggcaaagccttatgccggtgaaacgctgggctggcatacgccgctcatcgacggaacggaagtggccattgcgtacagcaacggcgatattgatctgccgtacatcgcgtatgcgctgcatgactctgagcacccggaccacgtcacccgcgataatcacacccgtaacgtgctgcgcacgccggcgaacaacaagctgcggatggaagacaggcgtggtgaggagcatgtcaggctcgcgacggagtacggcaagacgcagctcaacagcgggcacctggtggacgcgcaggggcagcgtcgcggcacgggtgctgaactgcgcaccgatgagtggggcacgatacgcgccggaaaggggctgtttgtcagtgccgacgcgcaggcgaaggcacagggtgaggtgctggacatggatgccgcgctgaaggaaatcgaccggcttaaccagcaactgcagcagctggaaatcgcggcagagcaggcgcaggcgctgaaggtggatgtggacagccagatatggatgtttgagcagcggctgaaaccgctcaatgaagccgtgcttttctcggctccggaagggatggccctgaccagcggggagcatatgcagatgacggccacgaaaaacgtcgcgataaatgcgggcggcgacacaagtatcggtgcgatgggcaatatgacagcgctggccggagataaactggggctctttgcccgtacgggccagctgagcatgaaggccagcgaaggtccggtggaaatgcaggcgcagaacgccagtatgcggctgtttgcggagaagaagctgacgctgagctcagcgagtgacatctcgtttgccgggaagaaacgcatcacgctggtcggtggcgggagttatctgcggctggaggcgggaaaggtggagtacggtacaacggcaacgtatctgcgcagggtgaagcggacgatgtttgctggtgcacattcaaccccaacgtcatcagttttaatgccattagttgaagatttaatcaaagatggattcttcgatgaacaatttcggatcttgaatgacagtggtaagcctatggctaatgttccgtattttatctccaccgaaagtggggaaacatttaaaggtgtcaccgacaatcaaggtctatgcaagcgcgtgttttcaaaggaagcatccaaacttaccgtatggctaggtgtccaggctctggagagatggtag

SEQ ID NO: 374512 - DNA, 234 bp, Salmonella enterica
atgaaagtagagacaatcagctacgttaaaaagaacgcagcaacgcttgatctgtcagaacccattctggtcacacaaaatggtgtgcctgcttatgttatagagtcttatgaccaacagcaggagcgggaaaataccattgctttgctgaagctgcttaccctgtcagagaaagataaagcggaagggcgcgtgttctcgaaagaccagttgctggatggatttgcggattaa

SEQ ID NO: 374513 - DNA, 333 bp, Salmonella enterica
atgaaacagcaggtgacctttgagtacacgctgacggtaaagcactgcatcgacataatagcgggtttcctgcgccgagttgatgttgagccgcgcccggttatcgcagatattctcacacagtttgagagtgccgtagcccagttcccgttgggctgtcagatttaccctgaactgctgaaaattggctgcgccaaataccgggagtttaaccacgctgaaggctaccgggttttgtattccgtagacggagccttggtgaccgcgcatgcgatcctggcacaccggcaggacgtccagcaactgctgtttaagcgtctgataatggcctga

SEQ ID NO: 374514 - DNA, 237 bp, Salmonella enterica
atgctggggggctttacgcaagaaatactcggtgatgcctgtatgtacggtaatgggattccccaaaatacccagatggggctggcgtggtatcgtaaagcggctgaacgtggctggttgaagcgcaaaaagctgttgctggtatgtatctgcgaagcgaagggatatcgcagaattaccaacaagtgctttgctggtataccagagtcgcgcaaaccgagctgtcgcaacgattag

SEQ ID NO: 374515 - DNA, 1653 bp, Salmonella enterica
atggactttacgttttctccgagacagctggcaatcgctattgccgctgctatcccgctagccgtcagcgctgccgaaacaccgatggtggcgacatctcagaatggctttgccggatatgaccatcccaatcaatatatcggcgtgccgaccacgaaattggcggacaatatgatgccggtgatttctcatcccacacaggagagagaaacgcggcaaaagctggccgatatagagaaaaaaacgggtaaaaaaccgaatattgtcgtgtttattcttgatgatgtaggctggatggatgtcggttttaacggcggcggggtcgcggttggcaacccgacgccggatattgatgcggtagccagccaggggcttatcctgacatcggcctattctcagcccagctcctcgccgactcgcgctacgatcatgaccgggcaatattccgtccaccatgggattttaatgccgccgatgtatggtatgccgggagggctggaaggcctgacaacgctgccgcaattactgcacgaacagggctatgtgacccaggctatcggtaaatggcacatgggggaaaataccggttcgcagccgcagaacgttggatttgacgatttccgtggttttaactccgtttctgatatgtacaccgaatggcgcgatccgaatatgaacccggaagtggcgctcagtccttcacgctatcaatacattaaaaacctgccattcgataaaaatgatgtccatgccgtgcgcggcggtaagcaggaggcggttgccgaaattacgccgaaatacatggaagatcttgatcaacgctggatgaaatatggtgttgactttattaataaaatggcgaaaaacgataaaccgtttttcctctattacggcacgcgcggctgtcattttgataactatcctaacgcccattatgcgggacgctcgccagcgcgtacctcgtatagcgattgcatagtagagatgaatgacgtctttgcgaatttgtaccgtgcgcttgaaacgagcggccaactggataacacgctgattgtgttcacgtctgataatggaccggaagctgaagttccgccgcatggccggacgccgttccgcggcgctaaaggttcgacgtgggaaggcggcgtgcgcgtgccaacctttgtttactggaaggggatgatccagccgcgtaaatccgatggtattgtcgatttagcggatttgttcccgaccagcctttcgttagccgggcatccgggagcggaactggcgaaactggtgccttcaaaaacctttattgatggcgttgaccagtcctctttcttcctggggacaaacggccagtctaaccgtaaagcggaacactatttcctcaatggtgaactgtcggcggtacgtattgatgagtttaaatatcatttgcttatccagcagcctttcgctttcacgcaaactggctatcagggcggattcactggcgccattacaaaaacagcaggtacgacaatctttaacctttatactaatcctcaggaagacgatagcgtaggcgtaagacatatccctatgggcgtccctttacagactgaagtccataattacatggaaattctgaaaaaatatccgccgaaagtacaaattaaattgtaa

SEQ ID NO: 374516 - DNA, 1242 bp, Salmonella enterica
atgctccagaatatccccacccgagcctttcatgccatggcgaagcccagcggttcagactgtaatctcaactgcgcctactgcttttatcttgaaaagcacgctctgtataaccatacgccgcaaccaagaatgactgacgccatgctggagcgctacgtccgtgattacattgcgtctgtcgcgccggaggcggaagtcgcctttacctggcagggcggcgaacccacattattggggctggaattttatcgtcacgccgtcgcgttacaggccaaatatggcgcaggacggcagatctccaatagttttcaaactaatggcgttctactggacgatgcgtggtgtgagttctttgtccgccaccatttcctgatcggactgtcgctcgatgggcctgaagagattcataatgaataccggttgacgaaaggcggacgtccaacgcataaactggtcatgcgggcgttggccctgctccagcaacatggcgtagagtacaacgtactggcctgcgttaaccgacgcagcgctcgctcggcggaaaaaatttatgattttctcgtcgccagcggcgtggagtttattcagtttatccccgtcgtcgaacgtctggccgatgaatctgcgcagcaatcggggctgacgctacacgcgccgggcgacgcctgcggtacattaaccgactggtctgttattcccgaagactatggtcggtttctgtgcgccgtttttgacaggtggatcacacgcgatgtcggtaaggtgttcgtcatgaatatcgaatgggcattcgcgaatttcgttggcgcgccgggaacggtctgccaccaccaaccgacctgcgggcgttcggtggtggtcgagcataatggcgatatctatgcctgcgatcattacgtttatccgcagttccatttaggcaatcttaacgaacagacgtttgccgctatgttggactccccacagcaggaggcgtttggcaaagataaatatgcaacgctacctgagcagtgtcggcaatgcccggtactacgcgcctgctggggcggttgccctaaacaccgttttgcattaacaaaagagggtaagcccggactcaattatttatgcgcagggtttcgcgcttatttccagcatttacctccctatctgaaagcaatggctgatttgatggcaatgggacgtccggccagcgatattatgcatgctcatttacattacgccagaagcgataagtaa

SEQ ID NO: 374517 - DNA, 450 bp, Salmonella enterica
atgaagagtactgagtttcatccagccgattatgacgtacacggacgtttacgtctgccgtttctcttctggtgcgtgctgctacttcaggcgcgcgcatggatactctttgtcattgccggttcatcccgtgaacagggtaatactttgttaaactttttttaccccgaccatgataatttttggctgggactgttgcctggcgttccggcggtagtggcgtttttactcagcgggcggcgtgaagcatttcctgggatgtggcgtatgctacgaggatggctcattctggcgcaactggtattgctttgctggcaacctgcgttatggctgtctggggaatcggttaatggcgctgggatggcgctttttgtagtggatatcgtcgcgcttatctggctggtcactcaccgtcgttgccgcgcctgttttgtctccggaaaagaataa

SEQ ID NO: 374518 - DNA, 576 bp, Salmonella enterica
atgaaatcgctgcgtttgactttactcgcgctgccgctggcgttgaccggttgttcgacgctctcatcggtcaactggtctgccgcaaatccgtggaactggtttggttcctcgacaaaagtcactgagcaaggcgtgggagagctgacagccgccacgccgctggaaaagcaggctattgcagaggcattagatggcgattatcgcctgcgtagcggcatgaaaaccgataacggcaacgtggtgcgcttttttgaagcgatgaagggcgacaacgtcgcgatggtgattaacggcgagcaggggaccgtgagccgtatcgatgtgctggacagcgatatcccctccgctgcgggtgtcaaaatcggtacaccgtttagcgacctttacagcaaagcctttggtcactgcgaatcagcttccagcgatagtcataccaacgtcgaatgcaaagctgagggaagtcagcatattagttatgttttctctggcgagtggagcgggccggaaggcttaatgccttcagatgacgccttaaaaaactgggtcgtgcgcaaaatcatctggcgtcgttaa

SEQ ID NO: 374519 - DNA, 1299 bp, Salmonella enterica
atgaacataaaactactttttgcatcactgctggcgtttagttgcgccgccagcgcgacatcctaccccgtgttgactgaaagcacgccggaaaaggtaggactgaatattgagcggcttaacaggctggagagctggattgcccagcaggtcgacgcgggttatcccagcgtgaatctgctgattattaaagacaatcatattgtctaccgtaaggcctggggcgacgcgaagaaatatgatggtaacactctgatgcgtcagccaatcaaagcgactaccgagaccctgtacgatctggcgtccaacagcaaaatgtacgccaccaacttcgcgctacaaaaactgatgtcagaaggcaaattaaagccggacgatcttatctcaaaatacattcccggctttgtcgatcgtccgggggaggcgatcaaagggaaaagcatgctgagggttgcagatctgctgcatcactccgggggatttcccgccgacccgcaataccccaataaaacggttgccggtgagctctattcccaggataaatcgaccacgcttgagatgatcaagcgtacgccgctggagtaccggcccggcactcaacatatctatagcgatgtggattatatgctgcttggctttatcgttgaggccgtcaccggacaaccgctagatcgctacgtcgaagaagccatttatcgccccctcgggttaacgcacacggtcttcaacccgcttaagaaagggtttcagccgcagcagatcgccgcgacggagctgaacggtaacactcgcgacgggataattcatttcccgaatatccgtaccaccacggtatggggtcaggtgcacgatgagaaagcattctattctatgggcggcgtgtcagggcatgcgggactgttttcaaataccgccgatattgcagtattaatgcaaacgatgctcaatggtggaagctacggtaacgtaacgctattcagccctgaaacggtgaagatgttcacccgacgttcacctgaggatgctacgtttggccttggctggcgggtaaacggcaatgcgtcgatgaccagcacatttgggacgctggcaagcgccgaggcttacggtcataccggatggaccggtacactaacggtgatcgacccggtaaaccatatggcgattgtgatgctaagcaacaagccccactcgcctgtcgccgatccgcaaaaaaatcccaatatgtttaaaagtggcctgatgcctgtggccacttacggttgggtagtcgatcagatatatgcggcgttaaaatag

SEQ ID NO: 374520 - DNA, 1431 bp, Salmonella enterica
atggcaaaagaaatcagcaacgatcttctgaaggcaattctcgcccgggttggcggcccggcaaatattgccacctgcgggaactgtatgacccgtttacgcctgtcggtacacgatagcactcaggtcgatccggcaatcagaactcttgaaggcgtcaaaggcgttgtgctttccgataaccaggtacaggtcatttttggcccaggaaaagcccagcgggcggcagacgcaatgaatgcgctgttggccaatagcggcgagacgttgatgcaggcggcagatattgccgccaaaacgaaaagccagctaaaagcgaaacaaacctcgggggttcagcaatttctgtcaaaattcgccactatttttaccccgttgattccgggctttattgctgccggcctgctgctggggatcgccacgcttatcggcacggtcatgcatcttcccgccgatgcgcaggggatgctggcagacgctcttaatcttatgaaagtgttcagtaaagggctcttcaccttcctggtgattctgattggctataacgccgcacaagcgttcggcggtacaggggtcaacggcgccatcatcgcctcgttgttcctgctggggtacaaccccgcggcaactaccggctatttctccgggattcaggatttctttggtttacctatcgatccgcgcggcaacattatcggcgtcctgatcgctgcctgggccagcgcgcgtattgaatgcatcatccgccgttttatgccagacgatctggatatgctattaacatcgatgttaaccctgctggtcaccgccgcactggcctatctaatcatcatgccgctcggcggctggctgtttgaggggatgtcatggctctttattcacctcaacagtaacccgctcggatgcgccgtgctggccgggctgtttctggtctcggtggtatttggcgttcatcaaggctttatccccgtctatctggcgttaatgagcagtcagggattcaatagtctgttccccattctttcaatggcaggcgcaggacaggttggcgcagcgctggcgctctactggcgggcagaaagacacagcgcgttacgcagtcaggtgcgcggggcgattattcccgggcttctgggtgtgggagaaccgctaatttatggcgttacgctgccgcgcatgaagccgtttatcaccgcctgtctcggcggcgctgccggtgggcttttcatcggcctggtggcctggtcaggtttaccgatggggttaaacagcgcctttggcccatccggtttggttgcgctgccgttgatgacctccgcgcagggtattttgcccgccatggcggtttatgccgccggaatggcgatctcttatcttggcggttttatttttaccgttctgtttggctgccgcaatgtgaatctggactaa

SEQ ID NO: 374521 - DNA, 897 bp, Salmonella enterica
atgcaacttgaaaacttaatgaccgaaagcgtcaaccgcgcgtctctggagatcgatcgggtttctaccctcgacatgtgccgcatcataaataacgaagataaaaccgttccactggcagtcgaaaaggtgctgccggcaatcgctacggcaattgacgtcatttatgcgcaggtcagcgcaggagggcggatgatttatatcggcgcaggaacctccggacgtttggggatcctcgatgccagcgaatgccctcctacctatggcgtctccccggggttggttatcgggttaatcgccggcggcgagcaggccatccagcacgctattgaaggcgcggaagacgacggcgaaggtggggagaccgatctgcaacacatcgccttaagtgaaaacgatgtggtgattggcattgccgccagcgggcgtacgccgtatgtcattgccggcctggaatatgcgcgttccctcggctgcaggacggtaggcatttcctgcaatccggggagcgcggtcgctaacgctgcggagattgccatcacgccggtggtaggtcccgaagtggttagcggctcatcgcgtatgaaagcaggcaccgcgcaaaagttaattctcaacatgctgtctaccggcttgatgattaaatccggcaaggtattcggcaatctgatggtcgatgtggtcgctaccaacgaaaagctccatctccgtcagatcacgattgtgaaaaatgcgacgggctgcacgcgccaggaggcggaggccgcactcagcgcctgtggtcgccactgcaaaaccgctattgtcatgctactgaaaaacctcaacgcagcggaagcgagtttgcgtcttgagcaacatggcggcttcattcgccaggtattggaaaaggaataa

SEQ ID NO: 374522 - DNA, 591 bp, Salmonella enterica
atgaataactcttttatccccgccgccgcgctgctgttttgcagccaggccctcgccgcaccgcatctttttattggcgataacgtcaacgttctggcggcccgttcggcaaaagtcagcatctttagtaaagatgtggatctgccagatggcgtccagaaaatggtggtgaaattcgacagcccagtaaatccggagtcggtaaacaataatcgcgggcgggtgacctcgaatccctatatcctctcgtttaacgcgtcaggcaatgtcgatattcaactctccgcgggtaaaccgctggacgaaaaagaagcgagtcagatggcgcaaaagccggcctttaccctcaccgcaggcggaaaaccagtcccgtttgatatacagatgctcgacagggacagtatcaccgtcttcactgacctgagcgccatcgtcaacgaagatagcgtcatgatcccgtctccagctcgttccaccgcccctgcgaccgcgcctcttgcgcacaatgaactgtctaaactacagcaactgtatctgaaagctgacgacacccagaaaaaagcattcctgaaatgggcgctaaacctgtaa

SEQ ID NO: 374523 - DNA, 1086 bp, Salmonella enterica
atgaaacttaccctgaagtctttggcaacccttaccctcctcgccactagcgccagccatgcggcggtgatctatcaggcgaacgatggatcgaatatcgatctttacgggcgtctgggcttcaatatctctgataaaaaaacaggcgatacctcaggagactttgatgcccgtatcggtttttctgcccgccaggctatcaataacaagctggcggtcattggttttacccaatatcaggtcaatgccgctgaatatgccaacaacatcagcgcggaagatcccgatgatttcaccgcccgctacgtctgggcagggatcgatttttcagaatacggtaagctgaccggcggacgcgtctcatccggccttatcatgttcaccgatatcggagatgtgttcgccagctccgacgttgccatggccagacaggctaactttgttgatcctaccgccgtgcaggttttccgtcaggacggaacaattcaatatcagaacaccttcggaaaccttgatttttcaaccgcctatattctgggtaataacacctccgatctggattacggctataacgccgccctgcgctatacgctggatatgggcgagtttggccgcctccagccggtcattgccggtcagacagagaaagcgagccacgacaaaacttctgcgcagtcggatgacaatgcggataagtacactttctatggtatcggcacccgctactatttaggtgatgtgatgctcggcctgctcgttgctcaggataaagtgtcctatctcgacggctcgcctgacagtaccgacacggattacgaagcgaccctggtctggaacgtcagcccggactgggcactccgcaccggctatcgtcatcttaaaaacgaagacggcgacggcttaaaacttcgcgataccacctttgaagcgcagtacaaacttaccgttcgcagctccgtattcgcctcttactcatggcgcaatggcgaaaaagggacaaaacgcaccaatggcagcgacgtctccttcggcggcagcaacccggcggatgactatttccaccttggcttacgttacgaattttaa

SEQ ID NO: 374524 - DNA, 864 bp, Salmonella enterica
atgctatatctggcgaaaatgcgtaatgcagagggcgagtttacggaaaacgagcagaaaattgccactttcctgctggcgcatgttggtgaattgaaaacggtttcctcccgcaatatggcgaagcagttggagatcagccagtcgagtattgtgaaatttgcccaaaaattgggggcgaatgggttcactgaacttcgaatggcgctcattgaagaacacagcgtcagtcgtgaaaagaagcgggataaggccgtgcatttgcacagctccattaccagtgaagacagcctggagatgatggcccgtaagctgaacagggaaaaaattgtcgctcttgaagagacctataatctgatggattacgagcgactggagcaggtgattaaccttatcagtaaggctccgctcattcagattaccggagtcggaggatcggccctggtggggcgcgatttatcctttaagctgatgaaaataggttttcgcgttgcctgcgaggtcgacacccatgtgcaggcaacgattgcccaagcgttacggcaaggagatgtgcaaatcgccatttcttacagcggatcaaaaaaagagattgtgctttgcgctgaggcggcccgtaagcagggcgcgacggtgattgcgattacctcattggctgattctccgctgcgacggctggcggattacacgctggataccgtttccggcgagacggaatggcgcagctcgtctatgtctacccgaacggcgcaaaactcggtcaccgacctgcttttcgtcggcatggtgcaattgaatgacgtagagtcgcttcgcatgatcgaacgcagcagcgaactgattacgcttttggatcgaagctag

SEQ ID NO: 374525 - DNA, 717 bp, Salmonella enterica
gtgcgaattcattttgttgtccatgagtcgtttgaatccactggcgcttatctgcaatgggctgaagatcgcggttacgccatttcatggtcgcgcgtctatgcaggagaagcgctgccgctcaatgccgatgggttcgatatgctggttgtatttggcggaccacagtcgccgcggaccacccgcgaagagtgcccgtactttgactctcgcgccgagcagcatttaattaaccaggcgattacggcccgacgaatggtcattggcatctgtcttggttcgcagctcattggcgaggcgctgggcgctgcggtgtgtcaaagcccggaaaaagagattggtcactaccctactacgctcactgaagccggcctgcggcatccatttatcgaccactttggttccccgttaaccgtcggtcactggcacaacgatatgccgggactcaccgatcaggcgacagtgctggcagaaagcgaaggttgcccgcgtcagatagtgcagtacggcaattttatctatggctttcagtgtcatatggaatttaccgtcgaggcggttgaagggttaatccagcattcgcagcaggaactggccgacgcgcaagggaagcgttttatccgttcggtcgccgagatgcgcacatggaattatcaggagatgaatagaaagctgtggcagtttctcgatcggttggtagagaaccatcagcaataa

SEQ ID NO: 374526 - DNA, 240 bp, Salmonella enterica
atgaagagttatcggttggtggttcgccagcaggggcgtatggttgggcattttgaaacgagcgggacagaggcgctggaagatatctgcgtggcgcgggcgatgtttggcattgcgggtggctatgattgtgaactgttagtggcggattcggagcgacggctgctggagagcgggccggagggaatgaaaatcctgatgcgtgaggcatgttaccgaccggtcacctcaccgttgtaa

SEQ ID NO: 374527 - DNA, 267 bp, Salmonella enterica
atgaaaaagacccgttataccgaagaacagattgcatttgccctgaaacaggctgaaaccggcacccgcgtcggggaagtctgcagaaagatgggaatttctgaggccacattttacaactggaagaaaaaatttgccgggctgggcgtgacggaactgcggcgtctgcggcaactggaggatgagaatcagcggctgaagaagctggtcgctgagctgagtctggacaaggagatgctgcaggaggtactgaagcaaaagttctga

SEQ ID NO: 374528 - DNA, 216 bp, Salmonella enterica
atgctgcgtatcgctattaaggaacaaaaccgtcactttgagcatggtttgaaaatcatcatggcgcgtctggtgaatcagtggcagcagaaaatttactttctgccgccagaagagatgataatgccgatgtcccatttctggcactggatgatgattggttcagcgcaggctgttaccagataccgatgcatacccaacatcagttgcgggtga

SEQ ID NO: 374529 - DNA, 726 bp, Salmonella enterica
atgcgcagcataccacgcagagaaagatatcgttgtttcagaaggaccaaagacagcacctgccgttatcactctccagcgccgcagatatttgattgccttgaattactgaaccaacagctctattatgcttttccggctggtatcatttctcaggtaataattacaacagacaactacctggggtattcgctaagtcgctacttattttccggaaagcgcaccgcagcattccgctcactgcaggatatttctttgcggatcgaagagagttcgctcagacagctaattgtggatatagagtcactacccgtgtcacgcgttgaggcgcttagccagctacgcgcgctcagcaggaaacgaagcgatatccagatttacctgctggtatcagataaagcccccgctatagcacagtttatccgtatggctggtcgtttttttgtcctgtcgaggcggcaaaatatggcttcattacgcgaaaccttattatcgggttccaccgttcctctcttgtccgaaagctttagccgcactgactggttgatgattgaaaatttagcgcaaggcgcctctttaaaagaaatagcgcgccagcaacggatacattatcaccgtgtggtttatcggcttaatcaacttatcacccttcttaacctccctcacagacaaagctctcttcggctgatccagcaactaaacgttactttccccgacatattttaa

SEQ ID NO: 374530 - DNA, 633 bp, Salmonella enterica
atgaaacctgcatctgttatcattatggacgaacaccctatagtaagaatgtcaatcgaagttttacttggtaaaaatagcaatattcaggttgtcctgaaaacggatgatagccgaactgcgatagagtatctacgtacttatcctgtcgatcttgtcatcctggatattgaattacctggtaccgacggatttaccttgcttaaacggatcaaatctatccagcaaaataccagggtactttttttatcgtcaaaatcagaggctttttatgccggaagagcaataagagcgggtgcaaacggatttgtgagcaaacgcaaagacctcaatgatatttataatgcggtagaaatgatcttatccggctattctttttttccatctgagacacttaatttcatcagcagtacccgcacgcctaaaggcagacaccatgatatgccgctttctaaccgcgaagttaccgtgctgcgctatctggcaaatgggatgtctaacaaagaaattgctgagcaacttttattgagtaataaaactatcagcgcacataaggccaatatattttctaaacttggccttcattctcttgttgaacttatcgattacgccaaatcacacgaattattgtaa

SEQ ID NO: 374531 - DNA, 1008 bp, Salmonella enterica
atgaaaatatactcagcgctattgctggcggggaccgcgctctttttcacccaccccgccctggcgacagtttgccgcaattcaaacggaacgccgaccgatatcttttacgacctgtcagatgttttcaccagcggcaataatcggccgggacaggtggttacgctgccggaaaaatcaggctgggtcggcgtaaacgcgacgtgcccagcggggacgacggtgaattacacctaccgtagctatgtatcagaagtaccggtacaaagcaccgaaggaaattttaaatacctcaagctgaatgactatcttctgggcgcgatgagcatcaccgatagttattctggcgtattttatccgccgcgtaactatattcgtatgggcgtcgactataacgtgtcgcagcaaaggccgtttggcgtgcaggactcaaagctggtttttaaattaaaagtgatacggccttttattaatatggtgacgatccctcgccagacgatgtttaccgtctatgtgacgacctctaccggcgacgcgttgagtacgccggtatataccattagctacagcggtaaagtggaagtaccgcagaactgtgaagtgaatgccggccaggtagtggagtttgacttcggcgatattggcgcgtcgttatttagtcaggcgggggcgggtaatcgtccgcaaagcgtcacgccgcaaacaaaaaccattgccatcaaatgtaccaacgtcgcggcgcaggcctatttatccatgcggcttgaagccgaaaaggcctcagggcaggcgatggtgtctgataatccggatgtaggctttgtggttgctaatagcaacggcacgccgcttatgcccaataatttgtcaagtaaaattccgtttcgtcttgatgataacgccgctgctcacgtaggtatccgcgcatggcctatcagcgtgacggggaataaaccggtcgaagggccgtttactgcgcgcggctatctacgagtagattatgattaa

SEQ ID NO: 374532 - DNA, 1674 bp, Salmonella enterica
gtgtcgccgggcgcgtttgcgattaccgatcttaatcctacctcttccagcggtgaccttgaggtgacagtagatgaaaaagacggaagccaacaacgttacacggtgccttactctaccgttccgctattgcagcgtgagggaagggtgaagtatgaccttgtggctggggatttgagcagcggcaatagccagcagtcttcgccattctttttccaggggacggtaattgccggtctgccagcgggaattacagcttacggcggtacgcaacttgccggacgttaccgtgccgtggtggccggggcgggacgaaatttaggtgactggggcgcagtgtcgattgatgtcacgcatgcgcgcagccaactggcagatgacagtacccatcaggggcagtcgttgcgttttctgtacgccaaatcgctgaataactacggtacccattttcaactactgggctaccgctattccacgcgcggattttatacccttgatgatgtggcataccgcagcatggaaggttacgactacgaatacgatagcgacggacgccgtcataacgtgctggtggcgcaaagctaccacaatctcagctacagcaaaaaagaccgttttcaggtcaacatttcgcaaaatctgggtgattacggatcactgtatctttccggtagtcagcaaaattactggaatatgtcggataccaatacctggtatcaactgggatacgccagcggatggcaaggtattagctattcgctgtcatggtcgtggaacgagtcggtggggatttcaggcgctgatcgcattctggcatttaatatgtccgttccgtttagcgttctgaccggacgacgctatgcgcgcgacaacattctcgatcgtacttatgccacgtttaacgccaaccgcaaccgcgacggcgacaatagctggcaaaccggtgtgggcggtacgctcctggagggacgtaatctgagctacagcgtgatgcaggggcgtagcagtaccaatggctacagcggcagggccagcgctaactggcaggcaacttacggtacgctgggcgtggggtataactacgatcgcgatcagcatgactataactggcagctttctggcggcgtagtcggtcatgcggatgggattacgtttagccaaccgttgggcgataccaatgtcttgattaaagcaccgggagcgaaaggcgtgcgcatcgaaaaccagaccggcgtgaaaacggactggcggggctatgcggtaatgtcctacgccacggtatatcgctataaccgcgtcgcgttagatagcaacacgatggataaccataccgatgtcgaaaataacgtcagcagcgtggtgccgacccagggcgcgctggtgcgggctgcttttgatacgcggataggcttaagggcaattattaccgtcaggcttgacgaacgtccgctaccgtttggcgcgatagtacgagaaaccgccagcggcgttaccagcatggtcggcgatgacgggcaaatttatctgagcggcttaccgctaaaaggcgagctgctgatccagtggggagaggggaaaaatgcgcgttgtctcgccccttacgccctggcggaagatagcctgaagcaggcgattacgatagccagcgcgacctgtattcgtccgtcgtcataa

SEQ ID NO: 374533 - DNA, 855 bp, Salmonella enterica
atgtccgtacagaatattgtcaatattaatgaatccaacctgcagcagaccttagaacagtccaggaccacgccggtactgttctatttctggtctgagcgcagccaacactgtctgcagttaacgccggtactggaaagcttggttgcccagtacaatggtcagtttattctggcaaagctggactgcgacgccgaacaaatgatcgccgctcagtttggtctgcgcgccatcccgacggtctatctgttccagaatggccaaccggtcgatggtttccaggggccgcagccggaagaggcgatccgcgctctgctggataaagtgctaccgcgcgaagaagagctaaaagcgcagcaggcgatgcagttaatgcaggaaggcaactacattgacgcgctgccgctgctgaaagacgcctggcagctctctcatcagaacagtgagattggcctgttactggcggaaacacacattgctctgaaccgttcagaagaggccgaagcggtgttaaaaaccatcccgctacaggatcaggatacccgctatcaggggctggtcgcgcagatcgatctgcttaaacaggcggcagacacgccggaaattcagcagcttcagcagcaggtcgcggagaatccgcaagatgcggctttggcgacgcaactggcgttgcagttgcaccaggtcggacgtaatgaagaagcgctggaattgctgttcagccatctgagaaaagatcttgccgccgccgaggggcagacgcgaaaaaccttccaggagatccttgccgcgctcggcaccggcgacgcgctggcctcgaaataccgccgccagttgtacgcgctactgtattaa

SEQ ID NO: 374534 - DNA, 795 bp, Salmonella enterica
atggatctgttgtaccgggtaaaaacgctgtgggccgcattgcgcggcaatcattatacctggcctgccatcgatatctttttgcctggcaaccgtgattttcacctcgtcggcagtatccatatgggcacgcgcgatatggcccccctccccgccagactgcttaaaaagcttaaacgcgccgatgcgctgattgtcgaagccgatgtctccggtcatgacaccccgtttgccagtctgccgacgtgtgctgcgctggaggatcgcatcagcgaggagcagttgcacaatctgcgaaaaatcgtcgaagagctgggcatttccctgtcgctgttttccactcagccgctatggcaaatcgccatgattttacaggcaactcaggcgcaacagttaggtttacgccccgaatacggaatcgattatcaacttttacaggtcgcgaagcagacgcaaaaaccggtgatcgaactggaaggcgtcgccagtcagattgcgcttttgtgtcagttaccggataacggtctggcgctgctggatgatacgctgacgcactggcataccaacgcccgtcagctacaacagataatgagttggtggttaaaaatgccgcagcagcatggcgatatcaccttacccagaacgtttagccagtcactgtatgatgtgctgatgcatcagcgtaatcttgcctggcgagatcgacttaacgctatgccgccagggcaatatgtggtcgccgttggcgcactccatctttatggggaaggaaatctgccggaattgatgcgttaa

SEQ ID NO: 374535 - DNA, 1653 bp, Salmonella enterica
atgaaatttttgaaacggggtgtggcgctggcgttactggcggcgttcgcgctggtgagccagtctgtacaggcttatgaaaaggataagacctataaaattactatcctgcataccaacgatcaccacggtcacttctggcgcagcgaatatggcgaatatggtctggcggcgcaaaaaacgctggtagacagtatccgtaaagaggtggcgcaagaggggggaagcgtcctgttgttatccggcggcgacattaatactggtgtgccggagtccgatctccaggatgcggagcccgatttccgcgggatgaatctgattggctacgacgctatggccgtcggtaatcatgaatttgataacccgctcaccgtattgcgccagcaggaaaagtgggcgaagtttccttttctctccgccaatatttatcaaaaaagtaccggcgagcgtctgtttaaaccgtgggctatttttacaagacaggatataaaaatcgcggtgatcggcttaactaccgatgacacggcgaaaataggcaacccggaatattttaccgatattgagtttcgtaaacctgctgaagaagcaaaagttgtgattcaggaacttaatatgaatgaaaaaccggacgtgattatcgcggccacgcatatggggcattatgacaacggcgatcacggttcgaatgcgcctggcgatgtagagatggcgcgcagtttgcctgccggttcgctggcaatgattgtgggcggtcactcacaggatccggtatgcatggcgtcggaaaataaaaaacaggtgaattacgtaccgggaacgccctgcgcgccggataagcaaaacggtatctggatcgtgcaggcgcatgagtggggtaaatatgtaggccgtgcggatttcgaattccgtaacggcgaaatgaaaatggtcaactatcagctcattccggtgaatctcaagaaaaaagtgacctgggataacgggaaaagcgagcgcgtactttacacgccggaaatcgcagaaaatccgcaaatgctctcgttattaacgccgttccagaataaaggtaaagcgcaactggaggtgaaaatcggtagcgtgaatggccttcttgaaggcgatcgcagcaaggtcagatttgtccagaccaatatgggacgagtaattctggccgcgcagatcgcgcgcaccggcgccgattttggcgtgatgagcggcggcggtattcgcgactcgattgagtcgggagatattacctataaaagcgtgctcagagtgcagccgttcggcaacattgtggtgtatgccgatatgagcggcaaagaggtgattgactatctcaccgccgtggcgcagatgaaaccggactccggcgcctatccacagttcgctaatgtgagctttgtcgccaaagagggcaagcttaccgacctgaaaatcaaaggcgagcccattgacccggccaaaacctaccgcatggcgacgctcagtttcaacgccacgggcggcgatggttatccgcgcattgataacaaaccgggatacgtgaataccgggtttattgacgcggaagtgctgaaagagtttattcagcaaaattcaccgctggatgcggcggcgtttacgccaaaaggcgaggtgagctggctgtag

SEQ ID NO: 374536 - DNA, 375 bp, Salmonella enterica
atgaaacacggaattaaagccctgcttattacgctttctttaacctgtgcaggcatggctcaaagcgcattggctgcagaacctaccgccaaaagtcaggcgactcaaaccaaagcggataccccaacgaatgcgcaaagcaaagccacgcaacctgcaaaagccagcgatgatgacggtaccagggtaagcattaataccgcgtcagcagaggatctggcgcgagtgatgaacggcgtcggtctgaagaaagcgcaggcgattgtaagctaccgggaggagtatgggccctttaaaacggtggatgacttaaagcaggtgccgggaatgggcagttcgctggtggagcgtaacctgaccgttttaacattgtaa

SEQ ID NO: 374537 - DNA, 126 bp, Salmonella enterica
atgccgtgccataactatacttatgaatattttattaacaggaatcatttaaccaaaaaaatagtgcaattgttttttatttatcattataaatattgtttttatattaaaaatgtcgataaataa

SEQ ID NO: 374538 - DNA, 1059 bp, Salmonella enterica
atgaacgaacaagatgtttatctgatcagcaatgaatctggcgccgataagtgcccggaaggcaagctggcactatatactaatgtacgattcaacacaggtgaaatgggagacatccttattatttcgcctaatgttcagcttaataaagcacaactggaaagttatggttttatcgttggtgcgcatgacggtgtttcttctgttgttaataatatgggccaggatgccacgctcgtctctggtttatatttagatggacaaacattaacggttaaaccaggaacaaatatccctactcttattgagtgtcctttaggtagtggaaactggaatgacgcggttaactcagtggtttcagccgatattgaaactgttgatttaaccatgagtattgagagtgagattattctggaggaagaggaaggatattcagcactactgcaaattcacaacaatagcagtgagtccgtagacaacgtaactgttacggccagctccagtaattcagccgttttttctgtcgaaacgggcacccagaccaccagtatcgccggaaatgaaacaacgaacgtacgtattcctttgctgggcaaaggtcagggctcagcgaccttaacctgtcaacttacaatgccattcggcatcgttaataatggaaataatatgacgcaaactgccgtaaccgtaagcgacgttcgtccgttacatgtaacacaaagctttgcgggtgactggcaagatacatggcccagcaccaaatatatttatagctataaactgattctcagctctgctgaaactgaagttgataagtgggaattatcatttgcacttcctgatggagcagaggtttatcctaagtggctggagagcgaaagtagctgggttaaacttaatacagagaaatcggttaatggtaacgtgtatctggatagcgaacctggccatgttatcgcaccggacaagaatatcgaactggatattcaaatcctgtatcctaaccaatcatctgattaccagaccctaaaaaatctgcgtctcatgcaactggcataa

SEQ ID NO: 374539 - DNA, 912 bp, Salmonella enterica
atgaaaattactgtactgggatgcggagccttaggacaactttggcttacggctctgtgcaaacacggacatgacgtacagggctggctacgcgtgccacaaccttattgcagcgtaaatctgatcgacaccgatggttcctttttcaatgaatcgctgacggcaaacgatccggattttttagcgaagagcgaactattgttagtcacgctgaaagcctggcaggtttccgacgcagtacgaactctggcgtcaactctaccggtgacgtcgcctattctgctcattcataatggaatgggtactatagaagaactgcaaaatatccagcagccgatgttgatggggactatcacccatgctgcgcgccgcgacggtaatatcattattcacgttgccaacggtactacgcatattggcccggcgcgcgagcaagacggcgattacagttatctcgctgagatcctgcagggggtactgcccgatgtcgcctggcataacaacatccgcgcagagatgtggcgcaaactggcggttaactgtgttatcaacccgctcaccgcattatggaactgcccgaacggcgcgctgcgccatcatcctgatgaaattaacgcgctttgcgaagaggtcgccgccgtgattgaacgtgaaggttaccacacatcggcagacaatttacgctattatgttgagcaagtgattgacagtacggcagaaaatatctcatccatgctgcaggacgtgcgcgccatgcgacataccgagattgactatatcaccggttatttactcaagcgcgcccgtgtgcatggtctcgccgttccggaaaatagccgcctgtttgaaatggtaaagcgaaaggagagtgagtatgagcgctcaggcactggtatgcctcgcccctggtag

SEQ ID NO: 374540 - DNA, 1863 bp, Salmonella enterica
atgagttttgatatagccaaataccctaccctggcattggtcgactccacccaggagctacgactgttaccgaaagagagtctgccgaaactctgcgacgagctacgccgctatttactcgacagcgtaagccgttccagcgggcacttcgcttccgggctgggcacggtggaactgaccgtggcgctgcattatgtctataacaccccgtttgaccaactgatctgggatgtcggtcaccaggcttatccgcataaaatccttaccggtcgtcgcgacaaaatcggcaccattcgtcagaaaggcggcctgcaccccttcccgtggcgcggcgaaagcgaatacgacgtgctgagcgtcgggcattcctccacctccatcagcgccggtatcggtattgccgtggcggcggagaaagaaggtaaagatcgccgcaccgtctgcgtgattggcgacggcgcaatcaccgccggtatggcatttgaagcgatgaaccacgcaggcgatatccggcccgacatgctggtcattcttaacgacaatgaaatgtcgatttcggaaaacgtcggcgcgctcaacaaccatctggcgcagctactttccggcaagctttactcttccctgcgcgaaggcggaaaaaaggtcttctccggcgtaccgccgattaaagaactgctcaagcgtaccgaagaacatattaaaggcatggttgtgccggggacattgttcgaagagctgggctttaactacatcgggccggtagatggtcatgatgtgatgggacttatcagcacgttgaagaatatgcgcgacctgaaaggcccgcagttcctgcatatcatgaccaaaaaaggccgcggctatgagcccgcagaaaaagatccgatcactttccatgcggtgcctaaattcgatccttccagcggatgtttgccgaaaagcagcggcagtctgccaggttattcaaaaatcttcggcgactggctgtgtgaaactgccgccaaagacagcaagctgatggcgatcactccggcaatgcgcgaaggttccggcatggtggaattttcacgtaaattcccggatcgctattttgacgtggcaatcgccgagcagcatgccgtcactttcgccgcaggtctggcgattggcggctataagcccgtcgttgcgatctactcgactttcctgcagcgcgcttacgaccaggtcattcacgacatcgcgatccagaaactgccggtcatgtttgccatcgatcgcgccggcatcgttggcgcggatggacaaacgcaccagggcgcgttcgatctctcttatctgcgctgtattccggatatggtgatcatgacgccaagcgacgagaatgagtgtcgccagatgctatttaccggctatcactataacgacggcccgacggcagtacgttatccacgcggcaatgcgcagggcgtggcgctaaccccgctggaaaaactgcctattggtaaaggcattgttaagcgtcatggcgaaaaactcgcgattctgaactttggcacattaatgccagaggcggcgaaagtcgccgaagcgttgaacgccacgctggtcgacatgcgctttgttaaaccgctggacgaaacgttaattctggaaatggccgcgcggcatgaagcgctggcgacgctggaagaaaacgccattatgggcggcgcaggaagcggtgtaaacgaggtgttgatggcgcatcgtaaacccgtaccggtactgaatatcggtcttccggatttctttatcccgcaagggacgcaagaagaagcccgcgcggaactggggctcgacgccgcaggcattgaagcgaaaatcaaagcctggctggcataa

SEQ ID NO: 374541 - DNA, 357 bp, Salmonella enterica
ttgctggtcggctggtcttttgtctggccgcagctggcctggcagtgggcgacgaaagcacccgatccgctacagcaggaaatttataacctgaaagcggatgtgatcctcactggcatgtggatcgcgctgataggcgtaaatatgttgcctgccgctgcgctgtttaggatgatgagcatgaatctgataggcgctggcgggctgcggttattctttgccggaagggggctttttctggcgtcatgtctggcgacgttacagcttaccgggctacccatcgctatgcgaagctcgtcgctggaagtcacgctctctttgcctgttattgtgctgtatccgctcctgtttgcttga

SEQ ID NO: 374542 - DNA, 1113 bp, Salmonella enterica
atggaatgggtttttaagatggcgaaattgcgggtaggaatagtatttggcggcaaatcggcggaacatgaagtgtctttgcaatcagcgaaaaatatcgttgatgcgatcgataaaacccgcttcgacgtcgtgctgttagggatagataaggcggggcaatggcatgttaacgatgcggaaaattatttgcagaatgcagacgatccggcacatatcgcgctacgtccttcggcaatcagtctggcacaggtgcctggcaaacacgaacagcaattgattaacgcccagaacgggcagccgctaccgacgatagatgtaatttttcctatcgtccacggtacgctgggtgaagacggctcattgcaagggatgctgcgcgtcgcaaacttaccgtttgtcggttcagacgttttgagctctgcggcctgcatggataaagacgttgccaaacggctgctgcgcgatgcaggactaaatatcgccccgtttattactctcacccgagcgaaccgccacgcgtttagctttgccgagatggaatcccgcctgggactgccgctgtttgttaagcccgccaatcagggctcttcggtcggcgtaagtaaagtcgctaacgaagcgcaatacctgcaggcggtcgcgctggcctttgaattcgatcataaagtagtcgtggaacaagggatcaaagggcgcgagatcgaatgcgccgtattaggtaacgatagcccgcaggccagtacctgcggcgaaatcgtactgaatagcgaattttacgcctacgataccaagtatattgatgataatggcgcacaagttgtcgtgcctgcgcagatcccttccggggtgaatgacaagatccgcgcaatcgcgattcaggcctatcagacgctgggttgcgcgggcatggctcgtgtcgatgtctttttaacgccagagaatgaggtagtgattaacgagattaatacgctgccaggttttaccaatatcagtatgtatccaaaactctggcaggcgagtggcctgggctataccgatttgatcagccgcctgattgagctggcgctggaacgccatgcggcggataacgccttaaaaaccacgatgtaa

SEQ ID NO: 374543 - DNA, 201 bp, Salmonella enterica
atgcgggcgacgttaataacaatgattgaatgggatgaagattttcgcgcacgtattggtgacgtgaattatattcatcaccgaacgcgcgtatcacgatcggtggtggcagaagtactcgcagccctgcgtaagggtaattatattgaaatgaagaaaggcaaactgatcggtattaatcgtttgctctccgaatattaa

SEQ ID NO: 374544 - DNA, 1959 bp, Salmonella enterica
atgttgaaagataaccaaaaacacaacgagtctgttgccccgaatagcgcctttctgtctgagttacaacgtgcattaccggaattttttatcgccgatcgctataacgagcagggcgaactgatcgcgaaaggcggttttgatctcgccaaatttgagcgcgcgctgaaagcgcgtaatattgatgagctgactagcggttatcagattgattttattggcaaagattacgcaaaaaaacaggcgggtgaaaaatccgttaccgttatcgttcctgacgtggaacacaatactctggcagaaaacaaaaacagccataatttttttctgaccggggataatctggatgttttacgccatctgcaaaataattacgccgataccgtcgatatgatctatatcgatcccccttataacaccggatcggacgggtttgtctatcccgatcattttgaatatagcgatcgggcgttgcaggatatgttcggtcttaatgataccgaactggcgcgtttaaaatccattcagggtaaatcgacgcactccgcgtggttatctttcatgtatccgcgtcttttcctggccaggaagctcttgaaagataccggatttatttttatctctatcgacgataatgagtacgccaatcttaaattaatgatggatgagatttttggcgaaggcggatttgtcaccaatgtgatgtggaagcgcaaaaaagagatttctaacgactctgataacgtttccatccagggggaatacattcttgtttatgccaaaaccggtcagggcgctttacgtttagaaccgctttctaaagagtatattcagaaatcttataaagaaccgaccgaacagttttcagaagggaaatggcggccggtgccgttaacggtgtcaaaagggctgagcggcggcggctatacctataaaattaccacgccgaatggtacggtacacgaaagactatgggcttatcctgaagccagttaccaaaaactggtggccgataatctggtctattttggcaaagataacggcggtattccccagcgagtcatgtacgcgcatcacagtaaagggcagccaacgaccaattactgggataacgtagcgtcgaataaagaggggaaaaaggagattctggatctcttcggcgacaacgtttttgatacgccgaaaccgaccgcgttattaaagaaaatcatcaagctcgctatcgataaagacggcgtcgttctggacttttttgccggttccggcaccacggcccatgcggtgatggcgctgaatgaagaagatggggggcagcgcacgtttattctgtgcactatcgatcaggcattaagcaataacactatcgcgaaaaaagcaggttataacactattgatgaaatcagccgtgagcggattacacgcgttgcggcgaagatccgcgccaacaatcccgcaaccaatagcgatctcggttttaaacattatcgttttgccactccgacacagcagacgctggacgatctggatagcttcgatattgctaccggccattttatcaataccagcggtcaactggccgctttcaccgagtcaggatttaccgacatgatcaatcctttttccgccagaggattgggcgtgccgggcggcgcaagcggcgaagagaccttattaacgacatggctggtcgccgatggttataaaatggatattgacgtacaggccattgatttttcgggctattgcgccaggtatgttgataatacgcgcctgtatctgattgatgaacgatggggaacagagcagacccgcgatcttctcaaccacattggtacgcaccagcttccggttcagactattgtcatttacggctactctttcgaccttgaatccattcgtgaactggaaattggcttaaaacagcttgatcaaaaagtgaacctggtgaagcgttattaa

SEQ ID NO: 374545 - DNA, 1254 bp, Salmonella enterica
atgtacacccccctgaactggacgacgacacaacgacatgtggcgtttgccagctttaccagttggatgctggatgcgtttgatttctttatccttgtctttgtacttagcgatctcgccgaatggtttcacgcttccgtatcggacgtttccattgcgattatgctgaccctggcggtgcgtcccattggcgcgctgctatttggccgaatggcggaaaagtacggacgtcgaccgatactgatgctcaatattctgttctttacggtgtttgaactgctttccgcctggtcgcccaccttcatggcatttctgatttttcgggtcatgtacggcgtggcgatgggcgggatatggggcgtcgcgtcatcactggcgatggaaaccattcccgatcgttcgcgtggcctgatgtcgggcatttttcaggcgggctatccctgcggctatctgttcgcctcggttatttttggcctcttctacagtatggttggctggcgcggtatgttcctgattggtgccctgcctgttgtcttgctgccttatatctggtttaaagtgccggaatcacccgtctggctggcggccagagcgcgtaaagagaataccgcgctgcttcctgttctgcgcaagcagtggaagttgtgtctgtatctggtgctggtcatggctttctttaactttttcagtcacgggacgcaggatctctatcctaccttcctgaagatgcagcatggttttgatccgcatctgatcagtatcattgcgattttttataacattgccgcgatgctcggcggcattttctacggtacgctatcggaacgtattgggcgtaaaaaagcgatcatgatcgccgcttttcttgcgcttccggtactcccgctatgggcattttccagcggatcattcaccattggtctgggcgcgttcctgatgcagtttatggtgcagggcgcttggggagtcgtgccgacctggctgaacgagctggttccggcgaatgcgcgcgccgtgctgccagggtttgtttaccaactcggtaatttactggcgtcggttaatgcgacgttacaggcccgcatcgcggaaacgcatggtggaaattacgggttggcaatggcgatcgtggctggcgcggtggctattttaatctgtgtatttgtggcatttggtcgcgagacccggggagtcgtcatctccggtactgatagcgacgcactcccggagtcggccgtcggtcatcgcacgtaa

SEQ ID NO: 374546 - DNA, 228 bp, Salmonella enterica
atgatgaaccccttttgtgtgggaactgttgccagtctgggcctggccagtgttggaaggtcaagcgtaatttcaggtcttacaggcgcggcagtgaatcatcgccttaaagatttgcgcaatgtgctacatattctggatgcgcctgaccagctcatcgataggtgtctgcgccaggcgtttgacgtcaacactttgccgcgactggttattcccaaaattcagtag

SEQ ID NO: 374547 - DNA, 219 bp, Salmonella enterica
atgaaacagttaccgctgcccgaagtcattatagtcttgattgaacatgccattgcctctccattctgtacccgacagttggctgattatggtacatgggtaattaaaatagaacacccagaaggtggggattttgcccgcaattgtgaaaagaagattatagataattcgcatatatcttttttatctggaaaagaaagccaaatatacatcttttga

SEQ ID NO: 374548 - DNA, 1164 bp, Salmonella enterica
atgaaaagtatcgaaaaggataaaaatcaagatattcgtgatgcggttcgttcattgtgtagtgaatttgatgataaatatcatcgtaggatagatgaaacaaaaagttatcctgaagagtttgttaatacactaaccaaagcaggttggctggctgcgctcatcccggaggaatttggaggatcaggacttggtttaactgaagcatctattatcatggaagagatcaatagatcgggtggaaattctggagcctgtcatggtcaaatgtataacatgaatactttgttacgccatggctccgataaacagaaacaattttggctgccacggatagcttctggtgaatggcgcctgcagtcgatgggcgtcacagaacctacaacaggtacagataccaccagaataaaaactacagctgtaaaaaaaggagaccgatatgtaataaacggacaaaaagtctggatttcacgtgttcaacattcagactggatgattcttctggttcgaactactccgcttggagatgtaaaacgtaaatccgaagggatgtctattttcatggttgatattaaagaggctatgaaaaatggaatgacggtacaacctattcccaacatggtcaatcatgaaaccaatgaactcttctttgacaacctggaaattcccgaagagaacctcattggtgaagagggtatgggttttcactacatacttgatggcttaaacgcagagcgtaccttgattgcggcagaatgtataggggatggatattggtttattgatcgtgttacccgctatacctgcgagcgtgaggtttttggacgtcccattggtcagaatcagggggtgcagtttcctattgcagaagcatttattggagtagaagcggctaatctgatgcgttttaaagcctgcgagctttttgatcagaaacttagctgtggagcacaggctaatatggcgaaatatcttgctgcgaaagccagttgggaagcagccaatgcctgcttgcaatttcatggtggttatggttttgcttgtgagtatgatatcgaacgtaagtttagagaaacacgtttatatcaggttgctcccatatctaccaacctgattctgagttatatcgctgagcatgtactggagatgccacgttcattctga

SEQ ID NO: 374549 - DNA, 435 bp, Salmonella enterica
atgaccgaagttcacactattgtctattgtgaagctgttacatctcacaagaagcacaagaagaaagcctcgtatgatgttccacaagaacagttttctcacaaaattaagccagatccaccgctgctgtttcgttattcagcactaacatttaatactcatcgcattcactatgatcttgattatgtcaggaatgaagaagggtatcctgggctggtcgtccagggtccactgacagcaaccctgctggtcgacctgttaaagaacaaccgccctgacgtgacaatccgcaatctgcaattccgtgctatatcccccttgttcagtcctgatccaatacggttatgtggacgtgttgatggtgatgttgcgacattatgggccgcagggccggacaactatatatcaatgaaagccacggtgctggtttattga

SEQ ID NO: 374550 - DNA, 1248 bp, Salmonella enterica
atgtctgcaacgtctttcccctctactaccgctacggaatatgccgttagccgtgtaatacgttccccgcgcctgttggttcgcgaaacgctggctggcgtgcttaccgcgctggcgctgatcccggaagtgatctccttttcagttattgcgggcgttgaccctaaagtcagcctgatcgcttccgtggtgctgtgtctggcaatgtccgtattaggcggtcgtccggcaatggtcacggcggcggctggttccgtcgcgctggtcatcggtccaatggtcagccagcatggcgtacagtatattttgcccgcggtagtcctggccggcgttattcagatcctgttcggggtgctgggaatggcgaggctgatgcgctttattcctgccgccgtgatgacaggatttgttaacgcgctcggcattttgattttctttgcgcaggtgccacacttctggagtaaaagtccgttaatctgggggctgtttgtcctgacgctgctgattgtattgtgggcgccacgcgtgattaaaagcattcccgcgccgctaattgccatcgtcctgctgaccgtgtttaccgccacaaccgggcaactgctgcctaccgtcggcgatgagggccccatgagtcgcgggctgccagggctgacgctgctgtccgtcccgcttaactggcaaacgctggcgattatatggccctgcgcgttgagcatcgcctttgtcggcctgatggagtcgctgctgacggcgaaactggtggacgatttgacggcgacgccatcgaataaaaaacgagaaagcgccgggctgggtatcgcgaatatcctggccggtttttacggcggtattgccggctgtgcgatgattggccaaaccattgtcaacgttgaaatgggcaaaggccgcagtcgcgtctcgacgctggccgccggcgtagtgttgttactgctggtcacggcgctcagcgaggtgatggcgaaaatcccgatggcggtgctggcaggtattatggcgattgtggcagtgaaaacctttagctggcacagtatccagcccgctacgctgacgcgtttacccatcgcggaaactctggtgatgctggttaccgtggcggcaacggtctatacggcaaatctggcgattggcgtcgtcgcgggcgttatcgctatgctgttgcttccccgcattgtcagacagaaaaacgcggtgacagcagaaattccatcgcccgccccggaaaaataa

SEQ ID NO: 374551 - DNA, 2670 bp, Salmonella enterica
atgagtcagtctgacacaacggtctctacccgattctcccttctaccgggaagcattacccgtttcttcttattactgatcattgtgctgctggtaacgatgggcgttatggtacagagcgccgtcaacgcctggttgaaagacaaaagctatcaaatagtcgacataacccacgctattcataaacgcgtggatacctggcggtatgtcacctggcaaatttatgacaatatcgccgcgaccactacgccatcgacaggcgaaggacttcaggaaacgcgactgaaacaggatgtgtactatcttgaaaagccccggcgtaaaactgaagcgctgattttcggctcccatgacagcgccactctggaaatgacacagcgtatgtcaagctatctggatacgctatggggcgcagaaaacgtaccgtggtcaatgtattacctcaacggacaggataatagcctgattcttatctccaccctaccgttgaaagatctctcttccggctttaaagagtccactattggcaatatcgttgattcccgtcgggcagagatgttgcagcaggcgaatgcgctggatgagcgcgaaagtttctcctcattacgaaaactggcctggcaaaatggtcactattttacgctgcgcacgaccttcaatcagccgggacatctggcgacggtagtggcgtttgatctacccattaatgatttaatcccgccgggaatgccgctggacagttttcggatagagcctgacgcaacccaggcgacgggacgaagcagtgaaaaggaggcgcctgatagtgtcagtattagctttaacggttcaaaaattgagatctcctcagcactgaactcgaccggaatgcgcctgatctggcaggtgccgttcggtacgcttttgcttgataccttacaaaatattctgctgcctttactgctgaacatcgggctgctggcgttggcattatttgggtacgccacgttccgccatcagccgggacggacgacggaatcgacatccggcagcgcggcgaataacgagcttcgtgttttacgcgctattaatgaagagatcgtttcgctgttgccgctgggtctgctggtctacgatcaggaaggaaaccgcaccgtgatcagcaataaaatcgccgatcatctgttgccgcatctcaacctgcaaaatatcaccagcatggccgaacagcatcagggcgtgattcaggcgacgattaacaacgaattgtatgagattcgtctatttcgcagccaggtcgctccccgtacgcagatttttattattcgcgatcaggaccgggaagtactggtgaataagaagcttaaacaggcgcagcgcctgtatgagaagaatcagcagggtcgcgccgcatttatgcaaaatatcagcaacacgcttaaagagcctgtgcgccaactggcggttaacgcctcagcggtcacgacgccggaaagcctgaaactggcggaccaggcggatgtattggtccgtatgatcgatgaaattcaactggcgaacatgctggaaaatgacgcatggaaaagcgaagcaacgctgttctcccttcaggatcttattgacgaagtcgtgccagcggtgctacctgctattaagcgtaaagggctgcaactgctaattaataaccatctgagcggcaacgatgagcgctggggcgatcgcgatgctctgcgccgaattctgctgttgttgattcagtacgccgtcacgacaacctctatgggtaaggttacgcttgaggtcgagcaggatgaatctgtcgcggaacgtctgacgtttcgcatactggatacaggcgaaggcgtaacgttaaacgagattgataatctgcatttcccgtatataaatgaaacgcagggcgatcgttacggcaaagcgaatccgctcactttctggctgtgcaatcaactggcgcgcaaacttggcggtcatctcaacattaaggcgcgagaaacactgggtacgcgttataccgttcatgtcaaaatgcttcctcacgatcagcatactcagattgaagagcgcctgctggacgacgttagcgtgatggtcgatgtaacgtccaacgaggtccgcgcaattgtgttacgtcagttagaaaactggggcgcgacctgcatcacaccggatgaacgacagataagtcaagaatatgatctctttttaacggataatccgtctaatcttactgcctccggcttgcttttaagcgatgatgagtcaggcgtgcggaaaattggccctggccagttgcgcgtcaactttaatatgagcaatgctatgcaggaagctgtactacaacttatcgaagagcaactggcgcaggaagagattccggcctctccgctcgggggagatgaaaatgccgagcttcatgccagcggttattatgcgctatttgtagacacagtaccggatgatgttaagaggttgtatactgaggcggcaaccagcgatttcgctgcgctggcccaaacggcccaccgcctgaaaggggtgtttgccatgcttaatctggtacccggcaagcagttatgtgaaacgctggaacatcggattcgtgagaaagatgctccaggtatagaaaaatatatcagcgacattgacgcctacgtcaaaagcttgctgtag

SEQ ID NO: 374552 - DNA, 1218 bp, Salmonella enterica
gtgcgccatctgaacgggtcgttaagaatgaaagaaaaattatggacgaaggatttttgggcgataaccgtagtcagttttattatcttttttgtcttttatgtgctgctaaccttattacctatttatatcgctgaccgcctgcatgcctctgcggataaggcgggtttattagtgacatgttttctggccgcggcaattgttattcgtccgtttgccgggcaatgggtaggaaaatattcgaataaaaagattctggtgctctcttctctggcttttttggtaattaccgcgctgtatccggtttgccattccattgagtcgctgctctttatccgcgtgcttcatggaattacgtttggtgttattaccacggtaaaaggaactatttcagcgcggttgattccggcctcccgacgtggagagggcatcagctttttctctttagcaatgggcctggcgatggtagtaggcccgtggatagggcttaatatggcccgctggaacgctttcactgctgcattctggctctgtaccgctgtagcggtgctggggattgtgctttcccttattgtgacggttcctccggtaatccgtcacgcagatggttccaggccgagcctgggggttgccgcgatgtttgaccgcgccgccttgccttttgcactggtcacctttttcatgaccttctcctatgctggcgtgtcggctttcctggcgctgtacgctcgtgagctggatttaatggcggcggctagtaattttctgctgtgctacgctattttcctgatgatatgccgtaccttcaccgggaatgtttgtgatagaaaaggtccgaaatatgttgtttatccctgcctgttggcctttaccatcggtctggtggcgttgggctacaccaatggcagcatcatgatgattatttccggcggtttaatcggtatcggctacggttcggtcacgccggttttccagacgcaaattatcagttcggttgaaccgcataaaatcggtgtagcgaattcactgttctttaacgcgatggatggcggaatggcgattggcgcctttatcatgggaatgatggttgagccggttggctatcgtatgatttatgttactggcgcggtgctcgtagtgctcgctggcgtactgtatgccgctcagatgaaaaaacgtggcgcgatgcttttggtttccgccagcgagttgcactga

SEQ ID NO: 374553 - DNA, 1023 bp, Salmonella enterica
atgaatatatgtgtaaactcactttaccgattgagcacaccgcaatttcaaaatttatattcagaagaggtgagcgatgagggacttgcgttgttgattcgcgaagtagagaacggtgatcagaattgtattgatctgttatgcaatcttgctctacgcaatgatgacctgggacacaaagttgagaaaattctttttgatctctttagcggaaaaaaacatggatcaccagatatagacaaaaaaatcaatcaggcttgccttatgttatatcaaaccgccaataacgacattgcaaaaaataatactgatttcaaaaaactacatattccctccagattactttatatggccggttccgcaacacccgacttttctaaaaaactagaaatagcgcataaaattcttggcgaccagatcgctcagacagaggaagaacaggtaggcgttgaaaatctatggtgtcctgcgcgcatggtatcgtcagatgagctatcacgtgcaacgcaaggtatgactcagggattgtctttatcggtgaattatcctattgggcttattcatcctaccactggagaaaatgtgttaagcgctcaactacatgaaaaggttgctcaatcaggtttatccgacaatgaagttttcctgataaatacagaaagtcactggattttttgtcttttttataaaattgcagaaaaaataaaatgtcttatatttaacactcatcatgatttaaaccaaaatactaagcaagagattagagcagcagcaaaaattgcaggcgcatcagaagaaggtgacgttaactttattgaaatcgatttacagaataatgtaccaaacggctgtggtctattttgtttccaagcattgcaactcttatcggctaccggacaaaacgatcccgttgctgtactgcgagaatattccgaaaatttcttaaggctttcagtagaggaacaaacattatttaataccgaaactcggcgaaaaatacatgaatacagtctcacgtcatag

SEQ ID NO: 374554 - DNA, 1221 bp, Salmonella enterica
atgtcggactttttgccgttctcccgcccggcgatgggcacggaagagctcgcagccgttaagaccgaactggacccaggttggataacaaccggccctgaaaatcagggactggaagcggaattttgtcggctaacaggcaaccaatatgccgttgccgtaagttctgccacctccggtatgcatatcgctttgatgccgctgaacattggtgaaggcgacgaaatcattacgccgtcgatgacatgggtttctacgctaaatatgatcgttttactcagcgcgaacgccgtaatggtcgacgtcgatcgcgatacgctgatggtcacacctgaacacatcgaagccgtcattacgccgcgaacaaaagcaatcatccccttacattacgctggcgcgcctgccgatctggacgctattcacgctcttggcgattatagcattactgtgattgaagacgcggcgcacacgacaggaaccgggtacaaaggtcaccacattggcgcccggggcaccgcgattttctccttccacgccattaaaaacattacctgcgcagaaggcggcatcgttgtcacggttaacccacaatttgcggataaactgcacagtatcaagtttcacggacttggcgttgatgcctggtatcatcatgtgtggcagactcattgcggccaccggagcattcgccagcttgaagaagatatcgcgcgcggcataacggcgcttcaggctattatcggaaaacctgtcacctgctcagcctcagccaagtggcgaggggataggcgcattgttcgtgcgaaagaaccgttcaacttgcggtataacagcgattgccgtagaagcgccttattccgtccgggattgattccgggccaggcagggacgccgcaaatccccgtaaccttaccaacgtgggataagattatcggccccgccgttcaggcgcaggcgttcaatgcctggattatctcccacatgttgcaggacaaaggcacgccggtatacaccatccatgcggaagtcgaagagattgtccatcagccgctgtttgaagatttgctcgttcgcgcacgcgacacggggatcaccttttgtcctctgggcgaactgctgccgacatcgccaggaattctgccgttggggcaaattgtacgtagacacatcccgggtcgtgacggttggctggagggccagcagacagtgagcgcctcatga

SEQ ID NO: 374555 - DNA, 774 bp, Salmonella enterica
atgtcagaaaataaattaaacgttatcgatttgcacaaacgctacggcggtcatgaagtgctaaaaggggtatctttgcaggccagcgctggagatgtgattagcatcatcggttcgtccggttccggtaaaagcacctttttgcgctgcattaacttcctcgaaaaaccgagcgaaggcgcgattatcgtgaacggtcagaatattaatctggtgcgtgacaaagacgggcagctcaaagttgcggataaaaatcagctacgtctgttgcgtacccgtctgacgatggtgtttcagcattttaacctctggagccatatgacggtgctggaaaatgtgatggaagcgccggttcaggtactgggattaagcaagcacgacgcgcgggagcgggcgctgaaatatctggcgaaggtcgggattgatgagcgcgctcagggcaaatatcctgtccatctctcaggcggtcaacaacagcgcgtttctattgcgcgcgcgctggcgatggaacctgacgttttactgttcgatgaacccacttcggcgctcgatcctgaactggtcggcgaagtcttacgcatcatgcaacaactggcggaagaggggaaaacgatggtcgtggtcacgcatgaaatgggcttcgcccgccatgtctcttcgcacgttatttttctgcatcaggggaaaattgaagaagaaggcgagccggaacaggtgttcggcaatccgcaaagcccgcgtctacagcagttcctgaaaggttcgctgaaataa

SEQ ID NO: 374556 - DNA, 567 bp, Salmonella enterica
atgaaaaaactggcgttatccctttctctggtgctggcattttccagcgctaccgcagcatttgccgctatttcacaaaaaattcgtattggtaccgatccgacttacgcgccgtttgaatccaaaaatgcacaaggtgaattggtcggttttgatatcgatctggccaaagaactgtgcaaacgtatcaacacacagtgtacgttcgtggaaaacccgttggatgcgctgattccgtctttaaaagcgaagaaaattgatgccatcatgtcctcgctatcgatcactgaaaagcgccagcaagagattgcgtttaccgacaagctttatgccgccgattcccgtctggtggttgcgaaaaactctgatatccagccgaccgtcgcatcgctgaaaggcaagcgcgttggcgtgctacaggggacgacgcaggagaccttcggtaacgagcactgggcgccgaaaggaattgagatcgtctcttaccaggggcaggacaatatttattccgatctgacggctggacgtatcgatgcagcctttcaggatgaggtcgcggccagctaa

SEQ ID NO: 374557 - DNA, 1407 bp, Salmonella enterica
atggataccctgcaacaaccaccgcccgcagaacctgaaggcggtctgcggcgtaacctgaagaggcggcatctgctgatgatgtcgctgggcggcacgattggcaccggcttatttatcggcattgccgaaccgttaagcagcgtcgggccagcgggagccttactggcctatctgtttgccggagccattatgctggcgacgatgatgtgtcttggcgaattatcatgcgccttcccgcactccggctcatttcaacattatgctctgatgtttatgccgtcacctgtctggagctataccattggctggctttactggtttagctgggtcttttcccttgcggccgacctcactgccgcagggtttattgcccaccagtttttccctgcggttccggtatatattttctgcctggcgattctgctcatcctgacggtcatcaatttcacctccgcaaaaagttttggtgaatgcgaatactggctttcggccattaaagttttcgctatcgtactgtttatctgtgcgggcggggtgatgatctattcgctaatgggccatagtgactggcacccgacgttaaaaaccaatggaatgtggtttccccacggttgggagcagattgtggtctgcatgacgattgtgatttactccttccagggggtggaactggtaggaaatgcggcaggggagacagaatcgccgcacgctattttaccgaaagtgatcctggggatcggtctcagaatcattttgttttacggcctggcgattgcggtgctggcgctggtctatccgcataaactggcgccaaatggacaaagtccctttgtatgggtattctcccacgcgggcattccgggggcggatacgctgatgacgctggtgatcttttccgccgcggtttctgccgctaactcggccatttacgccagttcgcgtatgttatggtctatggcgggcgatcgctttgcgccagcctgcttcggtaaaacgaacggcggcggcgtgccagtgtatgctattttaatcacggtcttgctggcgttggtgtcgttgctgacccgctatattcccgcgcagcaattttatttatatctgatcgccagtaccgggcaggtgggttgccttgcatggataaccattggatggtgtcagtatcgcttccggcaatcggtgtgtaatggaacctacgccagcgatttgctacgctatcgatcgccgcttttcccctggacggcccggtttgtcattatcaccaattttgccattatggtcggtacctggtttagtgagcaggggggagtgataatgttggttgagctggcttttatgacagggattcttttgtcatggtatctcttcagacccactttgagccgattacgtaacacagtgggatga

SEQ ID NO: 374558 - DNA, 1104 bp, Salmonella enterica
atgtatatgccagttctcgaaataaatctacgcaagctggaagagaacgcccgcacggaaaaagcactgctggcaagcagcggtattgaagtgatggctgtcaataaagtttttgacggctgcgtggaaaccgcgcaggcggttttcaacggcggaattaccgttattgctgaatcacgaacctataacttgaaaaaaatacgcgagacaggatgtacgacctgcctgttacgtagcccgtgtctgagtgaaatcgaggatgtcgtgcgctacgcggatatcagtttaaatagcgagccggtcgtattacgggcattatcgcatgaagcccaacgccaggggaaaacgcatcaggtattactaatggtagatatgggcgatttacgcgagggtatctggtttagcgaatatcaacgtattcttgagaccattacccttattgctgacctgcccgctctggaattatatggactgggtaccaactttaattgttacggcaccgtattgccaacagtaaaaaatggcgaggattttctggcgctggccgcccggctggaagccgacagcggtattcctgtccggcggctttctgcggggaactgcactagctatcacctgctggataaaggtatctggccgcacgggctgaatcatttgcgcatcggcgggctacatgagttcggcattgaatatgtcgacatgaaatacctgaatgaatttcaccactcctcaaaaccggtcgataaagcctgttctgatatgtatatcctggaagcggaaattatcgaactgaacagtaaaccgaccgtaccggttggggaactgggcgtcgatgcctttttgcaaagtaaaacctttgtcgatcatggcacgcgccgacgcgcattgctggcgtttgggcgccaggatgtgccgtcggataactgtgtgccgtgcgatgacgctatcactatcttaggacaaaccagcgatcatacgttagtcgatattgaagattgtcgtcagccgctaaaagtaggcgatgtagttcgcttggaactggattatacgggcctgttaatggcctgccagaccaaaggcatcgcctggaggtttacgcgttaa

SEQ ID NO: 374559 - DNA, 375 bp, Salmonella enterica
atggcaaaggaatggttcacggttaaggaatgtcttggcttaccggggtttccgggaagcgagcctgcggttcgcgaacgtttatataagtacagcgaagggaaagagggtgtcaggcgtaagcgtcttaaatcaaaggccgaggagttccatatttctgtcttccctctctacgttcatcgttatctggacgaaggtggggaagaacctgtgtcggatcacatttccgtacaggaagcggagcctaaagatatctgggagatgatgttcagattattgacgccagaacagcgcaagcaggtgaccgggctgtttagggtcaaaggaatgaaagccgtctttccctttctgtttgacggtaagccgccacgttga

SEQ ID NO: 374560 - DNA, 519 bp, Salmonella enterica
atgaaaacgttctcccttgtcgcgcttatcctgttgctttgtagttgctctgcgcctcatcacgacagtacgcaggccgtgaagcagttctatacttcatggatgacgacgttcacgaacgatgtgaatacccctgacgacaccaccgccttaatgcaacgttacgttgctaaagaggttattcatcgcctggcgctaatacagtccctttatgagcaggcgattgtgggggcagattattttatgtatgcgcaggactatgcgccagagtggattccacagttacgggttgggaaggcacaccctttcctcggcggagaaaaagtggatgttctgttgggtacagagtcaacgcccatccatttggaagtttatacccgttgggaagagggacgctggaaaatttaccgcgttcgggatgctgacaagggttatgaacagccgatttatgacgcaggcgccatcacccaggctgaggcatggtcagcgaaaatcgcaacagaatatgagaagtattaa

SEQ ID NO: 374561 - DNA, 411 bp, Salmonella enterica
atggcttgctattcggaatatttcagtaaactgtttttgcacctgcgtcaaaaaaacaaccgggagaatatattaacatccgacggtatttctggggcaatgttacgggcaatttatcagaagctctattgcctccagtttattacgccaggtgaacttgaattcgatttaatgactagccgttcggtaagtaatgtagtacagacaccgtcaggacgttgtcgggtttattataaacatccggacgttgaacgggcagaacatatagaggctgatattattattttggcaactgattatgtggcggcagagaaaaacctcctgaatggtctgaaagaacggattcattatgaaaatgacgtattcgttattgatgatgactttgcgatcgtatgggttggccctcgctaa

SEQ ID NO: 374562 - DNA, 1179 bp, Salmonella enterica
atgaaatcgatgataagcccacagttatccaagttgttgtctgatgctaatgatattgcacaatggttacgacacagcgcatctgagcgggatcagacccgtcatatcagcacggagcaggtggatgcctacgcgtcatccggactctgggctgtgacggtacccaaggagtatggcggtcctgattttggttataaagtgctcagtcagataacgcgccttattgcggcggccgacccctcaatagcgcaaattccccgcggccattttcatattattgatctcctcaaggccgtagctcttccttcccagaaaacgtttttctttcgtgaaatcctggcgggtaaaaaattcgctcaggcggcatcggaaatcggcggtaagaatgtagctgatattcagacgatgctgacgcaggaaagaggaggctggcgactgaacggcaagaagtattatgcgacgggctgcatacacgcggactggataggcattgttgccaaagatgacatcggcgtatttatgcatgcatttgtcccgaaagatgcgccgggtttggatataaaggcggactggtcgggctttggtcaaaaagtgacggcaagcggtaccgtgctgttgaatgatgtcgtggtaaatgaagaacatatcattccgtttaccgaagcatttcttgatgtccatccgttaggtgctgtctcacagttgatccatgcatcaattgatatcgggattgccagggaatctattgatgagacgataaaatatatcaggcaaacggcccgcccatggattgacagcggtgtggaaaaggcgagtgatgacccctatcttatttcgggaattggcgatctcgaaattcgttatgccgccgctgttgcgatgctggatcaggtagccggagaactggatgaaacagtaatcagcaccgacgccgatcttgcccggctttccgtgcgcgtggggattgcaaaagtactggcaaacgacattgcattattggccagtaataagctttttgaatttgccggaaccagttcaacccgggaatcacttaacttgcaccgccattggcgtaatgcgcgcacgcatacgctgcatgatccggtgcgctggaaggttaatgccatcggccagtactatttaaacggcgtttatcccaaacggcacaattacatttag

SEQ ID NO: 374563 - DNA, 360 bp, Salmonella enterica
gtgattaccattatgtccgtattcctattggccggaatagtgaaaggtgtgatcgggctggggctgccgacgatatccatgggtttattaaccgtcgttatggcgccggccagcgcagccagtttgttgattattccctctctggtgacgaatatatggcaactctttaccggccctgcatttcttagtttaatcaaaagattatgggggtttatcgcagggattttcattggcacattattcagcgtgttacccggtttaacctctacatcctcatggactgaagcggtgctgggtatcgtgcttattatgtatggtctgtggggggcttattgccacgaagttcccgtccccggatga

SEQ ID NO: 374564 - DNA, 513 bp, Salmonella enterica
atgctgagttacgacattgtcgcggcagttaagaatcaaatggcgaatttaggcatcgtagctgactcgactcagttgaacggactggcctcgctcccttttagttatgacgaactggtggtgtttgcgccggcaaaaggccgttggcatgataccgaaagcacgacgtttgaagagatcgtcgcggcagagttcatcggattgttcgaaggtagcgcgcttcaggagcatattgaagatcacgccaaaaagttggggcgccgccttaactaccgtgtccgtatgaccacgtttgatgccatgatgcagatcgttagcagcggcgtcggtatcgcgattattccgaagcatgccgctgagcgttattgtcatcaccatagctacaaaatcatccgcctgtcagagcgttgggctgaccgtaaactgattttctgcgcgcgggatttcgccgatcttcccgattacaccaaggaagttgtggatttcctggcgcaacccccggtcgactcatag

SEQ ID NO: 374565 - DNA, 327 bp, Salmonella enterica
atgctcaaacctattttctacagtacaagtgcaaaggttccgcaatatccggaaacagataaggcagaaaatgccggatgtatctctctatcttcagtcattcagcatgttaaaaatgttgttgaagatgttccagcatttccagaaagcagaacggtgagtggttctgttagcacagcgtacaggctttcttttgaagaggcattttgcggtctcagcaatgaagaacgtaaaaaggtgtatggtcgtctttttggaaaacaagtatttgcacatattaattccatctatcagcgtgacgctgacttaataagagaaaagcattaa

SEQ ID NO: 374566 - DNA, 939 bp, Salmonella enterica
atgaaaaaacatgttattgcagtaatgataatcaccgtattttctgagtcggtttatgcggagtctaccttatttattccggatttctctcctgatagcgtcacgacgtccctttccgcaggagtgttaaatggtaaatccagggaactggtttatgacattgataccgggcggaaacttagtcaactggactggaaaataaaaaatgtcgccattttgcagggggatttatcatgggatccctattcgttcgtgacgctaaatgcccgcggctggacttctttggcgtcggggtcgggtcatatggttgaccgcgactggatgaacagcgagcagtcaggctggaccgatcgttcaattcatccggacaccagtgtcaaccatgctaatgaatatgatttgaatgtaaaaggctggttattgcagggagataacttcaaggctggcgtaacagcgggttatcaggaaacccgttttagctggacggcaagaggtgggtcttatagttatgataatggccaatatattggtaactttcctccgggcaaacgcgtcataggttatagccagcgtttcgaaatgccctatatcggactggcgggtcattatcgtattaatgattttgagggtaatgtaatgtttaaatacagcgactgggtacatgcgcatgataatgacgaacactacatgcgcaaacttacttttcgtgaaaaaacgggaagttcgagatattatggagcctctgttaacgcaggatattatattacaaataatgcaaaaatttttgcggaatttgcttacagtaaatatgaagaaggcaaggggggtacgcaaatcatagataaaaccagcggtgattcggagtattttggtggcgatgtcgcaggtatcgctaataataactatacggttactgcggggcttcagtaccgcttctag

SEQ ID NO: 374567 - DNA, 324 bp, Salmonella enterica
gtgccggaaatagcgggggaattacagaaaggaataatgcgacgcgcctggccaagcaatgtgcgcgaactggccaatgcggcagaactttttgctgtcggcgtgctaccgctggcggaaacggtcaacccacagttgctccttcaggagccacccccgcttgaccggcgcgttgaagagtatgagcgacaaattattaccgaagcattaaatattcatcaggggcggatgaatgaagtagcggaatacctgcaaattccccgtaaaaaactttatctgcgcatgaaaaaatatggtttaagtagaggacattataaattctga

SEQ ID NO: 374568 - DNA, 369 bp, Salmonella enterica
atgactggcgcccgctatcttcatcaactggggcgtaacgcgaaaggcccgtttgtacgctatgaactcacgccggataatgccgcgcagctagaagtatttatcgaccaggcgcaaggaggtacgctggtgttgagttatcctgaatatctgacgcgcgaacagcagcaccatctggcgcgtctacaaagtctggaacatcggccttttcgtctggtaggcgttggcagcgcttcgctgttggggcaggcggcagctaatcatattgcggccgagctatattactgttttgccatgacccaaatcgcctgccagtctctttctcagcggccggatgatattgagccgttattccgccattatctttga

SEQ ID NO: 374569 - DNA, 345 bp, Salmonella enterica
atgcaggcattgttgagcgtatttctgggatatctcgcttattatatagtcagaaacagtttcactttatcgacgccttacttaaaagaacaactggatcttagcgctacgcaaattggcctgctgagtagctgtatgcttattgcttacggaatcagcaaaggcgtgatgagcagcctggcagataaagccagcccgaaagtctttatggcatgcggtctggtactctgtgcgattgttaacgtcggattggggttcagtggcgcattcttgatatttgccgctctggtagttttcaatggcctttttcagggcatgcgcgtcgcccctcttttattatcatag

SEQ ID NO: 374570 - DNA, 156 bp, Salmonella enterica
atgcgttacataaccagaattcgctgcaacttgccgatgcgcaataatcgattagccttcccagggaaaataagcgccgacgttatcggcgctatctatttactgacactatgtatgctaacgcttgccgtaccctaccataaagcgaatgattaa

SEQ ID NO: 374571 - DNA, 132 bp, Salmonella enterica
atgccaggcaggctaatgtaccaccagttatttactcgcgcccagaaattctttatcaagaagcgtaaatatttcttcggtaacaaaaataaatcgacaactatttttaatcctttgtttttaaactattaa

SEQ ID NO: 374572 - DNA, 855 bp, Salmonella enterica
atgaacaaatcagacttaccggcagaccaacagttttttgccgatctgtttagcggtctggtgcttaatccacaccagttaggacgcgtatggtttgccagccacccctccaccctgccttccggcagtttatgtatcgacctgccccggctggatatcgtgctgcgcggggaatatggtaatcaactggaaaaaacgcaacgtcggctgacggaaggcgaaatgttgtttatccctgcccgtgcggcgaatctaccggtgagcgataaaccggtgatgctgcttagtctggtattcgcgccctcctggctagggttatcattttacgaaaaccgtacagcgtcgcttttacgtccggtgcgccgtatcgaattgccacacttgcagcgcggcgaaggcgaggcaatgctgaccgcgcttacccatttaagccgttcgcctcaggagcagaatattattcagccactggtgctcagcctcctgcatttatgccggaaagtagtgaatacacgccccgatatctatcgtccacgcaccgagtttctctatcagagtatctgtaactgggtgcaggataactacgcccagccattgagcagagaaagcgtcgcgcagttctttaatatcaccgccaatcacctgtccaggctatttacacagcatggcacgatgagctttgtagagtatgttcgctgggtgcgaatggcgaaggcgcgcatcatgttgcagaaataccacttgccgattaacgaagtcgctctgcgctgcgggtatcaggatagcgattatttttgccgtctgttccggcgccagtttggtctgacgccaggggattacggcgcgcggtttcaataa

SEQ ID NO: 374573 - DNA, 2496 bp, Salmonella enterica
atgttaacaattgaatttctctgcccgctgcctaatggtattcatgcgcgtcccgcgtgggagctaaaagagcaatgcagccagtggcaaagtgatatcacttttattaatcgtcgccagaacgtgcgagcggacgcgaaaagttcgctggcgcttatcggcaccggtacgctgttcaatgatagctgcatgctgcacatcagcgggcgtgatgaggaacaggccaaacgatcgctggaggtctggcttgcgcaccattttatcgacagcgatagcgtacagcctgggccggctgaactggcggcgcgtccgctgccgcgatcgttacttcgcctgaatccggatttactttacggtgacgtcctggcaagcggcgtgggcgaggggatgctgacgctatggcagagcgacaatctggagggctaccgtaccattcccgctagcgctgaagatcttacccgtcttgaaaatagtctggcgacgctggcggaacagcttaatcaacagcttcgcgagcgtgacggcgagagtaaaaccattttaagcgctcatttatcgctcattcaggacgatgagtttgcggggaacattcgtcgattaatggttgaacgtcatctggcgctgggagcggcgattattgccaatatggagcaggtttgcagccagctttcggcctcggcaagcgactatctgcgcgagcgggtaagcgatattcgcgatatcagcgagcagttgttacacattacctggcctgaaaaacaaccgcgtaatgcgctggtgcttacgcgccctaccattctggtggcggaagacttaacgcccagccagtttttaagcctcgatttgcagtatctgtccggtatgatcctgggaaagaccggtcggacgtcacataccttgattctggcgcgcgcctccgcgatcccggtgcttagcgggctgtctgctgaggccattggccgttatgcgacccggcctgcggtgctggacgctcagtgcggcgtactggcgattaacccgaattcctcggtgcgcggctattatgccgtggcggagaagctggcggataaacggcaacagcggcaggcgtgcgatgcggcgttgcttgcctgtacgcaggacaaccagcgtatcgatatcgcggcgaatattggcaccgcgctggaagcgcccggcgcgttttccaacggcgcggaagggattggcctgttccgtaccgaaatgctgtttatggatcgtgacagcgcgccggatgagcaggagcagtttgaagcttaccaacaagttttgctggcggcgggcgaaaagcctgtgatttttcgcacaatggatattggcggtgataaaaacatccgctatctcaatattccgcaggaagataatccctttcttggttaccgcgcggtgcgcatctaccctgaattttccgggctctttcgcacccagcttcgcgctattttgcgggccgctgttttcggtcacgcgcagttgatgattccgatggtacatagccttgaccagattttatgggtaaaaagcgagctgaaaaaagcgatcgcggagctgaaagaggaaaggctgcgtcacgcgcaggatattccgctggggattatggttgaggtgccgtcggtctgttacatcatcgatcatttttgtgatgaagtggatttctttagcatcggttcgaacgatatgacgcaatatctgtacgcggtcgatcgtaataatccgcgcgtctcgccgttgtataacccgattacgccatcgtttttacgcatgttgcggcagattatccatgttgcccatgaacgaggtaaatgggtcggcatttgcggtgaactgggtggagaaagccgctatttaccgctacttttgggactggggctggatgaactgagtatgagcagcccacgtatcccggcggtgaaaagtcagctacgtcatctggatagccaggcgtgtcggacgctggcgcgtcaggcctgcgagtgccgcagcgcccaagagatagaagcgttgctgaaccagtttgcgccggaaaaagaggtacgcccgctgctggcgctggaaaatatcttcgtcggcgagccgctcaataataaggagcaggttattcagtttctgtgcggcaaccttggcgtgaacgggcgtaccgaacatccgtttgaactggaagaggatgtctggcagcgtgaggagattgttactactgccgtcggttttggcgtagcgatcccccatacaaaatcgcagtggattcgccactcgtcgatcagtattgcgcgtctcgcccagcccgtggactggcagtcggaaatgggtgacgtggagctggtgattatgctgacgcttggtgcggatgaggggataaatcatgtgaaggttttttcgcagctcgcccgtaagctggtgaataaaaacttccgtcagtcgctgtttgccgccagtgataccgacagtattctggcgctgctggaagcggagttgacattttaa

SEQ ID NO: 374574 - DNA, 1041 bp, Salmonella enterica
atggatttgtcgttactgaaagcgctgtgcgaggcggatgcgatcgccgcgtcagaacaggaggtccgtcagatcttactcgacgaagcggatcgcctgcataaagaggtgcgcttcgatggattaggatcggtattgatccgacttaatgcctcggatggcccgaaagtcatgatctgtgcgcacatggatgaagtgggatttatggtgcgcagcatctccggcgagggggcgattgatgtgctgccagtgggtaatgtgcggatggcggcgcgtcagctccagccggtccgtatcaccacgcgagaagagtgcaaaattcccggcctgcttgagggcgaacgcagcggcaacgaggtgagcggactgcgggtggatatcggtgcgcgttctcatgacgaggtgatacaggcaggaattcgtcccggcgatcgtgtgacctttgatagcgcgtttcaggtgctgccgcatcagcgggtgatgggtaaagcctttgatgaccggctcggttgctatctgctaatcgcattgctgcgcgaatggcatgatgcggaattaccggcggaaatctggctggcggccagctccagcgaagaggtgggattacgcggcggtcaaacggcggcccgcgccattgcgccggatttagccatcgtactggacactgcctgttgggcgaaaaattttgattatggggcggcaaaccatcggcaaatcggccaggggccgatgctggtgctgagcgataaatcgctgattgcaccgccaaaactaaccgcctggattgagagcatcgcggcgcaggcggggataccgctacagttggatatgttcagcaacggcggaacggacggcggagtggtacatctgagcggcacgggtatcccgacggtggtgctcggcccggcgacccgccacggacattgcgccgcctcgattgccgactgtcgcgacattctgcaaacacagcagttgctgtcggcgctgattaccggttttacgcgcgatactgtggctcgcctgacggatttcaggtgctga

SEQ ID NO: 374575 - DNA, 1083 bp, Salmonella enterica
atgacgcgattgacatcgcttcgccaatggctcaacgagcgtcaattagatgcggtactgatctcctcgcgcccgaacaagcagccgcatctggggatttccagcggctcagggtttgtactgatcagccgtcaacatgcgcatattttggttgatgctcgttattacgccgatgtaaaagcgcgcgcgaacgggtattgcatacatctgctcggcgggcagcagaggctgacgtcgctggtgaatcagattatctctgcggaaaatctgcaaacggtcggttttgaaggcgcgcaggtcagttgggagacggcgcgtcgttggcagacggaactgcgggcgaccatggtcagtgtctccattgacgcgctgcggcgtattaaaacggcggcggaaatcgatcggattcgtgaggcgtgccgcattgccgatgcgagtgcggaacatattcgtcgctttatcgcgccaggccagagcgagagggaaatcgccgctgaacttgagtggtttatgcgtcagcgcggcgcggagaaagccgccttcgatacgattgtcgccagcggttggcgcggcgcgctgccgcacggtaaagccagcgataaaatcgtagcggcgggggaatggataacactcgatttcggcgcgctgtatcagggatattgttccgatatgacccgaacctttctgatatccggcgcgggcgcgccgcaggagcatccgctgtttcccatctatcacattgttcttgaggcgcagcttgccgccattgcggctattcgaccgggcgtgcgctgtctggcagtggatgccgccgcgcgcgacgttatcgaacgggcgggatatggcgagtttttcgcccataacaccggtcattctatcggcattgaggtacatgaagagcctcgcttttcacctgatgacaacaccgtgctcgctccggggatgttactgaccgtagaaccgggcatttatttgccggagcagggcggggtacgcattgaagatgttgtactggtcacgccggaaggggcggaagtgctctattccatgccgaaaaccgtattactaacaggagtcgcatga

SEQ ID NO: 374576 - DNA, 1248 bp, Salmonella enterica
atggccattaaaaaacgcagtgcgactattgtgtccggcgtatccggcgcggcaacgaccattaaaaaaaccgaggcctcccgcaacagtttctggggcgagttaccgcagcatgtcatgtccggtatttcgcgcatggtgccgacgttaatcatgggcggggtgatcctcgctttctcgcagttgattgcctatagctggctggacattcccgccgacaccggcattatggacgcgttgaacagcggaaaattcgcgggttttaacctctccttactgaagttcgcctggttatcgcaatctttcggcggcgtgttgtttggtttcgccatcccgatgttcgccgcttttgtggcgaactccatcggcggcaagctggcgttcccggctggttttatcggtgggttgatgtccactcagccaacgcaggtgctgaattttgattcggctagtctgcattgggtgacctccgcgccagtgccgtcaacttttatcggcgcgctgattatttctatcgtcgcgggatatctggtgaagtggatgaaccaaaaaatccagttgcctgactttctgctggcctttaagacaacctttttactgccgattctctctgccatttttgtgatgctggcgatgtactacgtgattacgccctttggcggctggatcaatggcggaattcgcactctgctcaccgcggcgggtgaaaagggggcattaatgtacgcgatgggaatcgctgccgcgaccgcaattgacctcggcggccctattaacaaagccgcaggatttgttgctttcagttttaccacggaccatgtattgccggtaacggcgcgttccatcgcgattgtcatcccgccgattggtctgggactggcgactctgcttgaccgccgtctgaccggtaaacgtctgttcaacgcgcagctttatccgcagggcaaaacagcgatgttcctggcatttatggggatcagcgagggggcgattccgtttgcgctggaaagtcctgtcaccgccatcccgtcttatatggtcggcgctatcgttggttcgacgttcgccgtctggctgggcgcggtgcaatggttccctgaatcggcaatctgggcgtggccgctagtaagccatctcagcgtctatatcgcaggaattttactgggcgcggtcattacggcgctgatggtggtcttcttgcgccatatgatgtaccgccgtggcaaattgctgatcgaaagcctgtga

SEQ ID NO: 374577 - DNA, 327 bp, Salmonella enterica
atgactaaaaaactgattgccgtttgcgcgtgccctatgggtctggcccacacctttatggcggcgcaggcgctggaagaggcggcggtggaagcgggatacgaggtcaaaatcgaaacccagggcgctgatggtattcaaaaccgtcttacggcgcaggacattgccgaagcgacgttaattatccattccgtggcggtaacgcctgaagataacgaacgttttgaatcacgcgatgtatacgagatcacgcttcaggatgccattaaaaatgccgcgggcattatcaaagaaattgaagagatgactgccgctgaacaaccgtaa

SEQ ID NO: 374578 - DNA, 999 bp, Salmonella enterica
atggtttatcagcccgatgagaatcgttatcacacaatggaatatcgccgctgcgggcgcagtggcgtcaaacttcccgccatttcgctggggttatggcacaacttcggcgatgcgacacgggtagaaaacagccgggcgctgctgcaacgcgcgttcgatctgggcattacccactttgatctcgccaataattatgggccgccgccgggctccgcagaatgcaattttggccgcattctgcaggaggattttttaccgtggcgtgatgagttggtcatctccaccaaagcgggctataccatgtgggatggcccttatggcgactgggggtcacgtaaataccttatcgccagcctcgatcaaagcctgaaacgtatggggctggagtatgtcgatatcttttatcaccatcgtcccgaccccgaaacaccgcttaaagagacgatgaaagcgttggatcaccttgtgcgccagggcaaagcattgtacgtggggatctctaactatcctgccgatctggccagacaagctatcgatatcctggaggatctcggcacgccctgcctgattcatcaaccaaaatattcgctttttgagcgttgggtggaggacgggctactggcgctgttgcaggaaaagggcgtcggcagtattgcgttttcgccgctggcgggcgggcagctcactgaccgttatctgaatggtatcccggaagattcccgcgcggcgagcggaagccgtttccttaaaccagaacatattaccgccgacaaactggaaaaagtccgccagttgaatgaactggctgcgcggcggggccaaaaactatcccagatggcgctcgcctgggtgctgcgtaacgataacgttacctcggtgctgattggcgccagcaaaccgtcacaaatcgaagatgccgtgggaatgctggcaaaccgccgtttttcagcgacggaatgtgcagaaattgacgcgattctggacggtcggttttag

SEQ ID NO: 374579 - DNA, 579 bp, Salmonella enterica
atggcttttcaaatgagcgacaaagcgcagacaattaaggtttataacctgcgttcagatacaaacgaatttattggtgcgggcgatgcatatatcccgccgcacacaggattaccggcaaattgtactgatattgcaccgcccgatattccggccagccatacggctgtatttgactttgaaacccagacatggagtctgaaagaagaccatcgcggcgagacggtttacgacacaacaaacggtaatcaggtttatatctccgaccccggtccgttgcctgaaaatgtcacatcagtttcaccagatggtgaataccagaaatgggatggtaaggcgtgggtaaaagacgaagcggctgaaaaaacagcgcaacttcgtcaggcggaagaaaccaaaagccgccttttgcaaatggcatcagggaaaattgcgccgcttcaggatgccgttgatcttggaatcgcaacagatgatgagaaagtgcagctcgacgaatggaaaatgtaccgggtacaggttaaccgggtgaaaccatctgaacctgactggccggaaaagcctaacagtaatctataa

SEQ ID NO: 374580 - DNA, 1461 bp, Salmonella enterica
atgaagcttaacgataaaccccgtcaactggcagtaccctttgcgagcgccggggccaaaaataccgtgccggacaaggcgacgcagcagaccaaagagagcggtaacgcggcgtatgattcgggttttcctccggtgaccatgaccccgatttcagcgggaggtataccgccacacggcaaggattttaacggtctgatgcacgatattaccgcagcaatacggtacgtccaggctggcggtttgtacacgtataatgccgatttcgccggggctattggtggatatgcaaaagatgccattctcgccggagtctcaacaacagcagtctggctgaataccattgacgataacctgactgatccggaaggcgccgacagcgcaggctgggtaaacctgctggcagatcccctgaagctgtttctgtggcagaaaaacaatctgtcagaccttcagaataaaggaacggcacgggataaccttcaggtctacagccaggagcagacggatcttaaatacctcgccaaagaccagaacggtggcgatattccggaaaagccgctgtttgtacaaaatatcggagcgcttcctgccaacggtacggctgttgcagcgaacagactggcatcacgcggcgcgcttccggcactgactggcacaacgaggggcagtgatggcggcctgataatgggcgaggtctacaataatggctatccaacgccatacgggaatgttttgcgactgaccggaaccggtgacggggaaatcctcattggctggagcggggttaacggtgcgccagcacccgcctatatccgtagccatcgtgatacctctgacgctgagtggtcagaatgggcgatgttctatacctccctaaatccgccgccaccgcccccagatttgcatcctgtcggcgcggcgattgcgtggccgtctgacaacatccctgccggttacgccctgatgcaggggcagtccttcgataagtctgcttacccgttactggctatagcgtatccgtccggcgttatccctgacatgcgtggctggacaataaagggtaagcccgtcagtggacgtgccgcactgtcgcaagaaatggacggtaacaagcggcacgcgcacaccgcgcgggcacaggatacggatctcggaacgaagagcacctcgtcatttgactatggcacgaaaagctccagttctggcggcggccacgtccacgaattcggtagttacgtaaattcatactggggggactctaaccatacctcctttttaaccgggggcggtgcatggacgaaagttgctggcgaccacgttcacaccacctggattggcccccatggacatacgatgtatatcggaccgcacggccacctggttattgttgaccctgacggtaatgaagaggtcacggttaaaaacatcgcctttaactatattgtgaggttagcgtaa

SEQ ID NO: 374581 - DNA, 603 bp, Salmonella enterica
gtgcagaatgtggctgcaaccgtgcttgcacagtatgccgccagcccccgactcaacgccctcattaacagctttaacgcagcgctttcccccgacagttttatcaatgatttttatgactttatctggaacatcgataccgcagaaaagtacggtcttgatatctggggaaagattgtgggcgtcagtcgccggctgacggtaaaggacgattttaattacctgggcttcagcgaggcacggatggacaacccggtaatggatgacccgcgtccgtttaatcaggcaccgttttacagcggaaaatcggttacccggaccgttgacctgtctgatgagatataccggcggctgatactgatgaaagccatgtcgaatattactgactgctctgtgccggatattaaccggatgctgcggtttatgttcggaaaaaaccgccgggcttatgttctgaataatggtggactgaggatgagttacatctttgagtttgctctctcgtcggcagaactggcgattatccagtcgtcgggcgcactgccgtccccgccgggtgtttatgtctcagtggttttaaaggagaccagtaatgaagcttaa

SEQ ID NO: 374582 - DNA, 1242 bp, Salmonella enterica
atgagtgaaaataaatctttttctaccgcagtacccgctgtacgtattacggacagcgggctgaacgtgccggatgaagcggatattctgagcggcaggctcagcgatttttccggtgcgctgggcggcgcaatgagtaccagtctgagcagtccgcaggggcagcttgcatcaagcgaaagtgccattatcgcggataaaaacgatcagttgctgtatatcgttaaccaggtaaaccctgacttttccagtggacgctttcaggacgcaataggaaagatttatttcctggaacgccgcggggctacaggtacgacagtaacggcaacctgtacaggactggttggtacgctgatcccggcgggcagtatggcgcaggatgaggccggctataagtacgtcagtctgtcagacgctacaatcggcgcatcagggcaggttgatgtggtattcctgaatttgtccaccgggcctgtcggctgtccggcgggaactctgaataaaatttataaggcaatacccggctggtcaggtgtcactaacgccagtgcaggtgtaccgggcagcgacgaggaaacccgcgcggattttgaaaaccgtcggcgtaattcagttgcccgtaatgcccgtaatattctggaagccatccggggtgaaatactctctacggtggaaaacgtggtggatgtttacgtcactcataatccgaaaaaaacggaacaaaaagccggggtcagtcagtatccgttaacacccggttcgttttatgttggcgtgtacggcggcagtccggcagatatcgcggcggccatctggcgtaaggctccgccgggtattgatatgaacggcgacacaacgttcaccgttgcggataaggagtacgatccgccgtatcctgaatacgtgatcacctggcagacactcaaaccggtcagtctgcatgtcagtgtgacgctgaaaaaaagtgactatctgccctcagatattacccaacaggtacagcaatccgtgttgtccgcgtttaacggtacagatggtggtctgcgggcaagggtagcctctgttgtctccgcagggcgctactatgccggcgtttacaaaaccgatccggaaaatatcgatattctgggccttacggtgagtcgtgacggttcgtcatggacaactgctgtcactttcgggatagatgagatcccggttctggatgtgtcgaatatcggtgtgaaactacaggaggcgtaa

SEQ ID NO: 374583 - DNA, 357 bp, Salmonella enterica
atgcagtcacgatcgcttcttctcgacaccgggacatgggacatcctgctggatgataccggaaatcttgccattactgataatccccatgcggtagcccaggatgtggcgtgtgcgtgcagtacctttctgggggagtgctggtacgactcaacgtccggcataccttactggtcacgcatcctcggacactggcccggcacgcaactggtgaataccaccctgcaacaggaagcacttaaactgccgaccgtgagcgccgcaatttgccaggtctcggttgataaagcccggacagtaacgggagtgctgcgtattacagataccaataacgacatttttacaatactgctatga

SEQ ID NO: 374584 - DNA, 675 bp, Salmonella enterica
atggcacaactcagtaatccgacggacgtaaacagcgaaatcaatgcgcaggattttatgctgcggcagtttctcgggaaacacgtatttatcactctggggcaggtagtggcggtggaaggggagtttattgatgcccgaccgatggtaatgggcgttgcagcagacggttccccggttgagcatgaggtgatttataaccttcccgtatggcggttacaggggggcagcaacgcggtgattatgccgccacatgtgggcgatattggtttcctcggcatctgcgaccgggatatcagtgcggtaaaagccacgcgtcaggccgcgatgccggggtcaaaacgcacccataactacgccgatgccatctggcttggcggtgtgcttaacggtgcgcccgtccagttcgtggagtttgctgacaaccagatacgggttatttccccctggaaagtggagatttctgcgccggaaggcatcgtgaacgcctcgaaaagtttcactgttaactcaccaaaaatcgcgcttaacggggatgctgccgtcagtcaggggcttaatgttaccggacagtctgagctttccggtggcgcgcagattggcggtattgatttcggaaaccatgttcaccgtggtgttaagtccggcggttcgaccacgcagggaccgcagtaa

SEQ ID NO: 374585 - DNA, 867 bp, Salmonella enterica
atgagttatgtacagcgtgacatcaccgtggagttcaccctgtcagacgggcggacgttcgacaagggtaagggcaatattctgactgtttcaggggctaaatgttttgccactgtcacggtatatggcggaactgccggaacgcagataaccctgtatatctgggggttgtctccggcacatatggccgacctgagttatcggggcgtgtggcgacccgctcaaagtacggccaatgaaatgcgggtacgggctggtggacggcttattttcgagggagatattaccgatgcgtatgcggactataaccaggcgccggatataccccttattctgaccgggcaggttagcttcaacctgcgtaatcagacagtggccgatttcagcgcgaaaggtgatgtgccggttgcagatatcatccgtgcgctggcgtcatctgccgggctgaaatttgaaaatcagggcgtcagtcgcagcctgtcgaatccacacttttccggaaaccttgtacaacaaatgctggatgccgcttcagccaccgatattaacatcgacctgggggacgcggagaaagtcaccatctggccgaaggacaaagccctggatattccgccgttgtatatttcgccagatcacgggcttatcggatatccggtctataccatgaccggcctcagcgccaccacgatattttgccccgatctttttatcggtcggcgggtccatctggaatcgtcactacctaatgtgacaggcgattaccagttaaccggagtgatacacaccattacctcgcgaaccgtgggcggtccgtggagttccaactgtaccatgacaaggcttaatgataatggcacaactcagtaa

SEQ ID NO: 374586 - DNA, 303 bp, Salmonella enterica
atgctggaaattgttttatctcccgtcaaagcccagcagtttacggtgacactgggtgctcaggtctgcaccattcgcctgaatcagcgtactacggggatgtatatcgatatcaccgttaacggtgagccgtgcctgtatggcgtgctgtgcctgaacaataaccggattgtccgatacggatacctgccgtttcagggcgatctgtttttttccgacacggaggggaaccacgatcccgactggcgggggcttggttcacgataccggctttactggctgtcgcctgaggagctgaaatga

SEQ ID NO: 374587 - DNA, 711 bp, Salmonella enterica
atgagtttttctttcgataatctttccctgaataacttttcgctcaatgaaagtaacgtactgagtgccattcgtggcggcggtgtcctgggactcattaacagtgtactggcaccgtcattcggtatttattacgcatggaatgatcctgcaggtgttcatcagaagggcgggaagcctttctccccggattcttttgttgtcgttgaggtgggggcggaggcttctgtttccaccgcccccgtagaacagggagcctataccacctttaataaaatccagcgatcgccggaactgcatgtgactttcactgtagaggggtggacggcgttttccggggccgtcccgaacctgacaaatttttccaccacctcgcgatcgaatgtgctggaaacgcttgaaatgatgcgtaccacggcaggactttacgatattgagacgccggacaaaacatggacatcctacgacctggtgaaatacgactaccgaacgcgaagtaataatggtccgacattactgacggtcagcgcagtattccaggcagtaatgaatacaggagaggtgtcagtgggaagtacggataaccagtctcccacggacaacgataaagcaaaaggtgcagcatcggttaaaacacagccagttacggcgtcggtgacacaaccgtcagacgctgacagacgaagcgttatgaacagggggatcacctga

SEQ ID NO: 374588 - DNA, 2172 bp, Salmonella enterica
atggcagcggtacttgatgagctggttctggcactggatatagaaagtaaggactttaccgccggggaacaggctgcgcacgctgcactggaccgactgaccgccgcgatggagcgggtggcggacgttttcgaactggggcaaaaacaggccagcaatgccctggagaaaacaggcagtgatgcggataaagctgcgcgtgagacggaagccgccggcgagcgcacgggtaaggctctgaagaaaacaagttctgacactgataaagccgcgtccggtatggagcaggcggggaagagaaccggtgatgcgatcgcgaataccggtaaaaaggccgaaaaaaccgctaagggaatggaggcagcaggcaaacgggcatcaacgtttttttccggcatacgtactcagatactggcgctggcaggcgtcaccctgacactggggggaattaaaagcctggtcacgggttttgccggtgatcttaaccggctgtcaatttcctccgatgcctttggcatgaaagcgaaacatctggacggctggatacgcgcagggcaggcgaatggtactgacgctggcgagatcaccggggcgttttcccggattacggatgcaaaagccgcgttcaaagccggaaagtcctttgatcctgtgttgcaggatttgtttcaggttgcagcccgtgcgggtgtcagtgttgatttaaatacagacagtaccgaagtcatcatgcgcaagctggcgtctgcctttccgcgactgacaaagtcagaacagacagcctacggtaatgcactggggttcagttatgccgggcagcagtttcttggctcaggtcatgctcttcaggatgtggatgactttacatcccgttcgcaggtctccgacgataaaatccggaaagcccgcaaattgcgggaagcccttgcagaactggaccaggtctggtccaacatcgggatgacgattggcaccgcgctgatgccgtatgcgctggaattcagcaagtggctggagaaactcggtgactggatgcagcaacatccggaggaagtgaacaagtttatcaccacatttctgaataaagttgagtcagtggcctcttgggtaaataaggctgccggagaaatggggggctggcagaatgtcattattacgctgatcgggctgaaagtggcgtcatgggtgctggggctgactaaagccctcaacggtcctggaggccttctttttgcaataacggcgctttacccggttgttgacgggttaatgacatccatcgttggcaggaagaataaggactggctggattcgcatggttttttctgggcttcagacgggactttctttttcaataagaaagagatggaagaataccaggcaaaactggatgccggagaaaagcctggcaacatcacccatgcacaatcacctacagtatggcagcagggaatgctggatactcaggcttctctggcaaccgggaggggagcagcctccggggcatcctggctacagggtatgcgtgcgacgcaggaaaaactcggtaatgccatgcaaaaccgcccgcgttcgacgaaggccggggaagccctgttaggctggctgcaaccgaaactgtcccaactggaggcaaaatataacctgccgcccggactgctgcgtagcgttgcgatcaccgaatccggtggtaatcagtttgccgtttcccgtgccggagcgatggggctgtttcagttcatgccgcagacggctaaggagtttggtctgagggggaatgacgcctttgatcccgaaaaatccgctgatgccgccgccagaaaattgggtggcctgatgcggttttttcatggcgatctggctaaggctctggcggcatacaactggggtgagggaaatgttcagcgtaaggggctggctgctgctccggaggagacccgtaactatattccccgcgttctggcgaatctgcctcatccgggtgcggcaatggccgtacagtcgcgtcatccggcgcctgtatcgcagtccaccgtaacggaaaccacgcatatcgggacgctgaatgtcactacaacctcggacaatgtgaagggcattaccgatgatgcgcgtcggcgtctcaggaattcggcgcttgtttcggtttattccagcggggtaacaggatga

SEQ ID NO: 374589 - DNA, 405 bp, Salmonella enterica
atggcccgtaaagagaagtttatcactattgatggtcaggggcgggataaaggcaaggtatttcaccttaccgaaatgcctgcctcgcaggcggaatggtgggcgatgcgcgccattatggcgatggggcgtggcggcgtggatttaccggatgatgttcgcagtatggggatggctgcgctggcgctggaagggctgaaagcgttatcaaagatcccgccggaagaggcaaagccgctgatggatgagatgctggattgcgtacagtttgttcctgacccgaaagatcacagcgtacggcgacctcttattgaagccgatattgaggaaatcaccaccaggcttaatttacgtgcggaggtattcagactgcatgtggattttttcagtaccgccgccagctag

SEQ ID NO: 374590 - DNA, 447 bp, Salmonella enterica
atgtcaggtaacaacaacaccatcactgcggcggacgccattatcacgctgaccgtgaataacctgtatccctccggtatacaacttcagggatttgcagcagataacgtttatggcaccgatccgctggtactggcggaaaccgtccgcggtattgacggtaaactgtctgcgggatttgtgtacagcaacattatccagacgtttcacatcatgccggactcacccagccgggatatttttgatacctggtcaaccacatcccggaccagccgggctgtattccgttgtaatgctgtcgtgctgcttccggcgataggtcgtaaatatacctgcgtaaatggcgtactgaaacaatggaaagcgctgcctgatgcggcgcgtacattgcagccaggacaggcggttatcgagtgggaaactatcactccggaggtttttaactga

SEQ ID NO: 374591 - DNA, 1485 bp, Salmonella enterica
atgccaatcccactcagtaaagatgtacagataaatcccggtgtgctggctgtggcgggtaatgccgtcgatcttaatggcctgttgctgacaggcaatccactactcccggttggcggtgtggttccgttttcctccccggatgatgtggccgcgtattttggtgcattatccgatgagtacgcacgcgctcagctttattttcagggcttcaaaaatgccaccaggacgccgggacaattgttgttttcccgtttcaatcttgccgcatcggcggcctggttacgaagtggttcgtttaagggcgtgactattgaacagctacaaaaactttccggtacgctgacgctgagtattaacgggaaaagcgccagcgctgaggtgaattttaacggcgtcaccagcttcgctgctgctgcaacggcactacagacagcgctgaccgcggcggtggcaacagtggtattcgataccacacagaatgctttcgtcattactgccgccggggcgaaaccggagagcaccacgataacgttcggcagtggatcggctgcggaacccctgaagatgaccagtaatacgggcgcggtgatatcccagggcgcgcctgtatctgatgtacctgacacgatggtagccattaaggacgcttcccagcaatgggcggggttttccacggtatctgaggtcactgacgagcaacacctggcgttttctgcctgggcaaacgggcagggtaagcgttacttttacgtggcctggacaaccagcggtaatgccaaagtaaaagacagtaccgatcatattgcgtaccagataatcaccgtcaataactacagtgctgttgtaccggttttcgcgtctgatggtaaccgggcggctgcggtactggggtatgcggcgtgccttgattttgtccgaccggaggggcgagtgccgttcaagttccgcgagtatgaaggtctggccgccgatgttaccagtggcagcgattacgacgcgctgatcgctgcaggttacaacttctacggaaaatatgcggaaaacagtgtggtggaagattactgggcagatggcaccattaccggcgattttaaatggctggacagcttctgcgggcaaatctggctgaatgctaatttgcagggagcagtgatctcgttattcaagtcaaaccagactatcccctacaacaatgaagggcgggcgctggttgcggcatcaatgagtgacgttatccagcagtacaaacgctggggcggtatccgtgaaggggtgacactgacggaggcgcagaagaagcagatcaacaatgttgtgggtgaagatatctcctcaacgttgtttgccacaggctactacctgtacatcggcgatatgttgccgtccctgcgtccgacccgcagcagcccatcctgtacgctctggtactgtgacggcggcagcattcagaagcttgttattgcatccacggaggtccagtaa

SEQ ID NO: 374592 - DNA, 546 bp, Salmonella enterica
atgtcttcaggtgtgaccctctccgttacggaaagcgacctctatcaggccctcggtgattatctccgggggcttttttctgatgccgggattgaacgaacacaacagaaccgggtcccgatgcctcagggggacttcatcaccatgacaggtattgatgttaccggattatccactgcggtagtgacatactctgcgccggaacaggccggtgaaggctctcagcatatcacccgtaccacaaaatggcgttgccagcttgatttctacgggcctcatgcggcagataacgcgcaggcgctggccacgcttttccggtctgaattttccgtgcagcttttccggcagacaggtgggctgatttccccgctgtattgctcagatccccttaacaccacgttcgtcaacggccagcagcagtatgaaccgcgccggacgcttgatattcagatgcagattaaccctgtggtcacaacacccctgatgttttttgacaacgtgatcacccggacaacggaggctgataatgccaatcccactcagtaa

SEQ ID NO: 374593 - DNA, 366 bp, Salmonella enterica
atgaaccttcacggtatagtttccggcgcggtaagccgggtaaatccctggacggacgcgctggtttatcgctcgcgtgggagtacgcagcgggccgattactcccgcgtgcctgagtatgacgatccggttcccgtcagggtacaaaaacaggccgtcacccaggcggatttacgtcatctcgacaatcttaaccagcagggcgttttcgccacactgtataccgacggtaactggtgcgggcttaaccgtacccggcaacagggtggcgataaatttgtcattggcgatgaaacgtggctggcggttgaggtaccggaaatctggccggactggacgagggttattgtatgtcttcaggtgtga

SEQ ID NO: 374594 - DNA, 585 bp, Salmonella enterica
atggtaaacaaagtcacgggcggcagacagttccgacagaagctgaaacaggttgccgcagacctttcatcgggcaaaaaacttaaagtgggttttcttgagggggcaacctaccccgatggtacgccggtggcttatatcgccgccattcaggagtttggcggtagtgcggttatacccgcccgcgagcagacgctccactttcgctataacgaaaaaacgggagaaatcgggcatcgctttgtcaaagccggtaagggtaattttgctcaggatgtggttattcctgagcacacggtcaccattccaccccgtccgttcttccgtaagatgattgaacataaaagccctgaatggggcgaaaaaatggcgacgctcttacggacgaatgattttgataccgcgaccgctctggtgtacatgggggagcatatcaaagggcagttgcagatgtttattcgcgactgggaaagtccgcccaacgccgcatccactgtccggcaaaagggctttaacaacccgcttattgaaaccggtcatatgatgaacagtgtcgattattctgttgacgggagcaaaaaatga

SEQ ID NO: 374595 - DNA, 447 bp, Salmonella enterica
atgggtacggtaacgtttgactggcaggcattttcggccctttacccggagttttccgctgttggtcaggtttcagcagccgccatgtttggtaaagcgaccacgttatacctggataatacggacgacagtccggttaccgacctgaacgagcgggaacagcttttgttcctgctggttgcgcatctgtgctcgttgcggggactggggagcgggaaagatggacaggccggactggtgggacgtatcaccagtgcgtcgcagggttcagtttccgtctccgtggacaatagcggcagtaacgatgcgtcatggtggtatctccagacaccttacggcgctgattactggcagacgacggcgccgtaccgttcaatggagtatgtaccgggcggttcaccttcgcgttatcctgggcattactaccggagaggcagacgatggtaa

SEQ ID NO: 374596 - DNA, 339 bp, Salmonella enterica
atggtaacagtgggctgcaaattgccgaatggtctggtgctggaagtgggaccggagcgggtacaggtagcaggctggcggaataacgccgttaaaatcgttgggggttatggcctgacgcaggttgaaaaggcgttctgggaagcctggctggcggagcacggccagcaaccatatgtgaaaaacggcgttatttttgcgcaggataaggcgaacagcgctgccgcgcaggctacggagcaggaaaccgtgaaatccggccttgaaccgctgccgcagaaaaatccggctccgggcattaaccgcgatgatgaagtgatggacaaacctcaggagtaa

SEQ ID NO: 374597 - DNA, 1029 bp, Salmonella enterica
atgaataaatttaaacagcattatgcgacggtaagccgcgactacgggattatccttcccggtgcgcaggcttatttgcccccggaatacgccgccgattacggactggcgatggacgcgcagcctgcgctggttaccgcggctaacagtggtatccctgcatatttcaccaattacgttgagccagaactgatccgcgtgctggtgacgccgatgaaagcctctcagattctgggcgaaaccaaaaaaggtgactggacgacactgtcggcacagttcccgattgcagaatctgccggggaggtgagttcctacggggattacagcaacaacggtattgtgacgtctaacgtcaactgggtaccgcgccagagctatcacttccagacgtttactcgctggggcgagcgagagctggatatgtacggcgcagcccgtattggctgggcggcagagctgaacgtggcatcggcactgacgctgaataagttccagaataagtcctacttctatggtattgccggactggcgaactacggtttgctgaatgacccgtcgttatccgcaccgataaccccggataccgtggacggtaagctgaagtgggacgacaaggacggacagggcgtgtatgacgatgtcgtgaagctctttaaacaactggtgaaacagactaacggccatattgagcgtaccgacaaaatgaagctgtgcatgtcgccgctggcggaggtgaacctcaccaagactaaccagtacaaggttaacgtgtccgatctgctggcgaaaaacttcccggcgatgaccattgaaacggcggtggaatacacctctgacgctggcgagctggtacagcttatcgcggagcgtctgggggaacaggatacaggctattgctctttcactgaaaaaatgcgcgcccatgcggtagtgactgaatcatctgcctggaaacaaaaaaaatctgccggtacctggggggcgattattcgccagccgctggcgtatgcacaaatgctgggggtgtga

SEQ ID NO: 374598 - DNA, 483 bp, Salmonella enterica
atgaatacttttcagacacacatgaaccagtacccggcaccggggattccgggggcatttgccagtgataaccctcacgcctcgtatgtggcgggagaaggcgcgctgattaccggccctgacggactggttattgcccggtttgcctgggtaaccaaaggcgttgccgccaataagggaaccggtgcgccggcgggttttgttccgcgcgacgggcaggcttctgttgtggaatggctggctggcgactcgaacactatttacccgggacgtgaatgtaccctgatggtatcgggggacttctgggcgctgaccaccaccgctgcgacggtcgggcagaaagtttttgcctccctgaccaccggggagatagccacaggggcggcaggcaccacgatggcgggttttgtcgaaaccgggttttccgttgccagcgctgcggcggcgaaagaagttattaagatcagcacctggagcaaatga

SEQ ID NO: 374599 - DNA, 1347 bp, Salmonella enterica
atgattattaccgaaatgctggcgtttgaccgggcatcggtaaggcagttcgataaagtaggtcggctccggattgagcgcagtaatctcagcaaggcgaacgtctgcggttatttcgggcatgaaataccgggggcggaagcgctgggactcgaccctcaaaaactttatcagctttaccgtgaccccgatgaactgcgcaaggcagtttcaaccttcaacaatattcccgtcctgtgccgacacaaacccgattatccgggcgcgcccgcgcgcgagtaccgggtggggacgactcatgccaacggtgagtttgacgggacctatctggttaacggcatgtccatctgggacaactccgccatcgcggggatagaaacggatgaacaacgggaaatctcatcgtcatatgcctatgtggcagatatgacgccgggaaccacccccgacggtgaaccgtatgacggcgttatgcggaatatcgtgggaaatcatgtggcgctggtcggcgatggccgggcggggccggactgtcttgttatggactctctccctcaggagctaaaacgcatgaaactgagtaaaaaagaagtggcggtgcttaccgcgctgggaacctatcttgcgccgcgtctggcacaggatgcggctcccagggatttgttacgcctgatggcgcagcataagcgcccggcagctatcgccagcgcagtaaaaactgcttacagcgaacggctggcacaggatatggatattgaaccggcggagctggcgcaactgatggaatcagcagaagccgtgccggagctggccggggacgatgataccgggttaactgacgagccgaaggcatttgataccgacagcccgatggaaagtgtactggcgttgctgtccggcaaagttcctgatgatgtgctggaaaaaattaaatccgcactggctccggcaactgacgaagatcccgaaataaaagaggctgatgtgaaacccgacgatgtgaaagtcgataaacccgcgatggatgcggcaatcaggctggcaactgaccaggcaacgaaacgggctgctgaaaatttccgcgccgttcgtgtggctgaaaccgaggtgcggccgctgattggcgatgtggtggcgatggactgcgccgaagaggtttaccgtaccgcgctggaacagacggggatcgatatccagggcattcaccccagcgcgtaccgcagcatggtgaagtttgccgttgagcagaaacagacggctaaaggtccgcgtgttgcgatggaccaggccagcgcatcgacgtttgcggcagatttccccggtgcaaaactgaaacgaggttactga

SEQ ID NO: 374600 - DNA, 690 bp, Salmonella enterica
atgcacaacagcgtactgtactggctgcgggctgagtaccgtaaaacggacctcgcccaggacgcatcgccggttgctctgatgcgcagtgccatgcagaaactcgccaggcgctggcagaaaaagttcgacgagatggctgaacgcctggcgagacggtttgccggtgatgttctgaaaaacagtgatacgtcgctgtcaacggcgctgaaagatgcaggttttacggttccgttccggatgacggcggagatgaacacagcgcttcaggccagcatcacggagaatgtgaacctcattcgctccatcccgcagcaacatctcactcaggtggaaacactggtcatgcagtctgttggccgggggcgagacctgaaaaccctgaccgatgaactggaaaaacgctacggcgttacgcgacgacgcgcggcgctgattgcccgcgaccagaacaataaagcaacctcggtaatgcagtcggccagacagcgctcagtgggcatcactgaaggtatctggcggcattcccgcgcgggtaaaacatggcgtccgtcacatgtgaaagcaaacggtaagcggtttgacctgagtaaggggatgtttctggatggtaagtgggtactgccgggcgaagaaatcaactgcaagtgcggctgggaggccgttattcccggactggagaaaagatga

SEQ ID NO: 374601 - DNA, 1521 bp, Salmonella enterica
atgtggttttttaaacgtaaaaaaacggtgacaccgcgagaaagtccgcctgaaccacatccgatgacgatcagcgatgaggtggttgcagaggccggacaaaaaccgcagcgtgaatttgttcgctatgagccaccgccgggagtcattcccgaagacatacgcaatgctgtactggcaatggactcgactccctacgatacactgaacagccagtatcctgattttgtgtacggaggatttccgggctatccgtatctggcacttcaggcgcagttaccagagtaccggcgcatggtcagtgtgattgccgaggagatgacccgcaaatggataaaggttaaggcggtcggggtaggggacgacagccgcgcgccgcgcatagcgcagcttactgatgcactggagcgctataacgtacgggatgccttcaggctggcggtggagcatgacggctttttcgggcgagggcaaatttatatcgatgtgcgttcgccatcgggtatgtcggcctggactgacccggcggagctggagtccaggctgtttatatccgacaaaaaaatcccgaaaggttccctgctggggcttcgtattattgaacccgtctggacgtatccgggtatgtataacgcggataatccgctgagtgatgatttttaccgtccgtccgaatggtacgtaatgggaaaaacggttcacgccagccgcatgattgatctgatttcccgcccggttccggacatgctgaagccggcctataactttggcggcctgtcactggttcagattgccgaaccttacgtcaacaactggctgcgtacacgcgacagcgtgggcgatatgctgcattcgttttcgctgagcgggatcatgacggacatgagccaggcgttaacggggaaaagggacccgaattacgcaaaacgcgcggatctgtttaaccgtacccgtgataatcgtggtctgctgatactggacaagcagaaagaagagtttttccagttcaacacccccctgagcggcctcgacacccttcaggcgcaggcgcaggagcacatgttctttgtcagtgccataccgtcagtaaagttcgccgggctgagtcctacggggctgaacgcgtcgagtgagggtgagatccgtgtgttttacgacaccatcgccgcgcttgccactcgccttctgaaaaaaccactgaaaaaggtgctggatattatccagttgtctgagttcggcgatatcgaccctgatatcacctttgaatttgagccgctgcacgaactgacgcgcgagcaactggcgaacatccgtaaaactgaggcggaaacagatcagatttacgagagcgccggagcggtgaccaataacgaggtacgcgaacggctggctactgcgccggacagcccgtacagcggtattgacctgagcggagagatcgaaattgacgacaccgaagaaaatccgccggaagacccgaacgcagaccctgagacggatttcacccaacgcagggattga

SEQ ID NO: 374602 - DNA, 1620 bp, Salmonella enterica
atgcctttaccattcccctttgactttaaaaatcctgattatgttcaggttttcgaatggcgaatggagcgtctgcaacgtatcaggaaggctcccgaaactctccctgctctcaggcagttttaccgtacaaacccggcgcagttcatcatcgactggggcatgactactgacccgcggaatctcgattatggtcttccggtcaccatcccttttttgctgtttccacggcaggaggaatggatcgactggattatggaacgctcgcgtaaccatgagaatggtctgactgaaaaaagccgcgaaatggggttgagctggacatctgtcggtctggccagtgcgttatgtctgtttaaccgtgaaatggttatagggtttggttcccgtaaagaggagtatgtcgacagcacggttgatccaaaagcgctgttctggaaagtacgcaaatttatagcaactcttcctgctgagtttcggggtggctgggacgagagaaagcattcacgttttatgagtgtggagtttcctgacacaggcgcggtaattaaaggagaggctggcgacaatatcggtcgtggcgaccgtacgaccctttattttgtggatgaggctgcttttctccagcgaccattacttattgatgccgcactttcccagacaactcgttgccgtatcgatctctcatcggttaacggcatgaacaaccccttcgcgcagaagcgacacagcggaaaaatccctgtgtttacgtttcactggcgtagcgacccgcgtaaggatgatgagtggtaccgcaaagagtgcgagaaaattgataacccgatcatcgttgcccaggagctggatcttaattaccaggcatcggcagaaggtattctgatcccatcagaatgggtacaggctgcggttgacgcacatatcaaactggggattcagcccagcggtcaacggctcggtgcaatggatgtcgccgacgaggggcgggataaaaacgcctgttcccttcgttacggcttcctgctgaatgatgtccaggaatggtcgggtaagggtagtgacatctatgactccgtggttaaggtcttcggcctgtgcgatgactttggcgccgatgagttccgctttgacgaagacgggttaggcgctggcgttcgtggtgatgcacgcgctatcaacgaactgcgggaagctgaaggtacagatcaaattactgccacaccattccggggaagtggaagcgttttttatcctgaaaatgaagctgttcccggtgataacggcaaaccggcacgtctgaataaggactttttcgccaatgccaaatctcagggctggtggcatcttcgcaaattattccgcaatacctttcgtgcgctaaagggcatggagtatgacccggatgagattatttccatctgcagcacgatgaaaaataaagacaggcttttgatggaactgtcacaacccacctggtcaaaaaatgccgtcggaaaaattcttgttgataagcaacctgacgggacgaaatctcctaacttggcagactcagtgatgattgcttatgccccgatggaaatgcccgtcgtaatttctgatgattttatggagtggatttga

SEQ ID NO: 374603 - DNA, 189 bp, Salmonella enterica
atgccggatatgaaagatatcgtcaccgacgacatggtgaaaaacgccctgcgttcagacacggtaaccaccgcggttaaaacgcagattaaatccacactggatcagcagattgacgctgcggttgataccgcgttgaccgatattctcggtagtgatgctgataatacggttacgcaccaggtgtaa

SEQ ID NO: 374604 - DNA, 465 bp, Salmonella enterica
atgaatcgtataaccaccggcgtaatagtctcgttgctgatagtgatcgcagcgctgggctggactaccagtcactatcacggtaacgccgtgaagtacaaaggccagcgtgatactgctactcacaacctgaagctggcgaacgagactatcagcgatatgaaaacgcgccagcgtgacgttgccgccctcgatgcaaaatacacgaaggaattaactgatgcacagaccaggaatactgatttgcagcgccgccttgctgctggtggccgggtgcgcgtcgaagggcgatgttcagtgcccacccagaccgaaaccgccagcaccagccgcgtgggcaatgctgccacagtcgaactctctccgggtgctggacaaaacgttctcaatatccgcgccggaatcatcagcgaccaggaaaaactgaagtatttacaggaatacattcgggcacagtgcagataa

SEQ ID NO: 374605 - DNA, 138 bp, Salmonella enterica
gtgattgatattagcaaactaatacgggagttgcgactaatgattgagcaattaccaaactggaaatttgtcctgatctggctggtactgtttgtcgccgctattggctatctgataggacaaatccgttggtggtga

SEQ ID NO: 374606 - DNA, 540 bp, Salmonella enterica
atggcgctcaggacaaaagttaaatacggtctttccgccgccatgctggcgttgattgccgccggtgccggcgcaccgcagctactcgaccagtttttacaggagcgggaaggaaatacgctggtggccgttcgtgataacggcggcgtctggtcagtatgccgtggcgtgactcgtatcgatggtaaacccgttgtgaaaggccagcgactgacgcaaagccagtgcgaccattacaacgccatcgagcgggataaagcgctggcatgggtaaataaaaatgttcatataccgctgaccgaaccgcagaaaaccggtattgcgtcgttctgtccgtataacatcggtcccggtaaatgttttccgtccacgttttaccggaaactgaacgaaggagatcgcaaaggagcatgtgcagaaattcgccgttgggtatatgacggcggcaaagattgccacaaccggaaaaatcagtgttacggccaggtgatacgccgcgaccaggaatcagcgctgacgtgttgggggattgaccaataa

SEQ ID NO: 374607 - DNA, 309 bp, Salmonella enterica
atgacaatggataaacatacgacatggctggcctacatctgggcattaatcagcggcatatgcgcccagtggacgttaaacgactatggcgcgctgataggtattgttctgggtattggtacgtttctggttaataagcattacaaaaagaaatcagagcaggctcaggcaaggcaggctgccgcgatggaagagcgtaacaggctaatcgcccggattctggaaaaaaacgaccatgacagcacgttaaagatgctggcggtatctgaaatgccggagggcagtaatggcgctcaggacaaaagttaa

SEQ ID NO: 374608 - DNA, 537 bp, Salmonella enterica
atgttaatccccttcagtaattgtatggtggcaggcatggaaacgacatttagtgagctgaaagcaaagcatctgaagttacttgaaactcaatggcaattgcgtgaaaagttgcaggataaagccggggagcttctgcgggagtacgcggagtctttgtcccttccggcagatacctggacggattcgctgggtaaaatacatccctatgttgatatcggaacatggtccggaccagggaaatttgaacctgttcccctggctcgtctgcaaatggatgacaactacagtcttaactttgttattgccacaaccctggatgataccccgatgacaggaggctatcgtcatggggtgaatgtaaccctccggtatgaaaaatatcagctttatgccagcgtgggatcgggagatgatgtcgtaattattccggtatcgtcgaaacccggagggttctttgaaacctgtgcggcaataaaacaactgatcaacattgctattgaaagagcaacgcctgccggaataccggttgaataa

SEQ ID NO: 374609 - DNA, 555 bp, Salmonella enterica
atgatttatccagccagtaccggaaaaccgggcgaatattttcgactgaatacactggaaagcgtgtggattcagggaaaactccgtatgtggggacgatggtcatacatcggcagcggtaaacccggcaatatgtttaaccagttgctggcctccagaaaactgacaaaaacagccatcaatgaggctttacgccgtctgaaaaaatcaggaacaagcaagccagagctggaggcctttcttcgagaaatgatgaacgggaaacaaaaaagctggctggcgcattgtactgattccgaggcaatgttgattgaccgcgtgattggtactgtattagctgagtatccggcgctgaaaaagttgattcaccagcgttacgaagggcggggaatgagtaagcgcaaaatggcagaacagctaaatgagctgcatccagattggtgcctgagaacctgtaaaaatcgtattgatcaatggttatgtacggctgagaacgcgctctatgttccgctttgtgatgcatatggtctggatgttacgagatttggaaattga

SEQ ID NO: 374610 - DNA, 297 bp, Salmonella enterica
atgctcttatctgaaatgaatatttaccgcagtaaaaaatggctggcagccgtcgggcagattgagcagtgcgtgttgtgtgggcggtggggaacgcaggttgcgcacatgaatgagggcaaaggcatgggactgaaaacggatgactgtgccacggcggctatttgtcaggaatgccatcatgaaatcgataacggcagtcacctgagcagggaggagcgccggtgtctgatgaacagggcgatcgtactgacagtgattaaacttgtacgtatgggaaaggtggtaccgaaatga

SEQ ID NO: 374611 - DNA, 195 bp, Salmonella enterica
atgaaaatgacatggtttcagcatccggcttgtaccaccgaagaggcggatgagctggtgaagcagtaccggagcaggggtgtgaagacggagcgtagcctgaattatgactgtattaactggacagtaagcgccctgttaccggagtttgatcatgtgccagaacggaggcgtaaatgctcttatctgaaatga

SEQ ID NO: 374612 - DNA, 600 bp, Salmonella enterica
atggcgcatttacaactggtcaagcaaacctcatcagggcttctgctcccggcgacgccggagagtggggatttcctgcgctcagtaaaaatcggtgagtggatacacgccgattttaagcgtgtccgcaactacgcctttcataaacgattttttaaactccttcagcttggtttcgactactggacgccaaagggcggcacggtcacatcgcgggaacagaaacttatctccgggttcgttaattttctttgcgactccgcaggccaggaatataccccggcccttaacgaggcggcggaacagtacctccataacgtagctaccctgcgaaccggggacgtcgcccttcttaaatcttttgatgccttccgggaatgggtaaccgttcaggccgggttttataccgagcatttttatccggatggcagccgcgggcgccgggcgaaatccatagcgttcgccagtatggacgaaaccgagtttcaacaggtctataaggctgtgctgaacgtcctgtggagctggattctgtttcgtaaattttcctctccggaagaagttgaaaacgtggccgcgcatctgctggagttcgcatga

SEQ ID NO: 374613 - DNA, 249 bp, Salmonella enterica
atgctcaagttcgttatctatggagacaccgtgaaaaaattaaataaaacattcacttgtaaatatgctgttattcgccgtgatgacatgacagtaattgctgaaatggatttttttcctgactgcaacaggtcattgatgtatcgggatggccgctatgtccggtttctgccgttgttgcaaaatgacatcatggggagcgatagcctgattaatgagctgactatcagggcaggttatcatgaataa

SEQ ID NO: 374614 - DNA, 156 bp, Salmonella enterica
atgaagcagcaaaaggcgatgttaatcgccctgatcgtcatctgtatcaccgttgtaatggcggtgctggtaacgaggaaagacctctgcgaggtacgcatccgaaccggccagacggaggtcgctgtcttcacggcttacgaatctgaggagtaa

SEQ ID NO: 374615 - DNA, 936 bp, Salmonella enterica
atgctcttgggtgataatgaaagatttattgtaaaatgtgatgtagatctggaaccgtatccaaaagaagcgccatctatgcttctaagaaactgtactccaaccttgtttgagctcattaagcaaaaagaagctttctatgaaattaataaaggacgctcagttatacgattagtggacatcaaagaaacggcgcatgattaccgtcttctctttcaatatgcgaaccgtgacgcctctgaccctgcatttgcaaatcttaagactggcgaaactcgtattgccaaaaaaaaggaagatgaggggcttggtgcaaccttacacatggttattgagaagtatgctacaaacgaatcttttcctaacacctacactgccgtcatagaggaagtgccaggaatcacgagaggtctcttgtcacaagccttgacagcgtttttcaaacattgtggttttacattcaaaaagccagacggcaagaaagatcttatatgtagacccattgttaacattgagtttcatgcctcttcaacgttggccaaaactctttctacaggttatttagcaggcattaccgccaccagaaaagtaaccaagaattctttagatgaagaaggcttgatcagcgtagatgaagagattttaaaaatatcaaccaagttcaaacgcggcgaaggtgcagttaaggctgtaaaacgagcatacgataaactccgtggtatggggtacggatctatgcgtattacatataaagatgctaacagacgtactggcagtgatagctttagtttaagtgctgacagaagcctaaaggaacttgccacagctcaattggcacaaagagacaaagccatactggcaacaaacatagaagtgtgccaaaaggaaatgcatcaagaactcttaggaaaaatggtcgattttctgataaaataa

SEQ ID NO: 374616 - DNA, 600 bp, Salmonella enterica
atgtcacttttgtcaaaaatcataacacccattgactacctgatgatctcgcatagtgagaaaaaatggtttgattttattttaccaattactgtatcttgtatcgccgtgataattataaatattttacctaaaaatatatctttgatcggcaaagatagtttaatttctttggtaaacggtatattacaaattctttccggtttttatattgcttctatggcagctgtcgcaacctttcaaaagaaaggaatggacaatattatggatggagttgcccctactcttagaggtaaaaaattaaccagaaggagattcttaacttatctcttcggctatttagcttttatgagtattacactttacttcgtaggtggtacagttcaacttatgagtagcagtataaaagaacttcatctttcacaatatggatggttgaaaaatctttgtttgtttatttatttgtcctttgtttgtaatattttatcgacaacagctctggggatgtttttcatgattgacaaaatgcatgaagaaaaacctgaacttatcattcctgaggccaataaagtcgacaataaaaatgacgaccatccttaa

SEQ ID NO: 374617 - DNA, 525 bp, Salmonella enterica
atggaaataactaaagaacgattgttggaaatagcaaatcttagtgatagggtattaagtaatgggagagttatttctcctgatgcttatgaatcagttacaagtatagaaatagcaacgatggctaggatgttgtccggttatctcgaaagagaaaataaaaatcagatgggtagtaatgtcgatatatatgagattttagacggttggggggcttgggttgcagctggaaatagttctattgactggaggcaagtggctgataaatataggggtattgtacctcacggtaaaaaattacgccaccagtgtagtaatgatgaaggtcgtatgattgatacttgcatgttgagacttaagcaatataggacagatgactatgagttaattatcgctcattttgttattggtatttctctgcgtgctatagcaaaaaaagaaaaatgttcagatggaacaagtagaaagaagttgcaatcggctatgggctttttagatggtatccatagcatgatacctttttaa

SEQ ID NO: 374618 - DNA, 243 bp, Salmonella enterica
atgaaaatcgaataccaggaaggaggagctgagtcccgtctggttatcaccagcggtttcctttggtggagaaaacatatccatctggttgatgaaattttgttgcgtgcgccgcaactgcgggcggtgagtgagggattttttatcgtgacgacgaccgtcagtggatttacagcggatgtgctacgggcggaaatgattgttgaaggtatggggtataacgtggggagaacaacacaatga

SEQ ID NO: 374619 - DNA, 396 bp, Salmonella enterica
atgagcagaaattacacaccggcgcagaaagctgaaatacagaagcgcctgacggaactggtacgaacccacggtcggatgacgtttggagaactgcggaagataacggggttaaccatttttacagcccgccactacctggaaaaagcggaaagttgtggggatctgtatcaggccgggagaagcggtattttcccttcggaacaggctttcctgctttggaagcagaaacgtgaagatgccaggattacccgctttctgaaaacaccggaaggtgtggtgcgttcctacgaccggaccagaaacgttatctgtacggagtgccggaacagcatgacgatgcgacgggtactggcattttatcggggacattaccgggaggcgaaatcttcatga

SEQ ID NO: 374620 - DNA, 1008 bp, Salmonella enterica
atggccgcacttccatacatgcagctttacatcgctgattatctggcggacaccatgcacctttctgccgaggagcatggggcctatttgctgttgatgttcaattactggcagaccggaagagcaatcccgaaaagcaggctggcaaaaattgcgcggattagtagtgagcgctgggggacagtggaagagtcgctgagagaatttttcattgataacggcactgagtggattcatgagcgtatcgaaaatgatctcgctgcggtcagggaagttctggcgaaaaagtcggcagcgggaaaagcatctgttcagtccagaaggaacaaaaaaggaacacaatcggccagtgaaagtaacacatgttcaacaggtgttggtccggtgtttgaacaggaggccaacaaaaagagaactaataaagataaagatctaaaagaattaaaccccacacataacgcgcgcgtgcgcgagagtgctccgaccagtcagcctggaattacacaacagccagtcgtgactgaaccggaataccgggaaggactgaacgaaccgatcgggaaattttcaatgactggtgactggcatccttcgctggatttccgacaacgggccgcccagtggggcgttgcgttaccagaaccggaatatttacccacggaacttgctgcgttcagggattactgggtgccggagggaaaagtgttcacgcaaatccagtgggagcaaaaattcgcccgccacgtaaaccacgtcagggcaaaggcgaaaccagccagcaggggagaaaaccatgcaggaattcagccagacagcaccgcatcgcgggcagtacagcaaatcagggcagcccgcgagcagtgggaacgtgaaaacggaaacgtcagcgacggaaacggcctggcgactctgggaagtcatgggggaaatttattcgaaccggtggacgcagaagaacggcgcagcaccttcgaagttgtgggtggcccagattggagcgatgactga

SEQ ID NO: 374621 - DNA, 495 bp, Salmonella enterica
atgatcacccctgaaacagccagtcaggcgttatcgtcatggctggcatatctacagataacccaggaaaccgccacgcaactgatcacccgcgcattcttggagcagccggcgcgaccggaaatagcggttcaccgtatcgagcgtgacgacggaacggtggattacgacgcatggcgccgtaaccggataaacatttttcagcgctggcggaaacgggaaacggcggagcactgcgagaaattctctgcgctgatccccgctattctggaggcgatccgcaaaagtgcgccggaactgcataaacgaataacggcagggcagagcattgaatacctgctttcacagcttttaaaaaaaccgcagtggcaagcgcggtacttcttggcgcgccgctggcggattttgagcgggagtgtgacgaggccatatatgcgttacaggctttacgtaacggttatcgccagcagcaccagagacatgaccagtgagtaa

SEQ ID NO: 374622 - DNA, 255 bp, Salmonella enterica
atgaacaaaatttcaacatacagaaagcaactggggctatctcaaaggcagcttgcgactcatttgggatggatacagagccgtctggcgaactatgaagcaaactttcgcacacccggactggaggagtgccgaaaaattgttgccacacttaaccatctgggatctcgctgcgttcttgatgatgtgttcccgcctcatgtgaacgatagcagaaccatattagcgaaggtgaacaaccatgatcacccctga

SEQ ID NO: 374623 - DNA, 426 bp, Salmonella enterica
atgagaaaagaaaatgaaaaaattgccgccagccggcttaatgatgagatcgcaatgcgcctcaaggagcgcagacaaaaactcggcctgtctcaaggtaaactggctgagatttgtggatggactcagtcacgcataggaaactatgaagcaggaagtagaaatgttggggtgtatgatgcagttgtacttggtgaagcactaggtatttccccacccgaacttctgtttggtgaaaaggactcctcgcaggcatggctaagtgatcatcataaaaaattgcttgagttattcaatcagttaccaagctcagagcaacaacgaatgattgatctctttgaggttcgtttaaaagagattgatgactatgtcgaaacgtacctaagaaatcgccttaaaaactcaactcaaccaccagaaaactaa

SEQ ID NO: 374624 - DNA, 189 bp, Salmonella enterica
atgaagatgcaagaacttccagtagaggttcagactatcgcagcttctactctgcgtagaaaaatgaaaatcaatgaccagcgagcagataaagagccagtcgagaaactggctcatgaggtgagagaggcgtttacgaagctttatcttcctgttgaggtcgatccctctcagcgcggtagtggttaa

SEQ ID NO: 374625 - DNA, 276 bp, Salmonella enterica
atgagcaccatcggtatttatctggagggagccgacgccacaattaaacccgtaaacattcatcgtgtcggtgttgaaattgaaggtatttcattatctgaactggttgaatcggttgatgacaccccggaacttcttgatgtcatcggcgagaaaaatatagcccgctggatttccaccagaaataaactcgacagctttcttgattacttcgaccaccgcgatgtggctgactggcttgaaataagggtcagtgaattacaacaggaggactga

SEQ ID NO: 374626 - DNA, 207 bp, Salmonella enterica
atgaaacaccagcactacggtacgatggaggtcatacggcaatgtgcggttcccggaacaatggttaaatataatgaccggatttataaagccacggctaataccaggggaaaactgacgttaacaaatattcgtgaaaatattaccatccgggatttagttatagaaatttatcttgatggtaaaggcgaaccactaacaaactga

SEQ ID NO: 374627 - DNA, 336 bp, Salmonella enterica
atgaaaaatacaacgcctgatgcagcagtattacaggaactaaaagtactcaccagccgtatatttaagatatgcgagcaaaacaatatgccggtagttattggctattcatacgagttaagcagaaacgaagatggctattcaataaataaatcaataactgcatatgcagatgaaaaaacaggagcatgggactccactatagccgcagcagccatgttgctcaaagtgaaagacgtccccagggaggttattggtgcattgaagagcttgtctgttgccagtgattttgcgcgggcgatgtctgaggcctcaaaggaaaaaagcctgcattaa

SEQ ID NO: 374628 - DNA, 2691 bp, Salmonella enterica
atgagcattaagcaggaagaatattcattttattacaaggttaaaaatgaaagtgctaggaaacgcctcggctttaaagccggttttttctggtgtacagctaaaaagcagtcactcgccctctcccgtggcgaactggctatggatgcggccggatttgatgaagctgattttgccagacctgtacgcgtacattttccggtagaaaatgacattccgcccgagggtatctttgatactaaattttgtgaaaaccgcgaacccggtggcgaagacggcaaaaccctgacacttatccccggcgcagcttctgctgttaaatcagatgaaacagaacgcgccgacggtgctgtcactcctgccggagaaaacggaatacaggaatctcataacccgccagcaaaccctcaactgaccgtggttgcgacactgccgttccgccatcgcgttctggcacagtatattggcgatggagaatatctttatcacgtcgatacagaacagaaaaaagaaatcgcgtgtctggagatggatactcagaataccactgtccagaacctgatactcgccgcagaaaatgtagagccgttcaaaaaagctatcgagcacgatattcacaaagcagtgaatgcgtataaacaggtatttcctgtcgatggaaaagtgcctgagttatgcaccactattaagttttttaaggaatggttccgtgctgaacacattaaccgcggcctgctggttaaggaatgggctgaacgcctgaagaataaacctgcacccgttaaaaaaaccgggccacataaagtaattgtcgacgacgtaaataagccagaacgtccacgccgtagcgaaaaaccgacacacagaacgattaactatgagctcgcctgtggtttctgtgaggagctggatctgaataacctgcgtcctgcaatggattttgcaaaacgtatcatcgccgaagaccgggaagactggaagcgaatgtcgatgacagtgggcattattcccgacatcaaaggctacgaccgacaaaccattattgacctggtacgcaaagcgccaaaggccgtacataacggtaatcctgatcttcgccggacgtggtgcgaaagctttcttgccgttcatggtgttcgcgatccggactggtacgaatatgtgcctgataacaccccaacaacccatgaagaaaatgcagcaagacttcgtcaggcgggcaaatgtctgcgggatattgaggcagggagatttcagtgtgatgaagaaaaacagcaaccgacaggcgaactggcagatgaaccagcaacgcctgaagcagtggaacaggacacaactgaacatcatccggacccgcagccgctggagaatgagccacctgtaagccagacagaagcaggctaccagaaaatacgggcagaactgcacgaagcacgtaaaaacattccacccaaaaacccggttgatgttggtaaacaactggcagccgcgcgcggtgaatatgtcgaaggcatcagcgacccgaacgatccgaagtgggttcataacaattacagcgcctcaaatcagggtgaaaaagaagaagtggtgccggaggaaaaacagccagcagcagagccggaggctgtcaccagaaacgcagacgggactttcgacgtttcagcgctgttcagtgccccctcaaatcagatcgaaaaaatggaagccagaacagaaatagatggagagatgcggaaagaaagcaaccagcgggaaacggctggtgatgcagtgcaggaaattacagcagacggtggatcaggtactggcggtgatgaagcaggcgaagcggcagattccatagaaaacggaaatatcactgtacctgatgatatacagccaggcatttactatgacatccctaacgaggcgtatcacgctggcccgggcgtcagtaaatcacagcttgatgatatcgcagatacaccagcaatttatctttggcgcaaaaatgcccccgtggacacggagaaaacaaaatctctcgatacaggaacggcttttcactgccgggtactggaaccagaggaattcagtaaacgcttcatcatcgcaccggagtttaaccgccgtaccagtgcaggaaaagaagaagagaaaacctttctggaagaatgcgcccggacaggaagaaccgtgcttacggcagaagaaggccggaaaatcgaacttatgtaccagagtgtgatggcgttaccgctggggcagtggctggttgaaagcgccggatatgctgaatcatcagtctactgggaagatccggaaacaggaattttgtgtcggtgccgtccggacaaaatcatccctgaatttcactggatcatggatgtgaaaaccactgctgatatccagcggttcaggacagcttattacgattatcgctaccacgtacaggacgctttctacagcgacggttatcgggcgcagttcggtgagatacccaccttcgtcttccttgttgccagtacaaccgccgaatgtgggcgttacccggttgagattttcatgatgggtgaagacgcaaaactggcaggtcagcgggaatatcgtcgcaatctgcaaaccctggccgaatgccttaataacgatgaatggcctgccattaaaactttatcactgccccgctgggcgaaggagaatgcaaatgcctaa

SEQ ID NO: 374629 - DNA, 831 bp, Salmonella enterica
atgcctaaacagccacctattgcaaaagccgacctgcaaaaaacacagggagcacgcaccccgacggcagtgaaaaagaacaacgatgtgatcagctttatcaaccagccttccatgaaagaacaactggcggcggccctgccccgccacatgacagcggaacgcatgatccggatagccacaacggaaatccgaaaagttccggcgctgggtgactgtgacaccatgagttttgtcagcgccatcgttcagtgttcccagcttgggctggagcccggcggcgcgctcggtcatgcctatctgctgccgttcggaaacaaaaacgaaaagtcaggcaaaaaaaacgttcagttaattattggctaccggggaatgatcgaccttgcccgccgttccggacagattgccagcctttccgcgcgcgtcgtccgcgaaggtgacgatttcagcttcgagtttggtctggaagagaagttggtacaccgtccgggtgagaacgaagatgcaccggttactcatgtctatgccgttgcccgccttaaagatggcggcacacagtttgaggtaatgacccgtaaacagatagagctggtccgggcacagagcaaagccggtaacaacggcccgtgggttactcactgggaggaaatggcaaaaaaaaccgccatacgccgcctgttcaaatacctgcctgtatccattgagatccagcgcgcggtatcaatggacgaaaaggagacgctgactatcgatccggctgatgcgtctgtcatcacaggtgagtacagcgtcgtcgaaaacgctggcgtggaagagaacgtgaccgcataa

SEQ ID NO: 374630 - DNA, 186 bp, Salmonella enterica
atgtacaaatatagaataaccgccatcgtcaaaaagccgggtaattccccgacaaactgggttcgtttttctgacaaaaaaatgaataaagccgagtgtgaaaaaatgctatccggcagaactgaagccggaaaatcacgcgaagagaaagtcacgctggaagagtttaaatgtattaaggaataa

SEQ ID NO: 374631 - DNA, 429 bp, Salmonella enterica
atgaagaagcctgtctgtatgttctgcggcgccccggccaccctgctttgtgacgggatcatcggctgggatgccgatgaggatgaacacgggcacatgacaaaatgtcgagccatgttcacctgcgatgcgcccgtgtgccggaactgcgctacatggcatggcaacatatttttcgatggaaagatccggatgatggatacacgcgacctttgccccctgtgccagaagttacacgaagccggcgaatccatacgcgttgcagaccaccggaaaaactccgctctgccgcaaccctgcctgactgaagagcaggctgacaggatacgcgccgcacattgggcaggatttacaggacggcgcgccggagatgtaaaagttgtaccgggcggcggtcagcagtcctttaaattttaccctgatcattga

SEQ ID NO: 374632 - DNA, 267 bp, Salmonella enterica
atgagctttgtgagacttgaaacctggggtgaattaaattatcccgatgatccaccacctctcacaacactaagacgatgggcgcgaaacggaaatatttacccgactccagtattacatggcaggacgtatcgggttgatccggacgcgttttatatcaagccgaataaagtgggacttgtgcttgaacagcaccatcctaacgggcgaactggtaaaaaaagtgcgttgctggagcggttaataaatgagtcaaaaaaagtatga

SEQ ID NO: 374633 - DNA, 1080 bp, Salmonella enterica
atgagtcaaaaaaagtatgatgctaatctccccaaaaatctgacttatagaagatccaggaaaacattcgcctggagaaatccattaactgatgaagaaattcagctaggtcagatttcacgcagggatgcaattgctcaggcaatcgaagccaatcactttattgcgaaaaactatacccccgtagggctgattgaaaagctaaaaggaacagactcactcaccgttacaaagtgggcagaacagtatgaaatactattaaaacggcgtaacctgtcagctaatacatataagatacgcggaaatcagttagaaacaataaaagagaaaatagggagaatgcttttaatagaagtatctactcgccatattgctgaatttctggaaacttggatagcagaggggaaaaacacaatggccggagccatgcgttctgtactttccgacatgttcagggaggctatagttcgaggacatattgcgcataatccagtggagccaacacgctcccccaagatcgaagtcgctcgcgatcgtctgagactggatgtatataacaaaattagggaggcagcagaacaacttcctgcatggttcccgctggctatggatctagcccttgttaccggacagcgacgggaggatctatcatgcatgaagttcagtcatattattgatgagcgactgtacgttaagcaaatcaagaccgggatgaaaatcgctctgccactttcgctcaaccttccttccctgggtttacgcctcagtacggtgattgagcgttgccgcctggtaagccgtagcgaataccttatcagcgctggcatacgcaaaaacagcccgaacgggagtattcatcctgatagcctgactaaaaaatttgttgcggcacgaaaattgaccggaataaatttcagtgaaaaccctccgccgtttcacgagatccgcagcttatccggacgactgtataaagatgcttacggggaagggtttgctcagaaactcctgggacatacttccgagaacacaacaaaaatgtaccttgatgagcgagacgaaaaggcatacatgatgctctaa

SEQ ID NO: 374634 - DNA, 1584 bp, Salmonella enterica
atgaaaacacgtaaaattggtttaattaactattttgcctatggttctggcgattttttaggggctggcacgacggcgttaaccgccgcatggttactctatttttatacgacgttttgtaaccttaccccgattgaagccacctgcattttcgccactgccagggtactggatgcggttgttagtccgcttatgggatttttaacggacaactttggttctacctggttgggtaagcgcttcgggcgacgcaagttttttattttactggggattccatgtgtatttagctattcattaatatggcttagcggtatgggattctggtattacctgttaacgtatctgctgtttgatgtcgtttataccatgattctggtgccttatgagaccctggtaccggaaatgactgatgatttcaaacagaagacccggttttcaggcgcgcgtatttcaatggcgcaaatgtccgctattctggcgtcattcctgccaggagtcctgctggcagcatttggtaaaaataatcctgtctctttcttttatgccagcctggtcttttctgtgctgtgcgcattaatgctggtttttgtctggtgctttacctgggagcgtccgcgggaggcatggacggaagctgcgctgcgcgctgaagatgagaagaaaagcctgacgtttacccagagcgtacgccgcctggtcgttgaactcatgtccacgctacgtattagaatttttcgccagcatctggggatgtatctgggagggtatatcgctcaggatgtattcaatgccgtcttcacctggtacgttgtttttgtgctgatgcaggatgcttccgtcgcctcgaatttactgggcaccatggcgacgttccagtttatcgcggttattgcgatgatcccgctttgcattcgctttgggcccgcgccatcttaccggatggttgtcgtactattcggcctgagttctctttcttatgcattggtgtattacaccgggttgagcgatgcctatgggttattattattggtgtctgcgtgtgcaggactgggacgcggcggcattaactacgtaccgtggaacacttacacctatattgctgatgttgatgaggtcattaccggtcagcgtcgcgaaggcattttcgccggaattatgacgctaacccgcaaagcctcacaggctggcgctgttatggtggtcggaattgtgatgcagctttccggcttcgtctctggtcagagtatgcaagccgccgccgtgagccacaccattctgttgattttaagctgcggcacgctggttatgcttgcctttggcttcctggtttccctgagcttcagactgaatttgcacacccaccgtgtcttacgcgaagagactgccaaaatgcgtgagtcgggctgtacgacgccggaaaacattacgccacaggcgcgtgccgtggtcgagatgctttcaggtctgccttatgaatcgctttggggtaacaacaatattggttatctgaatcgtaataaaccggctgcgtcaggagcaacactatccgcagcgctgaattcgacattaaacagaggttaa

SEQ ID NO: 374635 - DNA, 1152 bp, Salmonella enterica
gtggcagaagagagcgacgacgacaaaacagaagaccccacaccccaccgacttgaaaaagcgcgggaagaagggcagatcccccgttccagagaactgacctcactgctgatattgctggtgggcgtttgcattatctggttcggcggtgagtcgctggcgcggcaactggcgggaatgctctcagcaggcctgcacttcgatcaccgcatggtgaacgatcctaacctgatcctggggcagataattttgctcattaaggcggcgatgatggcgctgctgccgctcatcgcaggcgtggtgctggtggcgcttatttcgccggtcatgcttggcggcctgatcttcagcggtaagtcattacagccaaaattttctaaattaaacccgctgccgggaattaagcggatgttctcggcgcaaaccggcgcggagctgctaaaagcggtcttgaaatctacgctggtaggctgcgttaccggatcttacctctggcataactggccgcaaatgatgcgcctgatggcggagtcgccgattaccgcgatggggaacgcgctgaatctcgtcgggctttgcgcgttactggtggttctgggcgtgatcccgatggtgggatttgacgtttttttccagatctttagccatctgaaaaaattgcgtatgtcgcggcaggatattcgcgacgaatttaaagagagcgaaggcgatccgcacgttaagggcaaaattcgtcagatgcagcgtgctgccgcgcagcgtcgcatgatggaggatgtgccgaaagcggacgtcattgtcaccaacccgacgcactattccgtggcgttgcagtatgaagaaaacaaaatgagcgcgccgaaagtggtcgctaagggggccgggttgatagcgctgcgtattcgcgagatcggcgctgaacatcgggttcccactttagaagcgccgccgctggcgcgcgcattatatcgccacgccgaaatcggtcagcaaattcccggacagctctatgctgccgtcgcggaagtgttggcctgggtctggcagcttaaacgctggcggcttgcgggcgggcaacgtcctccacaacctgagaaccttccggtgccagaagcgctggattttatgaacgagaagactactgatggataa

SEQ ID NO: 374636 - DNA, 867 bp, Salmonella enterica
atgacatcatctctgccctccgggcaaacgtcattaatgttacagatgacacagcgcctcgcgctgtccgacgcgcattttcgtcggatatgtcaattaatctaccaacgcgcagggatcgtgctggccgaccataagcgggatatggtttataaccgcctggtgcgtcggttgcgtaccctggggctggatgattttggccgttaccttagtatgctggaggctaaccaaaccagcgctgagtggcaggcttttatcaacgctctgaccaccaacctgaccgctttttttcgggaggcgcaccatttcccgatccttgcggaacatgcgcgccgccgccacggcgaataccgcgtctggagtgcggcggcatcgacgggagaagaaccttacagcatcgccattacgctggcggatgcgttgggaatggctcccggtcgctggagagtgtttgccagcgatattgatactgaagtgctggaaaaagcgagaagcggtatttatcgcctcagcgaactgaaaacgttatcgccgcaccagctacagcgttacttcatgcgcggtacagggccgcatgatgggttggtgcgcgtgcgtcaggaactggccaattatgttgaattttcctcccttaatttgctggaaaaacagtacaacatccctggaccctttgacgcgatattttgccgtaacgtcatgatctattttgacaaaacgacacagcaggacattctgcgccgttttgttccactccttaaacctgacggactgttgtttgccggtcactcagaaaactttagcaaccttgtgcgcgagtttagcctgcgcggacagacggtgtatgcgctaagtaaggataaagcatga

SEQ ID NO: 374637 - DNA, 1662 bp, Salmonella enterica
atgtttaaccgtatccgcgttgtcacaatgctgatgatggtgctgggggttttcgcactgctacagcttgtttccggtggtttgctgttttcttcattacagcataaccagcaaggttttgttatttctaacgaattacgtcagcaacaaagtgaactcacgtcgacatgggacttaatgctgcaaacgcgcattaacctgagccgctccgccgcacgcatgatgatgggcacctctaaccagcagagcagcgccaaaacggatttactccagaacgcaaaaactaccctcgcacaggcggcggcgcactacactactttcaaaaacatgactccattgccagcgatggcggaggccagcgcaagcgttgatgaaaaatatcagcgctatcaggctgcattaaccgaacttatccagttcctggataacggcaatatggatgcttacttcgcccagccaacccagggaatgcaaaatgcgctgggcgaggcgttgggcaactacgcacaggtgagcgaaaacctgtaccgtcagacatttgatcaaagcgctcacgattaccgttttgcgcaatggcaactggggattcttgccatcgtgctggtgctgattttgatagtggtttggtacggtattcgtcaagccctgcttaacccattagcgcgagtgattgcccatatccgtgaaattgccagcggcgatctgacgaaaacgctcactgtctcagggcgtaatgaaatcggcgaactggcggggacggtcgatcacatgcaacgttcgctgactgacaccgtgacccaggttcgcgaaggttcggatgcgatttattccggcaccagcgaaattgccgccggtaataccgacctctcttcccgtaccgaacagcaggcctccgctctggaagagacggcagccagcatggaacaactgacggcgaccgttaagcaaaacgccgataacgcccgccaggcttcgcaactggcgcaaagcgcctccgataccgcgcgtcatggcggcaaagttgtcgacggcgtggtgaataccatgcacgaaattgccgacagttcgaagaagatcgctgacattatcagcgttatcgatggtattgccttccagactaatattttggcgctgaacgcggcggtagaagcggcgcgcgcgggcgaacaggggcgcggttttgcggtagtggcaggcgaggtgcgtaatctggccagccgcagcgcccaggcggcgaaagaaattaagtcgttgattgaagattccgtcgcgcgtgtcgataccggttctgtgttggtggaaagcgccggggaaaccatgaccgatatcgtcaatgccgtcacgcgcgtcacggatattatgggcgaaatcgcctccgcctcggatgagcaaagtcggggcatcgatcaggtcgctttggccgtttctgagatggatcgcgtaacgcaacagaatgcctcgctggttcaggagtccgcggctgcggccgccgcgctggaggagcaggccagccgtttaaccatggcggtatccgctttccggctggcatcgcgaccgcttgcggcaaataaacatgaaccgcgtccgttagtggacgttcagcctggtaatacgccgcggcccttagccgccggggacgatgcgaactgggaaaccttctga

SEQ ID NO: 374638 - DNA, 966 bp, Salmonella enterica
atgactgcacgaattttatggctgttggccttactatttttcgtgcccggagtgtgggcggcctgtagcgtcgccactaccagcggcgcattcggtagcgtatcgtcttttatgttaaacagctctgagcaaactactagcgccaatgtgctggtgcagtgcgacgtggtgctggggctgctgaataacgatacggtgacattaacctacaccggtgcgtcagtctcagccggtactcgcgctgccctgaaacgtacagataataccagtatcacggacactattccggttcggttatgtggacaggctggatgcgcaaataacagtgagattgccatcaacggcagttatacctggaacggcagtacgctattgtccttactgggatctcgtcgttttacattaccgctctggtttcgtaccacgtctggccttaacgttagcgccgggccgtaccaggtaacgttcaatttcagcgtttactacaatatttgtcaggtcggtcttttagggatctgcgggacggcgcaaacgggaactgcggcgacaacgttgcaattaacgttaacagtagccaatgactgtattgcgattactgcgcccgatgtcaattttggcagcgcgccgctggtcaagaattttccagtgataagtcagagcgtggcggtcacttgcaccaaaggaagcgtgtatagcgtaggtatcaataatggtgcatatgcaaatggtaacagcagaaacatggccagtggcagtaaccggttgaattatgaaatttacaagggcgcgaccaacaaccgatggggcagtagcggcagtgaacggtgggcgagcgaggcatcctcggctattagcgccgatggtctgctgcgaacgtataattacaacgcaaaaattcttactaaccagcctacgccgcccgctggtgtctatagtgatacggttgtagtcgatatcaccttctag

SEQ ID NO: 374639 - DNA, 2373 bp, Salmonella enterica
atggcagtctggccccacgcgctaagcggcgtagcgatgttcctggtcagtagtgtgtacgccggagatgatgctctcccgccgccgcctgatggggaggttatgaacgagcaggcggtatttcacctgacgttaattatcaaccatttcgatagcaagcaggtggtccccgtcacgtggcgacagaatgatttttatgttgccagcgtggatctacaacgtgccggactgcctgccgataagctgccgccgggagaggttaatatgtcgcaactgtctggagtaaaaacggaatatgacagcggcagacagcgcctgttactgtcggttccccgtgactggttacctgagcgtcctgtctcttttggcggcgagccgacgcaaatcacgccgcaaaacggccaaggggcgctgctgaattatgatttttatactagtcatacccaacatggcgatggacaggcatcgctctggcatgagttacgcttttttaacgatgtcggttttttctcttctaccggctatctacgccagcgtctgacaggggataacaatcaacaagagggctatgtgcgttatgacacggtatttactgcgatgcatgaagagagcgcgacacaatggcggttgggcgatgtggttagcgatgccttaagctggagcagcagcgtgcgtgtcggcggtatttcatgggggagggacttttcgctacgtccggatttagtcacctggcccttaccaacgttttccggagaagcggtcgttccgacggcggcggatctgtttattaatggttatcaggcgggatcgacgcagattcagcctgggccattcaccttgactaacctgccgtatattaacggcgcgggggaggccgtattggttacccgcgatgcactgggcaggcaggtgagtactacacttccattttatgtcgccagcgatctgctcaaaacgggaatgaccgacggcgcggtaacgttcggcagtttacgccgcaactacggcctcgaaaattttgactatgggccagcgttgggcagcgccacataccgttatggcgcgagtgattatattactctggaaagtcatggcgagggggcgaaatcgctggcgttggcgggggctggcgcgctggtcagactggggcgtttcggcgtagtaaatggcgccttaagtgaaagccggatgcggggaaatcctggcgaacagcgaacctggggatatcagtacaatacctctgcttttagccttgccacacagcatagtcgtcgtactcgcgggtttggcaatctggcgttatatgatcaacttccccgtgtggatgacgataatttccctcaggcatcgttgagccagcgcagcgatcagtattcgctgacgtttaacatgggcacgtttggtaatgtcggcgccgcgtggattggcgttcgcactttcgacgcgcaaaaaacagaattacttaacctctcctggagccggaatttatggcgaagcagcagcctttatctggcggctagccgggaccagcaacagggggaatggacgctggcgatgtcgttacaaattccgctcggcgcgcgggatagcgcagcgttgagcatggagaaaacgccagacgctgggcagacgcagcgtataaattataaccatgctatgtcaacagacggcggatttggctggaatctggcttgggcgcgacaatctcagcgtcacaactatcagcaggcaacgctgggctggcgcaacaataatgtggagttgcagggcggcgtgtacggtgaaagcgatgcatttaccggttggggggaagcgcagggagctgtggttctgatggataatcatttctttaccgccaataaaattaatgacgcttttgcgctcattagcaccgatggacatgcggatgtacccgtgaattatgagaaccagccagtaggaaaaaccaatgctcagggctatttattgatcgctggcgtgtcggcgtattatccggcgcattacagtattaatacccttaatttacctgccgatactcgcctgaaagagaccggtcgtcgtattgcgctccggcggcaaagcggttttctggttgagttcccgctggagcagtcgcgggccgccagcgtcattttatataatgagcagggggagccattaccgttggcaagcttggtgctgcggccgcaaaacgcgtccgcggtcgtcggatacgatggcatcgtctggctggaggatctggaatcggtaacgccgctgcaggcagtaacaccggacggtactcgatgtgaggctacgcttacgcttgccgcgaatcctgatcataaattgcagacctacgggccgcttgtttgtcgaagtaaggccttatga

SEQ ID NO: 374640 - DNA, 759 bp, Salmonella enterica
atgaaatttacggtccttttcaggcgcgttttgctggcgctggcgggtctatttttttcacttggggcaaatagcggcgccactattttattgtggccgatcgatccctggcttgccgcagagaggaacgcaagcgaactgtggattgagaatcggggcgacgcgccgacgaccatgcaggtacgtattgtgcgctggcgccagcaaggggggttcgagcgttatcagaatcagcaagatgtggttgccagcccaccgattgtgcgcattgaaaaagggaataagcagttgattaggctgataaaacaaacaaaagcccctgacggagcagaacaggcttatcgcattattgttgatgagatcccctcatccgataacgccgatacgccgccgatgggactaaaaatacagatgcgctactctttgccgctgttcgtttatgggcaaggcatcgcaacctggcctggggaagaacatcatgcccgcgccagtgtaccgcagttgcagtggcgtgtgattcgagaaaatggggcgccatttctggaggtgcgtaaccaaggggcggtacatgttcgcctcagtaaaacgagtgtgcgccagggaagtgaaacgcgttccctggcggatggcttgttggggtacgtgcttccaggtagctatcggcgctggccgctacccccaggaatgacacagccgacggaattgacagcgtcgattaacgctcagggtgggcaatggcagtctggccccacgcgctaa

SEQ ID NO: 374641 - DNA, 543 bp, Salmonella enterica
atgcgacgtaaaaacgcacgctttctgaacgggagcgggaaacggttatgcctgatgctggcgctaatgggggggatggcaccgccgcttccggcagtgacgacgcaatcttttcagcttaacgccactattacgccggggtgcagcgtcgccaccggcagcggcggaacgctaggtacactgaactttggcacatacagcggcgtggaaaatcgtcaaattaatactcattttgtaccgggaaccacggtgaatctggcctgtacgccaggcgtggcgttaagcatgagtattgatggtggtcgccagtatacctcagtgcgcaacatgcaacgttcaggcggcagtgagcgggtcgcttaccggttatacagctcggcatcactggcggcaaacagcgagataggcgtcaatcaatctgttcccgtgctttataccgacagcaataacattgcgttaccgcttttcagcgccgcatttttgagcggatttagcccggcaggcacctattccgatcaacttaccgtgaccttgtcatggtaa

SEQ ID NO: 374642 - DNA, 570 bp, Salmonella enterica
atgaataaaatttaccttgtgctggttgctgcgggtctcgcttcaggcgctttgtctccggcatttgcggtgaccagcaacggaactattggtgcgacgctgacgttgaccaacggttgcctgattaatggctcgccgggtcaaaatgggatcaatttcgggacgctggactttggtacgcatccggcgaccttttctgaactgaccacgcagttaactggcgcgggcggcggcaacagttttggtatccagtgtacgaccgccaactacacggtgcaggttaccggaaataccaacgtgaccgcacctggtactaccatcggaacgcccggcacgccagcgcgttatctgatgaattcagcgaataccagccagggtgtcgcataccgtctttatagcgacagcagttttaataacgagatcactaacaatacgccgataccgaaagcgaataccaccgcaggcgtagacaactacacgctatatggtcgcattcagggcggcggcaacagcgttacggttaacccaggcatctataccgacaccattaacgtcagcgttatctactga

SEQ ID NO: 374643 - DNA, 411 bp, Salmonella enterica
atgacgcgtcggttcgcgaacaagccgaccatatttattatccctggtaatcgttattcgcccggggctgtcgtatccggttttgaggtgataaaaattgccgttccggacggggaaataacgttaaatgctatcattcaggtttcgcatctaaccagtgctcagccaatgacctccctggggtatgagttaatcgtgatgtctgcgtgcgtattagggggcgttttcctgcaaggcggcatcggaaaaatctcatatgtggtggcgggcgtattgatattaggaacggtggagaacgcgatgagcctgctcactatttctccttttgcgcagtatgtggttcgcggcttaaccgttctggcagcagtcatcttcgaccgttataagcaaaaatcgaagcgtacgatttga

SEQ ID NO: 374644 - DNA, 252 bp, Salmonella enterica
atgtcccatacacttaatgccaaccaggaactggtttctgacgttgtcgcttgtcagttggttatcaagcagattctggatgtaatcgatgtgattgcgcccgtagaagtacgcgaaaaaatggccagtcagttgaaaaatatcgacttttcaaaccatccagctgccgctgatccggttacaatgcgcgccatccaaaaagcgatagcgctgatcgaactgaagtttacgccccagggcgagtctcattaa

SEQ ID NO: 374645 - DNA, 498 bp, Salmonella enterica
atgctgaaaacagaaatgatcgacaagctgaatgagcaaatgaatctggagttgtactcttcattgctctatcaacaaatgagcgcgtggtgtagctatcacagtttcgaaggggcagccgcatttcttcgtcgccatgcgcaagaagagatgacgcatatgcaacgcctgttcgattaccttaccgacaccggaagcctgccacgtattaataccgtttcttcgcccttcgctgagtacacctcactggatgaactgttccgcgcaacctatgagcatgagcagcttattacgcagaaaattaatgaactggctcatgccgcaatggccagccaggattatccgacatttaacttcttacagtggtatgttgcagaacagcacgaagaagaaaaattattcaaatctattattgataagttaacgttggcaggaaaaagcggcgaaggactttatttcattgataaagaactttcaacactggatacgcaaaattaa

SEQ ID NO: 374646 - DNA, 264 bp, Salmonella enterica
atgcagggaggcctctcatcgacggagagtgcgtgggcaatgaccgcccggggggcgctaacgccggttcacatgtctggctttagtgtggctttgggcgcttcttattggaaaaactgcttcccgattcgccttttgtgcattaacttccggaatcctcctcatttcgtgttaatctggcctctgatggttgccatccaaactgcctgcaaaaattattttatccgctgcaacaagagaaccacagacggaagttattactga

SEQ ID NO: 374647 - DNA, 291 bp, Salmonella enterica
atgccagtgaaatataccgataatgcaaaattatttattagcttcattagtattgggattgtaggatgcgctttactactcttttttattgtgtatgagcctgatacgaaaatcgtaacctactttcttccggatgagtattcctcttttacgtgtaatgcgcgtaattttatcggctacgtcgatgctaatgattttgcacaatatataaaaataataggatcgacacgctacagtatgtattgtctgaaaaaaatggagactggtcagtggagtgtttatgcaaattaa

SEQ ID NO: 374648 - DNA, 657 bp, Salmonella enterica
ttgatcaacgttcttcttgttgatgaccacgaactggtgcgcgcagggatacgacgcattcttgaagatataaagggcattaaagttgtcggtgaagcgtgctgcggagaagatgcggtaaaatggtgccgtactaacgccgttgacgtcgtgctgatggatatgaatatgcccggtatcggcggccttgaggcgacgcgcaaaattgcccgatcgacagcggatatcaaagtaatcatgctgaccgtccatacggagaacccgttgcccgctaaagtgatgcaggctggcgcagctggctatctcagtaaaggtgccgcgccccaggaggtggtgaatgctattcgttcggtgtataccggacaacgctatatcgcctccgatattgctcagcagatggcgctcagtcagattgagcctgcaaaaacagaaacaccgttcgccagtttgtctgaacgcgagttgcagattatgctgatgatcaccaagggtcagaaggtcaatgagatttcagaacaactgaatctcagtcctaaaacggtgaacagctatcgctatcgtatgttcagtaaattaaacattcatggtgatgttgagctgactcacctggcaatccgccatggcctgtgtaatgcggagacgttaacaagccagtga

SEQ ID NO: 374649 - DNA, 156 bp, Salmonella enterica
atgcatcacgcggcaacgtttattttatgggtaaaccttcagccttttgatcaaaaaacaaccactgctatttttagcgcagcttatggtatactccgccgccttaacatctgctatcgcacattttcactgaaacataacgaggaaaataaatga

SEQ ID NO: 374650 - DNA, 312 bp, Salmonella enterica
ttgagtaccaaggaggagaaagccacccgtagcatgggcggtaaattagcgttatgggttttttataccttttgcgtctacttcatctgggtgatggcgcgttacgtctggctgatatccgtcatacaagtcgagcctgttctcggcccaaatggcgcgccagtcagcgtaacggaaaagtggcttaacgcgctatctctgggcgtcgtctggcttattctggggagtattgcctggtacacccggcctcgcaaaggcctaactttcccctccgacacgaagccagaaatgcgcaatcaagcagggatgtaa

SEQ ID NO: 374651 - DNA, 528 bp, Salmonella enterica
atgctgggcagaaccaacggcgtcgctacctaccgcaacaccgacttcttcagtctggtggactgtttgaacttcgcgttgcagtaccaaggtaataatgaaaatggcagtgctggtgaaggtacgggtaacggcggtagtcgcaaactggcgcgtgaaaatggcgacggtttcgggatatcgaccacgtatgacttagggttaagtctgggcgcagcctactcctcctctgaccgtacagacaaccaggttgctcgtggttatggcgacgacttgaataagcgcaataactatgcgggtggcgaaaccgctgaagcctggaccgtaggcgcgaaatacggcgcctacaacgtttacctggcggccatgtattctgaaacccgcaacatgacctactatggtaacagcgatggcgaagatatcggcggcctcgataacaaaacccagaacgttgaagttgtcgcacagtatcagttcgatttcggcctgcgttcgtcacctgtctgcggtctaagggtaaagatttag

SEQ ID NO: 374652 - DNA, 189 bp, Salmonella enterica
atgagtagtcctaaattttcacttgagctacggcttgctgccgtacaacattatctttccggtaaaattggttttgatgaggtcgccgtacactttggtgtcgggcggacggccctgcgcagatggggtgccgcttatgagcttcatggacctaatggacttcctgaccgcctaaatctttacccttag

SEQ ID NO: 374653 - DNA, 846 bp, Salmonella enterica
atgcactatcaggaggtaatgaaaaaactgacatcggcgttattacatataaacaaaaatgattttactagtggagcaaaaatatttcttgaggatatcaatggatgcactacatgtttctcacgtggagccccatccgactctggtatagactccaaagtcactattgaagtaaccaaaaatgggaagactgtaacaggtcaggtttatagcaaggaattttggaatatatgccgaatgcttgtactgatgcaggcacataatatacctctgaaggtggagaatgcacttttaaccccggatggatttatgaacctgtgtggagtagacctgtcgtataaagatctacagggtgaagatttgtcagaaatggatgcttctggtgcaaatttcactggggcaaagctttgtggagcaaaattggatagtgtatttttatgtaatgcaactttctgtggcgcaaacctatccagtgcaactataagtttcgcaaacatgaccgacgcaaacctgaatgacacagacctgactcgcgcacgggtgaaacagacaaccctgacgggcgcaactatgattggcgcaaacctgactaacgcagtgctggagtataccacccttcatggtgctaacatgtcccgtgcaaccttaaccaatacaaatttaactggcatcaatataaaagatgcaagagatactgctccctctgcctctgctgcttttgttgatgatgatgagaatccttttacaattttcagaaaacaactggaagctactaactcgagaggcgttcaagattctcctgatatccagtattctcatccaacctaccagtcgggttgggtgtga

SEQ ID NO: 374654 - DNA, 867 bp, Salmonella enterica
atgaagtatgtcttcatcgaaaaacaccaggctgagttcagtatcaaagccatgtgccgtgtacttcaggttgcccgtagcggctggtatatctggcatcagcgtcgtcatcagataaaccggcgtcagcacttccgccttgtctgtgataacgtcgtccgggaggcattcagtgacgcaaaacagcgctacggtgcgccacgcctgacggatgagcttcgtgctcagggacgggtgtataacataaaaaccgtagcggccagcctgcgccggcaggtactgcgggcaaaagcctcgcgccggttcagcccggtcagttaccgtgagcatggtctgccagtctcagagaatctgctgaagcaggacttttacgccagcggcccgaatcagaagtgggagggtgacatcacgtatcttcgcaccggtgaaggctggctttatctggccgtggttatcgacctgtggtcgcggtcagtcactggctggtcgatgtccttgcggatgacagcacagcttgcctgcgatgcgttacagatggcattgtggcggcgtaaacgtccggaaaatgtcatcgtgcatacagacagaggtggtcagtactgttcagcggattaccagatcttactgaaacgccataatctgcagggcagtatgagcgccagaggctgttgttacgacaatgcctgtgcggaaagcttcttccacacgctgaaggtggaatgtatccacggagaggactttgccagccgggaaataatgcggacagtagtatttaattatatcgagtgcgattacaatcgctggcgtcgtcacagtgcctgtggcggtctcagtccggaacaatttgaaaaccagaacctcgcttag

SEQ ID NO: 374655 - DNA, 300 bp, Salmonella enterica
atgacaaaaccagcatcaaccaccaaaaagatccgcaagcagcacgcgcctgaattccgtcaggaagccctgaaactggctgaacgcattggtgtggccgcagtcgcccgcgaacttagcctgtatgaatcacagctctacaactggcgaagcaaacagcaaaatcagttctcttcttctgaacgtgaacaggagatgtccgctgagatcgcccgtctgaagcgtcaactggcagagcgggatgaggaactgaccattctccagaaggccgcgacatacttcgcgaagcgcctgaaatga

SEQ ID NO: 374656 - DNA, 189 bp, Salmonella enterica
atggcatcaaccgataccgctatccgcaagattaaacccaccgataaatccttcaagctcacaaacagttcaggactatacctgctgatcaaatccaatggcttaatactctggtacattaagtaccgcatccttggtaaagagaaaaagcaggctttctggtccctgaccggatgtttccctgtttaa

SEQ ID NO: 374657 - DNA, 861 bp, Salmonella enterica
atgaccaaagcggagatcgcgagcgctgtaaatgaatggttcaacattgaaaactacagcgtcctgcaaaatttgacagtagaacaacttttccaagagatagagaacaggattgtcgtttaccgcatggagcaaaaccgtgcggagctgtctcctgaaaaccttagcaggcatcagaaatattacgaagagttgattgaaggtaaagtcgtgtttggtgatgttttcggaggaccagaaaaaagactgtcttccagctatgccatcaagcctgtcacacaccaagggctatgggaggtggcgggttatgttgctgctttcgataaatacgttaaccctgaaggaaaacccctgcctcatatggaagtctcgcactatctgaaggaagccggggtaaacaacgaggggctgatgctggttcaaattaatctggcggaaacgtcatccgaagaaatcattaatcacctgaaagtcatggttccagagtggaaagaacagctacaggctcctgagcctccagtcagagatttccgttttggggtcagcaacctcaaaaaaatacttgattacaacattatccctatcatggatctgctgttctgggcgcaggatgaagaggtcaggattggtatgccacaactgaccagctttttataccctgatgagtttaaagacggtatccgtgatgtagataaggtgaaatcaacagatcatccgctggctgtcaagtatctgacaaagcttgctcactatcagtcttttgtcgattttacctataaatacgacgacagaagacactggaatgttcaggatctgatcagagaggagcttggtaaggatgagcaatccggtcaggactga

SEQ ID NO: 374658 - DNA, 219 bp, Salmonella enterica
atggttcaaatcaaaacagataaacatccaaaactgattcggttatccgaagtaataagaagaacgggatttggtaaaacgtggatttatacgcttatcaaaaccggacgttttccttcacaggtaaaaaccggtgtaagagcagtcgcctttattgaaagtgagatcgatgcatggattgataacgctatcgctcgctcacggaatgtatctaaataa

SEQ ID NO: 374659 - DNA, 261 bp, Salmonella enterica
ttgaaaagcgtagaggattatgatgcctatttacaacgtatgcgaaaatacatgggggaaagattccatcataaccttgaagacgatagttatatggaaggtgtattaaagtcaataatagaaaacggcaagaaagactttaaagattttttgaaaaggaataaatataaaggttcgattaaggacgtttattttgatgaggtgcttgttcatctaaggcagattcatcaggtaatgagttatctcatcctgcatgtctaa

SEQ ID NO: 374660 - DNA, 237 bp, Salmonella enterica
atgaaaaatgatatatcggtagtagtaagtatgttatgtgaaagaacacctaaaacacttagcgttattcaggaaagtttcaatgtttttgttgcactgagtggctttcctgttgaggaaatcatgatggataaaaacttattagatgcgttgaatagatatgtgaataatgatttagttgatgaaatgggtttggaatatggatctgaactcatcaatctggtttataacaaatag

SEQ ID NO: 374661 - DNA, 291 bp, Salmonella enterica
atgtctaaaaaaagtgttattgaaaataaatctacaaaactgtttattgatcttgcatgcaggtcatttgatgcaaactggaaagcctttcaggaagcgaatggggagagtagtgagcggcttgatgattctgttttcataagtctatttcttatgtatgtcattgaccatattaagaacaactttgtgaagttcacgactcaggaaggggattgtggaaatattaatgaagttaactttgagcaagttgctgttgtgttggtttggcatactgagaggttcagaaaataa

SEQ ID NO: 374662 - DNA, 237 bp, Salmonella enterica
atgattgatgaatttcatgttatgtatatgtacaagaaaatccaagctgaagccgcaactaccgacatcaaaacgctggaacaactattgaagaagttccgtcaagtcgttgcggagcgacgggaagagtattatcaggatattggagagaaaaaaacgcagaaattaaagactaaaagattacaacagtttcttgagaaaatggaacgtgatcgtgtttcaccctttgagttataa

SEQ ID NO: 374663 - DNA, 468 bp, Salmonella enterica
atgaggaaagtaaaattagacaatgatgatttaattcactatctgaacaccatcaaagctttaaaaaaatatccaacgatgactgaatataaagcagaatatcgcagactaagaactaatggttcacttttaattgaagccaagaaatttaaatcagcacatattgaattactcaggctggacaggaggaaaacatccctgctcgaaaaatttattgaagaactcaatcctgtcagtcattcatcggcccttgcatccaagagccttgagaaggttcatgaatccatactctacagaaaaacgttgttagaaaaaacacctgatgaacccttcgctcttgtcatcaaacaacgtacagaagctgctcttgagcttcagcgttctattgaacagagccttgaacagctttcttctatctcatcagattttaacgcatcaactacaaaacgccgaaaattttctatctaa

SEQ ID NO: 374664 - DNA, 702 bp, Salmonella enterica
atgagcattgattacaatacaataatgacctccagcagtgaagaagtggaagaatatataaacagaaatcattttacagacaaacagaaactggagatttacagtttttataacagaaacagaaaggataaaataaccgtaaatgtaaaaaaagagagaagttctgatattcaaccgggaatagcctatgttcatgcttttcttgataatctggaaaagctcggaaaaaatatgtctggtgcagaatacacaataatgatccgcttatgtaaactcatgcagcatggaaacctcattgccagtatatctcagtcggcactcgcagaagagcttaatatgagcaaatctaacgtgtgtaaatgctggaataagctaataaataaaggcattctggtcaaagaagggaagcataccatgataaacgcaaatctctttctgaaaggccagtacagaacattaaatgccacaaggaaagaatatgttaagaagtcgctgagaacgaccagtgaaggtatagaagacgtattcgtcaccgtttataaagatacggtacttacaaacagcgcagaaaaaacaatcgataaagaagatgataaacctttactttctactcccgaagaagatattgactgggactctgtttcagaagataacattttttatgattatcctgaagatgttgatcaagaagaaagaatatag

SEQ ID NO: 374665 - DNA, 345 bp, Salmonella enterica
atggcaccgtctatttttctgctttgtttttacttgatgttatggacagcaagtgattgttttatacaatcacgaagcgctgctgattttttagtaaatatacaattgtttttcctctacgttatagcggctacgccgcaattctttatggataaatccatcattaacagggatgaaccctgtttaagcaatgtgattgttttggacaatcacgaagtactgctgtggatattgtttttctgtaaacttaagaataaatgctatatatcgaaaaaggatctgatcttcggtaaaaggatcctttccatattgcaattaaataatggaaactgtgttagccattaa

SEQ ID NO: 374666 - DNA, 216 bp, Salmonella enterica
atggaaagaataaaaataataagtatttttaaaataaacgaaaaagtaccctttatgacatgtatcgcaaccaatatggaagaaagtgaagacggaataaagctcatgctggaaagtgatgaaagcatctgcattaaagattacggttattacgtcctgtcagaagttgactgtgatttggacagagaacaaatgataaacgtaacgtcccggtga

SEQ ID NO: 374667 - DNA, 285 bp, Salmonella enterica
atggaactgagccggttcgtggatgatggcgcattaccgctggataataaccggtgtgagcgcgcgatccgccaggtggtaatgggccggaatacgtggctgttcgccggatcgttgcaggcagggcatcgagcggcagcggtgatgggcctgctggagacggcgcggctgaacggcgtggagccgtatggctggctgaaattggttctggagcggctaccttcattaccggaagagcggctgcacgagctgttacccttcgcgaaaaatcctctgaataactga

SEQ ID NO: 374668 - DNA, 132 bp, Salmonella enterica
atggagtttaacgaattgtccagcgaccttgcacaactggaggtactcagtcagcagcgtgtcggtggcattgtccggagacagaaacatattgcgctgttacataaattgcaaactgaactgatcgtataa

SEQ ID NO: 374669 - DNA, 999 bp, Salmonella enterica
atgcgcatcaattcagctcaaacctatgccagggcgtttaccgcaaatacacaactgcatgaagctgctggaaattatgaaaacaaactagccactaaaatcgccaaaggaatcgttggagtactcactctagggattggatatggtcttatccgactaattgaaaattgttacaatgtgcgtaataaaattaatgattattgcgctaatgccgagaatatttataatggaattgcggtagctatagcgacggggaataacgttgccgagattaaactcaaggacaatacagttttaacattaatgcaaattgaccatggacacattagtgaatcctttgtaaggatatcagatggtcagtatactgaagaaattccaggaacgtttaacgatatctgtatgaagctaggtcaggagtttaataatgcgcctggcctgtataacattagcagtcaatatcagcctctggacttctttttacagatgcgagcctgcacaattgaaccagtcattaacttttcgccggtcaccgggcaatatgaaaatttatatggaaataatatttgcaatatacataatgcactttgcaaggctatattaatggaaacaccagaggctaaagtaacgttaatcggagggtcgggaattgaattaaccttctcgcaagaatcggacgacgaacaaaaaaaaacacagatatctaatgggttacaggttatggaagttgatggtactttcaccgatctctgccgggaatatgagttcttactttatgcaaaagaccagaatattgattttacaacgctggatgagaggttagcaaaggtaaaagcgaataaaaactcagcaggggcaatccctggtctggatgaatttactcttacagcacgctgtatggctgacgcaaaagaggggcatcttgcagaagccacccaacggtttaatgcagcttatggcgaaagcgcgccaccttcaaggcccccactacgttttaagtaa

SEQ ID NO: 374670 - DNA, 723 bp, Salmonella enterica
gtgactaaaataaatctgtccccccagttttatagaatccatagaagtgacgtcgaaccagtaaaagaaacaacaacggagaagggcgtttttgcaaaaagtattaccgccgttagaaatagctttatcagcctgtctacgagtctgtcagagcgttttagcctgcacaagcaaacagacacgccggctacccattttcatcgtggtaacgcttctgaggggagggcggtattaaccaataaaattgttaaagattttatgctacaaaagctcaatagcctggatatcaaagggaatgcgagtaaagatccggactatgctcgtcagacatgtgaagccatgttatcatcagtgtatagtaataataaagatcaatgttgtaagttactcgtcagtaaagggatcagtattacgccttttctgaaagagataggagaggctgcgcaaaatgcggggctacctggagagataaaaaacggcatatttacgccaggtggggcagggacgaatccttttgtcgttcctcttatcgcttcagcgagtgttgaatatccgcatatgtttataaattatagtcagcaggtgtcttttaaagcgtatgctgagaagattattatgaaagaagttacgccgctgtttaatgagggaacgatgccgacgccacaacaatttcagttaactgtggaaaatattgcgaataagtatcttcagaatgcctcctga

SEQ ID NO: 374671 - DNA, 162 bp, Salmonella enterica
atgccgccttttaaaaaatttgtgctgctgtttttgggggcaatgttagccacggtaacgacacccgccttggctctggtttgtcttgcaagtcattcagcgaaagagtgtgctaaagtgtgtggtgtcgatatgtggtttatgtttttggcatgtttttaa

SEQ ID NO: 374672 - DNA, 651 bp, Salmonella enterica
atgatgcggcctgaagagatttatcagcgaatagaggggaaggattggcggcatatctgggttgtcggcgatatccacggctgtttttcaatattaatgaaaaagttacgtgagtatcaatttgatccgcaacaagacttgttagtttccgtgggagatattatagatagagggccagacagcttacgtagtctggctttactgcgtgagtcctggatgagggcggttcgcggcaatcatgagcaaatggcgcttgatgcgctggcctcatcacagccgatgctgtggtttatgaatggtggcgactggtttactcgcctgacggctgaacaaactgtacaagctgaaatgcttttcaccctttgccagcggcttccctggatactggaaatacgctgccgccataacacgcatgttatcgctcatgccgattatccgtcgccaatctatcaatggcaaaaaaaggtcgatttacatcaggttctctggagccgtgaacggctaatgaataaaagtggtgggattaccggcgccgatcatttttggtttggccatacgccgttgcgtcggcgtatggatttcgacaacgtacactacattgatacgggcgcggtatttggcggacaattgacgttagcgcagatacaatag

SEQ ID NO: 374673 - DNA, 171 bp, Salmonella enterica
atgaatacatttattaaatttatcgtggtctttccatgcttttttttagcagaacagacattagcaaatgattatagtgctggtgttaaaaacacgatgaccgctttaaagtctacctcaacactggtgaaaatattcgcttcgagtttggtgctcgttacatcaatatag

SEQ ID NO: 374674 - DNA, 1560 bp, Salmonella enterica
atgtcactcacaagaagaaacctgctcaaaggactcgcagcttcaagcgcattaggcgcaacagctgctgctgctggtttaagtgttacacacactgccgatacagctaccacaacgcaaaaaataatcaaaaagcctaatttgttaatcgtctttcctgatgaaatgcgggcacaatcgctgggctttatgggtcaggatcaatctgttacaccctttattgatcgatttgcgagtcagagtgtcgtattgaggcaagcagtttctaactacccgctatgtacacctttccgcggtatgttaatgaccggacaatacccgtatcgcaatgggttacaaggcaactgtcatactggtgcacacggtaattttggtgggaaagattttggtattgagcttaaaaaagaagctataacctggtctgacattcttaaaaaacaagggtttagtatgggttacattggtaaatggcaccttgatgccccagaagcacctttcgtcccaagctacaacaacccaatagaaggacgttactggaatgattggacaccgccagaaaagcgccacggcttcgatttctggtacagctatggcacttacgatttgcacctcaacccaatttattggagcaatgatacgcctcgtgataatccattgagaattaaccaatggagcccagaacatgaagcagatatggccatcaaatatttacgcaatgaagggggcaaatatcgtaatagcaacgaaccttttgcgctggttgtttcaatgaatccgccacattcgccatacgatcaagtgccccaaaaatatcttgatcgctttaaagatcagacatcccgctctctaaataaacgccctaatgtagtatgggataaaacgtatcaggaaggctatgggcctgaatatttcaaagaatatatggcaatgattaatggtgtcgatgaacaatttggacgtattctgactgagttggagcgtctgaaactggataaagatacgctggttgtcttcttttccgatcacggatgttgtatgggctcaaatggtcaaccaactaaaaatgtgcattatgaagaggccatgcgtattccaatgatgtttcgctggcccggtaaactacccgcttgtcaggatgatttgcttttttctgccccagacatttatccgacattactaggattgatgggattgggtgagcatatcccagatagcgttgagggtactgatttctcaaagacgcttatgggacatcctggcgataaacgtccaacatcacaattctatacgtttatgccttacggcgggcaatcttacggcagacgtggtgtacgaaccgaacgttatacactggttattgaccgtaaaataggccaaccacttacctatattttacatgataataaaaatgatccctatcagatggaaaacatcgcactaaacaatatgtccctggtgaataaactgattacagaagagctgattccatggttggaacattcaggcgatgtttggcgcccaactgaagtttcagccaaagcagtaaacgcttacatttaa

SEQ ID NO: 374675 - DNA, 777 bp, Salmonella enterica
gtgaaggcggcaatcgaaaggcgtatggaaatactcgaggtgataacccggcaggggaaagctcgtgtcgaagacttagccgaaagattcaatgtctcaagtgtcaccattcgtagtgacctgagttttttagaaaaaaatggatacatcgtcagatcgcatggttcagctatcccgaatgttggcgtaattgcagaactcactgttaatgaaaagagtcgccgtaattctgacgtaaaatctctgattgggtgggccgctgcaaaactgattaacaatggtgatacggtcattttggattcgggaactaccacgcgcgaaattgctgccaatttaaagtcagtagaaaacgtcgttgtcatgacaaatgggctggatgtggctgtggagttagcgtcagcgcctggagtggaagttctcatttcaggtggtgtgctacgtaagagtgcgatgtctttctctggttcccaggctgaagccagcctgaaaaacgtgcgttttgacaaggtttttctgggggttgatggttttgacttacgagtaggtatcacgacacataatgaacaggaagccagtcttaaccgcttaatgtgtgatatttcggagcaagtgattgcggttgctgactctacgaagtttgggaaacgtagctgccatatgatccgcgaatttggtgatattgatgtgttagtgacggactctaatatccccgaagaatatgtgcaacgcctgcgggatatgcgaatcgaagtcattatcgctgaaaaagagaagtaa

SEQ ID NO: 374676 - DNA, 141 bp, Salmonella enterica
atgtcttcgttagaaaagcttgttcagtgccacagagctggggagcaaattagaatttattctgtttgttctgcccctcctcttgttattggcgctactcttgaacaagtattagataacggttacaaaaatataaattga

SEQ ID NO: 374677 - DNA, 498 bp, Salmonella enterica
atgactcagccaaatatcgtctggactcgtatcgacgagcgtttacttcacggacaaatccgcattacctggggaaaacatacagaggctaatctgatcctggtcgctaatgatgaagccgccgaagggccaaatgctgcttttatgcaggcgggaatgaaagcttctgcgggcggtgaatatgccgtacgtttcttcagtattcagaaaactattgacgtgatccataaagcctccccacagcagaaagtattcatcctgtgtaacagcccaacggatgttgcacgtctgattgaaggtggtgtgccaattaaacattgcaacgtgggcaatatgcatttccatgaaggtaaacggcaaataaccaaaacggtttctgtcgatgaaaaagatctcgatgctttcagacgcattctcgcctgtggtgcgacttgcaccgtgcagaacacacccgaccagactccggtcaatgtgattgaactcgccgtcagtgcataa

SEQ ID NO: 374678 - DNA, 771 bp, Salmonella enterica
atgctgtttgaagctactttagttgcaatctgggccttcttgtgcggtatcgacaagtacgacgtagccctgaatattcaccgtcctttaattaccggcccgattgtaggcctgattatgggcgatatggaagtgggattgatcgctggcgctactctggagctggcctggctaggtctggtgcctaatgctggcgcacagccacctgatgtgaccatgggaacgattgctgctgtcgcttttgcggttatgacgggccagtcaccggaagtcgcgatgggcgtcggtatgccaatcgctgttctgatgcagatgattgttatcggattttttgcaatgacagcgttcacaatggggaaagctgatagatgtgctgaacaagctgatacggcagggatctcccgcttattggtgggaacattgattacgcgttccatgctctatttcattatcgccttcgtgacggtgtatttcggtgagcatgcagctgcctggattgatgaaaacacgccaacggtcttgttagaaggtctgggaattggggcgaagatggtaccggcaataggttttgctatgttgttgaagatcatgtggtcgaaagaagtggcaggggtgttctttatcggtttcgtgatgactacttatctgaagctgccaattatggccgtggcaattctgggcgcatccattgcccttctgtactacttctttagtggaaaaaacagtaataacaataccaaacaagcagaggatttcgaagatggcatctga

SEQ ID NO: 374679 - DNA, 891 bp, Salmonella enterica
atggcatctgatatcaccgtagacaaaggccgcgtagcggaagccaaaacaagcagcctgatcgataacgttgatgcttatcaggataccgaggttcgtaaagtgatctcccgtaaagacctgtggaagtgcgcgatccgggggttgtttatggagggtaactttaattttgaacgcatgcaggggggcggttttgcgtattcgattatcccggcattgcaaaaaatccacggtaataaccgcgcggacctggcgaaatcgctgaagaaccatttgcaattcttcaatgccagtccaaaactgttcaccttcctgctaggcacagcggttgctatggaagagaacaaagaaaaaccgtcgacgattaacgttatgaaagttgcgggaatggggccgaccggtggtatcggtgatgctatagaccatatgactctgatgccattgacgttagcgctgggggcgtctattgcgattgaagggtcgatcgcgggaccctttgtgttctttattctgtatcagattgtccattttttggtctatttcggtttgatgtttatggggtatcgcgcgggtaccgcggcgatggtgaacatgagtgatgccacagagaagttggcaaaagcggccaacatcatggggatctttgttatcggagcgttatgcgccacctttatcaggttaaaaaccactgcggcaatcgatcttggtgggaagacagtggagctacaaactgcactgtttgacaagatcatgccgaatttgctcccgctggcgttagtgttctttatgttcaaaatggtgaagggaacaggcttttgggcaaaacccccggttctcattttctcgacactggctgcgggagttatcggccatctgttgggcattgtgtaa

SEQ ID NO: 374680 - DNA, 441 bp, Salmonella enterica
atgattgggattgttgtctctggccatattcattttgcttccggtatggaatcagcggtacgagcaatagccggtgaacaaccgcaaatggctttcgttgatttcgtggaaaatctatctacagacatgctggaagaagaattacgcaacgctggtgatcgggttgatagtggtgagggcgtactgtttttaaccgacattcccggagggtcgccgtgtaaccgtgcgctgaatatcctgatgagtggtcgcaatgctgagctactggctggggttaatttaccgatgatcgctaacgcggcttttgagcgtgatggcgtatcgttagctgagctagtggacattctaatggacattggggctaccagcgtacagaacatacgtactgaactggcagccgcaatggttgttgataacagtgataatgaaagtggactctga

SEQ ID NO: 374681 - DNA, 1059 bp, Salmonella enterica
atgagtaacatggtacagcagactcgtgctcagcaggcgagtgaaacgatgaaacgcgtataccgttatcaggcaacgcatcagactcgtagcgtgatccgccggagtggtaaagtccgttttattaaagataccgattgggaacgtggcgtattttggtcttgtgtggctgccgcctggctggcaacaggtgatcaggaatatctggatggcgtgatgaattatacgctgcacacggggttccgtcccgggccaaacttacgcttcgctgacgatctaatctgttgtcaggcatatctggatgtttggccggtgatagctatcccggaagctttggaacccacgattaaggccatatctgccatcgtcaacgaacctaaacccggacgtgaagactggtggtggtgcgatgcgttatttatggcgcccgcaacgtttgctgcattaagtaaatgtacaaatgatcctcgttatctggcctatatggatcaagctttctgggatgctgtggagcatttacgcgatcctgaaacggggctgttttatcgtgatcatcgttatattcctgatggtaacggcagtgaattgcgtgaagaaaatggcgaaaaagtattctggagccgaggtattggttgggtgttagcggctatcccacgtttactggcgcggatgccagaagattatgcgggccgtcagcgctatcttaatttgttcaccgatcttgcagataaagtgattcgttatcagcatgaggatggtttatggcgtaccagtttgcttgatccccatcgttttccggcgccggaaagtagcgcgacagcattattctgttatgggctgtgttgggggatgaatcagggcgtattgccagcagaaatttatctgccggtagttgaaaaggcctgggatgctttgcagggctgtattcataaaaacggtatgatcggttgggttcaattgccggcattcaatccacgcgatgtaaagtttgaacacaatattgactacggtgctggagcatatttattagcggcaaccgaagtaatgcgtttgaagtaa

SEQ ID NO: 374682 - DNA, 1233 bp, Salmonella enterica
atgaatatgtcacaaactcaacgagcctactttcacatgatggcaaaacctgtcagctatcgttgcaacctgcattgtgaatactgtttttatcttgaaaaggagacaatgctgaatgcgcggaaaagcccgaaacagacaatgagcgacagtatgttgcgccgctatattcgtgattacttacgttcccatgccggcgatacggtggattttgcctggcaaggaggtgagcctacactggctggattagatttttatcgtaaggctgtggcatatcaacagcaatatgctgacgggaaaactattaccaatagttttcaaaccaatgcaattgctattaatcggcaatgggcagacttttttgccgaaaatcgttttctgattggcgtctctgtcgacggaatagcagagatacatgataaataccgtattgctgttaatggtcagccaacctttgagcgtgtcaacaaatctattgcgttgttacgtgaatacaacgttgattttaatacgctaaccgtagtgaacgatcaaaactatgataaaggacgggagacttatcaggcgctcaaagcattaggttccacttttttacagtttattcccatcgtagaagttgatgcccgttgtttgccccatacaaagggtcattactcaccaccagcagatgccgtattgtcgccttttagtgttccggcagatggttacgggcgctttatgaatgctgtgtttgatgcttgggtgaaagaagatgttggttctatctatatacgtgagtttgacagcttactgggaacctggatgggatatccggcatcaacctgtgtgcaagcgattacgtgcggtcaggcgctgatcattgaaactaacggcgatatttacagctgcgatcactatgtctatccggcttacttgctaggtaatattgctaacacatcgctggtaaaaatggctacatcacgccagcaacagcgttttgggaatgcaaaacaggaaaaattgacccaaatgtgtcagcagtgcgaggtcaaagctctgtgtcagggaggctgtccgaaacatcgtatcgtcccgcagacgggagaaaagcataagcacaattatctgtgtgcttcttacaagcatttcttttatcacaccgcaccagtcatgcaggccatgagcaagattattcagagcggcggcgtggcggctgacattatgccgttactgaataaatttaatagccattaa

SEQ ID NO: 374683 - DNA, 1626 bp, Salmonella enterica
atgaagttatccgcaggaagaaaaactctgttagctggcctgattgccacggtgtgttccactatagcatccagtgtattagctgcaccgacatcaactgtcgcaggtaatgaaaaacctaatgtgttgttggtcatcatggatgatctgggcactggtcaattagatttcactttgaataatttggataagaatgtactaagtcagcgctcggttcccatgcgttatcagggggatttggacaaaatgattgatgcggcacaacgggcgatgcctaatgtggcgcaactggcgcaaaacggggtcaaaatgaccaatgcgtttgtggctcatcctgtgtgcggtccgtcacgtgcgggaatttatactggtcgttatccgacaagtttcggtacttacagtaatgatgatgctattaaagggattccattggacatcaaattgctgccagcgctgtttcaagaaaatggatatgctacggctaacatcggtaaatggcataattcacgtattgacaaaaagaattatattgctgatgatgttaaaacccgtgattatcatgacaatatgatttctgtcagcgaacctggttatgagcctcaaaagcgcggttttgattattcttatagttattacgcgtctggtgcagcgctatggaattccccggctatatggcgcaatagccagaatatttctgcaccgggttatctgacgcatcatcttaccgaggaaacactgaaatttattgatctggcagggcagaaacctttctttatcagtctggcatatagcgttcctcatatcccgttagagcaagcgtctccagccaaatatatggatcgatttaatacaggtaatgtggaagcagataaatattttgcggcaatcaatgctgctgatgaaggaattggcaaaataataaattacttgaaagaaaaagatgaattggataatacactcattttttttatttctgataacggtgctgtaaatgaatctccaatgccaatgaatggtatggatcgcggttataaaggtcagatgtataatggtggggtacatattccgtttgtggcatattggccaaaacagatccctgcgggtacgcaaagcgatacgttgatcagcgcattagacattttacctaccgcattacacgcggcagggattactattcctgatgaaatgaatgtcgatggtaaagatattatgccggtactggcgggtaaaagtaagacttcaccacatcaatatttgtactgggctggaccaggagcgaaacattacagtgaagaaaatcaacctttctggtacggctactggaagtggataacttataccaatccgtcagcccctaaaaatcccaatttagaaaaactttctaaagcctcatgggcaatccgtgatcaagagtgggctctttatttttacgatgatggaactaatactccgaaactgtttaatgacaagcaagatccaatggagtcgaaggatctggccgctcaatttcctgaacgcgtcaaagtaatgaaaactgctttttatgagtggatcaaaaataagccgaagcctatcgcatgggggcaagatcgtttccatattttagaagagtcagcgaaaaaatga

SEQ ID NO: 374684 - DNA, 1482 bp, Salmonella enterica
atgagtgtggaaattagtgctaaaccccgcccgataattccctatgaacatcccgatgcagcgatgtattgcctgttatttaaacaacacatcattcggcaatggtgcaaaaaatgcccctatgacattcacgacacgcggttacagaagctgtttcaggactctcagatttcgttgcaatatcagtgtgattatttagtccgttatgtagcagaggcttttgatcattatgctgtttggggacatacccatgcctattatccgggacgccctagccagcaaaacgcgcgtactgatgccttagaaggagtgagtcgggtgttacctaccctggcagtgtggttacgaaatcaacctgccggagaggggcgtatggatgatctgaaggggggaacgttgaatattacggcgatcatcactgaggcgttcttagcgggaaccgatcctacgcatccaggttactggggaaagcttcatgattatgatcagcgtatttgtgaaagtgccgatttggctctggcattatggctatgtcgtgaaacggtttgggagcggttaacctccgctcaacagcagcaaattacttgctggtttaatcaggttaatggtttacaaacggtcgataataactggcacctttttccattaaccgtgcaatttgtaatgcgtgccttgaatggctctggggatgttagcaacgaaaaatatgaacgtataaaagaattccatgtaggtggcggttggtttagggatggggcgcatggtaattacgattattacaatgcatggggatttcactattccttatattggcttgaccaaatcaatcctgaatatgatccacaatttattcgttcctgtatggcggagtttgttacgacttatcgttatttgatgacaccgcaaggcattcctttttttggtcgcagtgcctgttatcgcctggctgtttctgccccattactggcggtagccagtcattcaaaagatgcgttacaaataggggaagcgaagcgtgctctggaaacgacactgcgttattttattggcaatggggcgatgcgttttggtgttccaacgcagggattatttgcagatgacgaacgattggtggacaactacagtggacctgccagtagtttttggtcattacgtgccctgaatattgctctgtattgtgcgtctgatattaatctatggttgtgtgaaagtcgtcaattacctgtagaactccaggattttagtttaactattgagcctgtaaatctgtttgtgatgggaacttgcgaaacgaaagaggtggtggctacgttccgtagtgattatacccaacagcaatccccattaacgcgtggccttaccacgccatcgtggtccgcacgttttaaagagtggcttactggtcgcgccgaacggcctaaaaataatttattacgcaaaggtgtgacaagttacagttctaagatgacagcctttttttag

SEQ ID NO: 374685 - DNA, 306 bp, Salmonella enterica
atgataaatggcataagaaaaaataaatactgcattactaacgcactgggcgcgatcgaagtaatacgcgacatctgtcttgatgaccttgtcgcgaacgttctggcagtgccaggcgtgagggggaaagctggagatagcgagtttgtcctgacgcgggaggttttcccgcgcacagattcaaaatgtcagcactttgtctgcggccagcgtccattgcgccagctcgaccagacttccgatttccacaccgtcaatcagcggcaggggggtgataccacgtccgtccgcacaggttttgcataa

SEQ ID NO: 374686 - DNA, 1797 bp, Salmonella enterica
atgcttaaacgttgtttctctcctcttacgctggtcaaccaactggcgcttattgtcatgctctctaccgctatcggcgtggcggggatggctgtttccggctggctggttcagggcgtgcagggcagcgctcatgcgattaacaaagcgggctcattgcgtatgcaaagttatcgactgctggccgccatcccgctggatgcgaaagatgaaaaactgctggatgagatggagcagacagcattcagccctgagttgacccgcgccgccgagcgagacgggcagcagaagcaactgaaagccttgcaggattactggcataacgaactttcgccagggctacagcacgcgcaaaacgcgcacgcggtcgcagaagatgtcacacgctttgtggcgggcctggatcgcctggtcacctccttcgatcataccactgaattgcgtatcgaacgcgtggtgttagttcaccgggtaatggcgctctttatggcgctattgctggtatttacaattatctggctacgcgttcgccttttgcagccgtggcaacagttgttatcgatggcgcgcgccgtcagccagcgcgattttactcaacgagccaatatcagtggacgcaatgagatggctgcgctgggttcagcgctcaataatatgtctgaagaactggccgaaagttatgcggtactggaacagcgtgtacaggaaaaaacggccggtctggaacataaaaatcagattctctcgtttttgtggcaagccaaccgccgtctgcattcacaagctccgctatgtgaacgtctttcaccggtactgaacggcctgcaaaatttaacccagttacatgatattgaactgcgagtctatgacctggaagatgaagataatcaccaggaattcacctgtcagtcggatatcagttgcgatgataaaggttgccgtctttgcccacgtagcgccctgccgatgattaatggcggcacaaccttaaaatggcggctcaccgactctcacacccaatacggtattttgctggcgacgctgccttatggacataatctcagccacgatcagcagcaactggtggacacgctggttgaacagcttaccgcgactctggcgcttgacaggcatcaggagcgccagcagcagttgattgtcatggaagagcgtgccaccattgcccgcgaactgcatgattctattgcccagtcgctctcttgtatgaaaatgcaggtgagttgcctgcaaatgcagggcgacgcgttaccggaaagcagccgtgagttacttagccaaattcgcaacgagctgaactgctcttgggcacaactgcgcgagctgttaaccacattccggttacagttgacggagcctgggttacgtccggcgctggaggctagctgtcaggagttcagcgcccggtttggctttacggtaaaactagattatcagcttcccccccgtctggtgccgtcacaccaggcgatacacctgttgcaaattgccagggaagccctcagcaacgcccttaaacactctcatgccgatgacgtggtggtgacagtgacgcaatgcggcaaacaggtcaaactaaaagtacaggataatggctgcggcgtaccagaaaacgctgaacgcagtaatcactacggcatgatcatcatgcgcgaccgggcgcaaagtttgcgcggcgattgccaggtacaccgtcgtgagtctggcggaacagcggtcactgttacttttattccagaaacaaacttcacagaaacccagggagatacccatgaataa

SEQ ID NO: 374687 - DNA, 189 bp, Salmonella enterica
atgaaacaatatgaggtagtgtgtttgacggggataatatacgcgacggaagtgatgatggtgggggaaggattattcgtcgctccggtcctcacccttcgggtcgttgcctgcggcaacgctttctcgctgcgctcgaatcgaaccttagtcgaagcttctcatccttccccgtacggagagatatga

SEQ ID NO: 374688 - DNA, 207 bp, Salmonella enterica
atggaacgcttcttcagaagcctgaaaaatgcgtgggtaccggtgacgggttacataagcttcagcgatgcggcccatgcaataacggactatatcgtcgggtattacagtgtactcaggccgcatgaatataacggtgggttacccccatacgaatcggaaaaccgatactggaaaaactctaaagtggtggccagtttaagttga

SEQ ID NO: 374689 - DNA, 1464 bp, Salmonella enterica
atgtatcctgtttgtcattcagagagaaatattctgttcgtgattttatccgtcaaagagatttatatttttccttatcaggtgttctatttgagggtattcattatgtctggcgcaatacgttccctggaaagagtgattttacctgttgcggtaacgctgggtaaacagatacatgtgaacgccattaaaaatggctttatcaggctaatgccactaacgctggttggggctatatttgtgctgataaataatgtgttgttgagttttggtgaaggatcatttttctggtctatgggtattcgcttggacgtgaatacccttgcatcactggaacaactgaaggttataggtggtagcgtatataacggaacgctgggaataatgtcattgatgacgccattttttatcggcatggcgctggctgaagagcgtaaagtggatgcgcttgctgccggattgctatcgctcgcctcttttatgacggttacgccgtttacaattggagatgtgagtgctattggcgcaaactggcttggaggggcaaatattatttctggtattattattggtctggtcgttgctgagatattcacttttattatccgtcagaattgggttatcagattacctgacagcgtaccggaatcggtttcgcgctcatttactgcattaatccccggttttattattcttttcatgatgggactgattgcatgggggctgtcgttggctggcacccattttcatcaggtgattatgaattcgattgcgacgccactggcgtcgctcggtagcatcgttggatgggcatatgtgatatttaatgccttactctggttttttggcgtacatggaggactggcattaactgcgctcaatagtggcattttgggcccttggggaatggaaaatatggcgacctacacggagtatggttctatcgacgcagcgctggcggcgggtaaagccttccatttctggactgggccaatgttggaatcttacgtctacctcggcgggactggggcaacgttgagtctgattttcgctatttttatcgcctcacgccgtgctgactatcggcaggtagctaaaatagcattaccctccggactgtttaatattaatgagccgattctgtttggcctgcccattatcatgaatccggtgttaatggttcccttcgtactcattcagcctattctggcgggtatcacattattagtatattcattaggtattattccaccctctacaaattttgcgccgtggacaatgccagtaggactgggggcattcttcaattctaacggcagtatcgctgcactcattatcgcattagtgaatcttgccatagcgacattaatttatctcccttttgtcattattgccaataaagcacaaaacattattgatgaggatgagagcgaagaagatatcgccaatgccttaaaattttga

SEQ ID NO: 374690 - DNA, 828 bp, Salmonella enterica
atggaaataaacacggtacatgaaaaccagtttttaaaaggtaaagatttttacttttttattctggacaaaacggaaagtgtgagtgggctgcatcagcatgactactatgagtttacgcttgttctgacaggaagctgtagtcaggagataaatggtaaacgagtaatcctggaacgtggtgattttgtctttattccggtagggtcttaccatcaaacgttttatgactatggggttacgcggatattaaacatgggggtaggtagacgctattttgatgaacactatatggcgatactcccttcatgttttgtggcgtctcagccttatacaatgtctaatgctttcttaacttttatagagcaggccttatcaacactggatattcatcagcgagaatgtgatgagttcaataaattactcactttttatatcgtcaatcgtttacagcattatgaggataattcgcggtcggatgtaatccccggctggctaagacaactcatcagcgacatgcacaaaaaagcaatgtttgccgatgacgcgttgaataatatggtaaggctttccgggaaaacgcaatcttatcttacacgggctactaatcgttattatcacaagacgccaggccagataataaatgctattcggatcaactattgtaaaaaacaactggagaccactaatttttcggttgccgatattgcctttgatgcaggatttagtagtccagggatttttattaataactttaagaaaatgacttcattcaccccaggcaattatcgacggaaattggcgaattctcagcaggagcatatatga

SEQ ID NO: 374691 - DNA, 1356 bp, Salmonella enterica
atgaaaaaattaaaagtagtgactatcggaggaggaagtagttacactcctgaacttcttgatggatttattaaacgctatgatgagttacctgtcagtgagttatggctggtggatatcgaagaaggtcgcgaaaaactcgatattatttttgcgctttgtcaacgtatggtcatacaggcgggagtgccgatagcgatttataaaagtttaaatagacaggaagcgttaaaggatgcggattttgtcacaacgcaattccgggttggtcagctaaaggcgcgtgagcaggatgagcgcatcccactgtcacatggttatcttgggcaagagactaacggtgcgggcgggttatttaaagggttacgtaccattcccgttatttttgatattgtgaaagatgtccagcagatttgtcctcaggcgtggattattaatttcaccaaccctgccgggatggtgacagaagccgtgtatcgacatactcgtttcaaacgttttatcggcgtttgtaacgtcccggtagggatgcggatgctcattgaggacattctgtcattaacaaaagaagatacgctttctatcgatctgtttggtctcaatcacctggtgtttatcagcaatatttgggtaaacgggcagtcacgttttgctgaggtaatgaatctggtggcatccggcacgacgagcggcagttcggttaaaaacatatttagcctgccatttagtgaagggttactgcgttcgctcaatttattgccatgctcctatctactgtattattttaaatctaaagaaatgttggcaatagaaatgggagagtattacaaaggcactgttcgtgcgcagattgtacaggaattggaaaaaaagttattcgaaatttataaaaaacctgaacagaatagtaagcctgcggaattggaagcgcgtggtggcgcttactattccgatgcagcttgtgaggttatcaatgcaatttataatgataaacaaacggagcattatattaacattcctcatgttggtcatatcaacaatattcctgtggactggtccgtagaaatgacctgcctgttaggtaaaaatggcgccacaccgcatccacgcattactcattttgacgagaaagttttaggattaatttacacgataaaaagttttgaaattgctgccgccaatgcggccttgagtggacgaatggatgatgtattactggcgctcaatctcaatcctttagtcggttcagatcagggcgctgaaatattggcgcgggagatgatgcttgctaaccagccgcatttgcctcattttgccgatgcgatcagcgtacttcgccagcaagagcattactag

SEQ ID NO: 374692 - DNA, 747 bp, Salmonella enterica
atgacgaaactgttaattgttaatgccgatgattttggtttaagccctggtatcaattacggcattattgaagcgcatcgccacgggatggttacgtctacaacggccatgatgaatggcaatggtattgaacatgcggcagaaattagcgccgattttccttcgcttggcgtgggtctgcattttgttctcagttttggcgcgccattgtccagaatgccttcgctggaaagagaaggtatgctgggaaaatggctctggcaagccgccgcacaagggaaaattcaggataatgagctggtggctgaattacacaaacagtatgactgttttgtccggctctttggacgagcgcctacccatattgatagccatcaccatgcgcattttattccccaggtctggaagcatgttgtacgatttgcgggagaaaccgggcttccgttgcgtatcgatcggcaacacactatttctacgcaaggcgtaaaaggcgttgataactttatcagcgatttttatgcggaaaatatctcagcccattttattcttgcggctttggcacgcgcaacagcaggagaagaacagtccgttgagctgatgtgccaccctgggtttatcgataaaattgttctgcaaagtcgctattgttatccgcgactggatgagctgaacgtgctgacgtcagcgacgttgaaacacgatattctggcgcaaggttttcgtctgggtacttacaacgatctgtaa

SEQ ID NO: 374693 - DNA, 1335 bp, Salmonella enterica
atgacaagaactgtagattttatcggcgtaggtatcggcccgttcaacctgagcatcgcggcgctgtcccatcagatcgaaggattaagttgccgtttctttgacgagcgtcaacattttgcctggcatcccggcatgctggtgccggactgtcatatgcagaccgtgttcctgaaagatctggttagcgctgtggctcccacaagcccgtacagctttgttaactatctggtaaagcgtaaaaaattctaccgtttcctgaccaccgagctacgtaccgtgtcccgcgatgagttttccgactacctgcgctgggccgccgaaggcatgaacaatctgcatttcaatcatgccgttgagagtgttgatttcgacgaaaaacgtcagttgtttgtggttcagaccagccagggcgaaagcgttgcccgcaatatctgccttggcattggcaagcaaccgcacctgccgccttgcgtaaaagcggtgacgcaaacctgcttccacgccagtgaaatgagcctgcgccaaccagacctcggcggcaagcgggtcactatagttggtggcggacaaagcggcgccgacctgttcctcaatgcgctacgtggagaatggggcgacgccgcagagatcagttgggtctcgcgccgcaataactttaacgcgctggatgaggcggcgttcgccaacgaatacttcacacctgaatacgtttcaggcttcgtcggcctgaatgaaagcgcacgccagaaaatgctcgatgagcagaaaatgacctccgacggcatcacggccgactcactactgaccatctatcgtgagttgtatcaccgattcgaggtgctgggacagccgcgtaacacccgtctgctgccaagccgttcggttaccgtgctggaaagccgcggccagatctggcaactactgctggagcatcatctggataatggctatgacactctggaaagcgacgtggtgattttcgccaccggctaccgtccagcactgccgcaaatactttcaccgctgatgtcgcgaatcgccatgcgcgatgagtgcaattttaaagtacgcgatgacttcaccctggagtggaacggcccgaaagataacaacatcttcgcggtcaacgccagtatgcaaactcatggcatcgccgaaccacagctcagcctgatggcctggcgctccgcccgtattcttaatcgcgcgctggggcgtgatttattcgatctcagtacgccgcctgcgctgattcagtggcgcagcggcagtcgggaaaaaccgcagccggaggctgcttctttaactcgctacacagcatctttgggctga

SEQ ID NO: 374694 - DNA, 948 bp, Salmonella enterica
atgtctaaggcaaatatcgttcacagcggatatggactgcactgtgaaaaactcgacaagcctctggatcttagctggagccgggataatagcgtggtactgcactggccggggccagtaccttcggggtggctgcgcgacgcgctggatcagatatttatcgtcgcgccgcaaatttcagcggtggttctcccctatgccgaatggcacgaagattcacaggcgctgacgcttttcgggcaggtaaaaagcgacatcatccaccgagccgccttctggcagttaccgctatggctaagttctccggcaaacctggcctccggcgaaatggtttttgatgcagagcgtgagatctattttccacagcgcgcgccacgtccgcagggcgaggtatatcgccgctacgatccacgcgttcgcaagacgctgagtttacgcgttgccgatcccgttcttgatgcagaacgtttcacccgctggatgaacgatccgcgcgttgagtatttctgggagcaaagcggttcgctggaggtacagaccgcctatctggagcgccagctcagcgataaacatgcgttcccactcatcggctgcttcgacgatcggccgtttagctatttcgaaatctactgggcggcggaggaccgcattggtcgccactattcgtggcacccctttgaccgtggcctgcatttgctggtgggtgaacagcaatggcgtggagcccactacgtgcgaagctggctacgcgggctgacgcattacctgctgctggatgagccacgcacgcagcgcaccgtacttgagccgcgcgcagataaccagcgcctgttccgccaccttgagcctgcgggataccggacaattaaagagttcgacttcccacacaagcgctcgcgcatggtaatggcggagcgtcataacttcttcatggaggtcggcctgtaa

SEQ ID NO: 374695 - DNA, 1212 bp, Salmonella enterica
gtgacgtctcttgagatagcggaaacgccgcaaaaacccttatcctgctggccgcttgcgttcagtgcggggctactcggtgtcgggcaaaacggcctgctggtcgcgatccctgtactggtgattcagacaaacctgagcctgtcgatttgggcggctttgctgatgctcggctcaatgctgttcctgccgtcttccccgtggtggggaaagcaaattgcccgtgtgggcagtaagcctgtagtgctgtgggctctggggggatacggcgcaagctttacgctgctcggattgggaagcgtgctgatggcgaccaacaccgtaacgacggcagtgggactgggaatattaatcatcgcgcggatcgtctacgggcttaccgtgtcggcgatggtgccagcctgtcaggtctgggcgttgcagagagcgggggaagggaatcgcatgaccgctctggcgaccattagcgccggcttgagctgcggcaggctattcggaccgctgtgcgccgcggcgatgctggcaattcaccctctggcgccgatggggctgctgatagcagcgccactgctggcgctgttgatgctgctgcttttgcctggtatgccaccgcagtctgcagcggagcgcaagagcgccaccctgaggctgaattgcctgccgtatctgctttgtgctttgctactagccgcggcagtgagcatgatgcagcttggactttcacccgcccttgctcgccagttcgccacggatactgccgccattagccatcaggttgcgtggctgttgggtttggctgcggttgccgcgcttatcgcgcagttcggggtgctccgccctcagcgcctgacgccgatagcgctgctcttgagtgccggggcgctgatgatgtgtggtctggcgataatgctgaccggacagctatggttgttttacctcggctgtgcggtgctgtcgtttggggctgctctggcaacgcccgcttatcagcttttactgaacgataaactgaccgacggcgcaggtgcgggctggattgctaccagccacacgcttggctatgggctttgtgcattgctggtgccgttggtgtcgaaaactggcgccgccgctgggttgattatggcggcctttttcgtcgctgtgttatttaccgtggtatctggctttatctggcgtagccgctaccgttcacattgttccacgatttaa

SEQ ID NO: 374696 - DNA, 744 bp, Salmonella enterica
atgtccgtcaggagcatacatgcctgccgaatctgcttgagcgtcagttcgcagtaccagagccagaccgggtatggtgaggagatattacgtatatctgggcgggaaatcgctggtgctatccggcagatgctggcatggatgacctcatttggggtgttaaagagaattggtgttgaatgcacaggcacctatggctcaggactgcttcgctattgtcagaacgctggtttagcagttcttgaggtgactgcgccagatcggatggaacgacacaaacgagacaaaagtgacacgattgatgctgagtgtgctgctcatgcagcattctcgggtatcaggacagttacgccaaaaacgcgtgatggcatgattgaatctctcagggtgttaaaaacctgccgaaaaacagcgatatcagcccgcagagtcgctctccagattatccattccaatattatctctgctccggatgaattacgtgaacagcttagaaatatgacgcgcatgcagctcatcaggaccctgggattcagtcggcctgatgccagtgaataccacaacgttacaaacatttatcgtattgcattgaagtccttggcccgacgctatctcgaattacatgatgaaacctctgatctggatgtcctgattgcggcgattgtcgacgagctggcacctgaactgattaaacgtaatgggatacgaaagcgcttcgcagttgctgatcactgccggagataa

SEQ ID NO: 374697 - DNA, 282 bp, Salmonella enterica
atgaacaaaaaaaccaaacgtacattcacccctgagttcaggctggaatgtgcacagctgattgttgataagggctactcataccgacaagccagtgaagcgatgaatgtcggttctaccacgcttgagagctgggtacgccagatcaggcgagagcgtcaggggattacgccctctgcaacccccattactccagaccagcaacgtatccgcgagctggaaaagcaggttcgccgtctggaggaacaaaatacgatattaaaaaagctaccgcgctcttga

SEQ ID NO: 374698 - DNA, 723 bp, Salmonella enterica
atgcttacgatagcggacagtcaggaaagcgggtttggcgaaggcgtagagatgaaagggaataatttaacggacgttataccgcctaatggcagatggtatcttgtcccaagaatgggggcatcgataaggattggcgccattgcgctgggcaggctttcgcctgggtggattaatattccatctgttcatgtgggaaacttttcagtcatctcaagcaacagaggtgtcaacagtcttggcggctcttcctttatcattctggatggtttcagcttttttgtaaaaacaaaaacctgcagtctttcacaacggaattataccgttcagttagccactgtctataaaaaacagttccagtccgtcggttcagaagtgccgggaggaaacctgaatttacagttaaaatgtcaggacggcattgatgtccatgcgacattaacggatgcaacggatacgtcaaaccagagcccggtactttcactggataaaatgtcaacggtccgcggggttggtctgaaaatatataaagacgattctccggaagctttgagatttggtccggattcatcagtaaaaggaaatataaatcagtggcaattttccacataccgaggtgagatgaacccggcggtcagtcttaatattaattatatccggaccggggaaattcagacaggtacagttcaggtgatatcaacaataacattttcatatcaataa

SEQ ID NO: 374699 - DNA, 1059 bp, Salmonella enterica
atgaaaaccacttttattataaccagcataatcctgtcgtgtagcctgttaactgcctgcggtggcggagggggaaacagtagcaaaacacacagtaccacgacgaatgaaacaaccgaggtcgtcagtataaccacatcagttactcccggttcatctggtaataattctggtggtgtaactgaaacagtcagttcaacgggaaataattccgacagcaatacggatatacctgtgacgactgaagctactgaagctactgaagctactgaagctactgaagctactgaagctactgaaaccacactaccgaataaaccgataatattagcaccagtcaacgaaactcgtatttcagaggtcaaatacaacaccggtacaatgcttacccgtacagtaaatgatactgattccacaatgcttcataaaagcaatacagtacaagagcctgatgcctatgatctcagaatgacagatggtgaggttatcgtggatatcaagccattaaatactggtgatccagcagactaccgggagctggcatccaaaaaccttagtattttgagagataaaagtggtgaacccgtaggtttttacggcattgtggaaacgtatacgagtgaaaccacccggaatctgtcaggcaaagagaaatatggcagagtggattatatcgttgctatgaacggagaagaaaagaagcttccttctttagcggctgattataccggtaaagtttactacgatcaggagcaggcttcaggaaaagaagccgatatcagtcttcgttatgaagatcgccaagtgaccgggacaataatcgacaaaacacgtccacattttaacctgacaattgatacccgtaaacctcacgatgtggatgaggacggtagtttcatggccgagctggttggtactaatgaccgtgcagatcataaaatgcacgggtacattgatggcggtttttatggaaaagacggtgaaattgtcgccggctcgatccgttccagagatgatgatagctggggaggtgtattcggaggcgaaaaacaggaataa

SEQ ID NO: 374700 - DNA, 1296 bp, Salmonella enterica
atggtctcttttatatttctcctgttttccacctttacatcagcaaaagaacaaactctggagacgggaaatctaaacaacaaattaactcactatttaattagcaataattctgtggcagtaaaaaacatactacagacctgtggagaatgttcacagttcattgacccacttttgctcgaatgggctaatggcattcttgctcgtcaggaaaaaaactacgccgaatcaatacggcattacagaaaagtcatctctgtacatcctgactggtacagtgccagattacaactggccacagtattgtacctgaataaagatatactgtccgctgaagctcagttacgtaaattacgcagtgaatctttacctgaagaagcagccgtactgattgactccttcattgcaaaaatacaaaagacagacaactgggcatttcgtggcggattcacttatctgaatgaaaaaaacatcaataacgcgccagcatccggtcgttccatcggtcgatggaaatctgagaaaccacaatcaggaaaaggtgtgatgttttggggagaggcagaaaaaacattctctttgccggataatctttttggtatcacacgattagccacctcagggaaagtatacaaaaataaccactcttatgatgagcttgatggtagtatcggactgggttttggttatcgcaatattgatactacgattcttctccttccattttatgaaaaaagttattatggcggaggcaaaaaatcagaaaaaggtctgaaaccttattctgatacccgtgggttcggagtagaaaccacgctccagctttcaaaccgctggcgtttatactcagacgttaaactgggtaaaaatgaatataaaaaaaagacttaccttaacggataccgctactcacttaatgaaactctgatttatttcccagattcacgccagtatatttctgcaggtcttggatacagtatgctcagaactgaagaaaaagacagttctttcaataaggcagcattccggaccggatggatgtacgaatgggatggaggtgtatcaacgctattacaggctgcttatggtcataaaaaatacctggccggagacttctggggaataaagcaaattaatcatgaatacaatacttctgtcacggtatggcaccgcgatatttatttttttggcataacaccaaaaatcacatggagttatcagcgaactgacagtaatcatccttttcacgacacggagaggaatcgtcttttgctgagtttcagcaaatacttctga

SEQ ID NO: 374701 - DNA, 159 bp, Salmonella enterica
atgaaagcactggaatttataaagaaagtgctgcaaaaactgaataacttgtccaccataatgacaaagatgaccttttatttaaagcggagaatatctgtatccgttatttttagattacttaaggttacttcggaacaggtagaaaaaaatgtttaa

SEQ ID NO: 374702 - DNA, 2301 bp, Salmonella enterica
atgtttaatatcactaatacgcaatctactgtaaggaatcaaagtattagtcacggggcatcaaaagaggcgcctccagaagaggatatatggaataaaacgagtgttttcttctcttcagaacatcaggttgaagcaaaaaactgcatctcttatctttgtcacccacctgaaacagtctcgtcagaagagatcaaaagcaagtttgaatggttgaaggggttagcttaccctgcttatgcagataatattcagtgtggtagagaggggacaaaccagtactgtattttgaatgaaaatagtcaggaaatcctgtctataatttttaatagtgatagttataccgttgagtgtgggggagagacggtaacctatacccgtgagacagcaggcgagcaggcgagtagcgcatccggccacggttccaaagatgctgtgaattatgatgttatctggtctgagtgggtaaaaagtgcgccaacagaagaggcgccacatcgtgaaaaagccgtacaacgaatgcgtgactgtttgaaaaagaatgagacgcgtctctgtctggacagattaaagcttactactataccacacagtattcctgagcagataataactctgatacttgataaaaataacctgctcagtctgccggaaaatttacatgcaaatatcaaggaactctctgtcagagaaaataatttaaccagattaccagaaacgctaccggataccattgagataatggatctagatcgtaacaatattattgaattaccggaacatttgccctcagcgctacaaacgctgattgtttcttgtaatgctctcacggccttaccggacactctgcctgatgggcttcagacactggatgtttatagaaacaacttaacggcactgccagaacatcttccatcaagtattgtggaattgtttgtttttaataattcgttaacctttctgcctgcaacattgccgatgaacctggagattctggtggccgacgataatgcactaacctgcctgcctgagtcgttaccaccagcgttgaagagtttaagtgtaaaaaataatcggattactgttctgccagaaacactgcctcccacgttacaagagctgtatattgaccataacctattgattaacctgccggaaaatctcccggcggcattgcaatacttggaggcttcttacaaccaactggcccgtctcccggagtcgttaccctctttcctgagtgaagggcctcaacctgcaagaatactcatagagcataaccctatttcagaacgaacaatacagaatatgcagatgctgatgtcctccgagggttatcggggaccccgggtattcttcgccatgggagaattttcaaatgttcgggtaactcgaccactgcatgaagctgtccagggttggctaacctgtctcaaggaggaagacgtcaaccaatggagggcgtttgagacggaagtaaacgcggcggccttcagcatatttctggatcgtcttagcgatacgcagaacaccagacatccggattttaaggagcaagtatccgcctggcttatgagattggctgaagatagtacgctgagggaacgggcatttactatagcgatggatgcaacaataagctgtgaagatcgggtcacactggcatatcaccaaatgcaggaagcgacgttggtttatgatgctgaacgaggtgcctttgatagcaaattcacggaactgattatggcggggcgtgaaatttttcggctggagaaaatagaatcgcttgcgagagaaaaggtaaaacggctgttttttattgacgaaatagaagttttcctggggtttcagaaccagttacgagagtcactttcgctgacaacaatgacccaggatatgcgattctataacgtttctggtatcactgagtctgacctggacgaggcggaagtacggataaaagttgctgagaatagtcaatttaatcagtggctttcgtgctgggagccatggcataaagtgctggagcgtatagcgccggacgattggcaggaaatgatgaataaaagggttgagtatattgaatcgaatgagtaccagagtcgggtcaacgctaaactgagtgctttaaaaatagcaggcgactctgacccagagcgtgctattgagatacgggcagacgcagagcgtgctattgggcgacaggtaatggaagaaattaatcagtcactctttactgagctcacggagaaagtgttgacgaaacaaagaataaactcgcttatgactccatactggtag

SEQ ID NO: 374703 - DNA, 2364 bp, Salmonella enterica
atgaaaacactgaagaactggatattacaaaaacagttaccccaccacgttgaactgctggtcgacggccagcatacgctgtgtctttacgtgctggaggaaaatctgtttcgtgtgctgataaaacgtaaaggcgaactggcgctggaccgcacctggagtatcgctcctgcgcaggatgtaccgtgggaaggccgcaagcgagaagacctcagcggctttaccctgcccgtctggacactacgccagcaggacggcacgctgattgtcgctaccgaatcgctgcgcgctaccgtccaccagccgctgtggattgagtggcagtaccgcaataacgaaggcaagtggcagccactggttaacgaccgcacgaccagcgcctatctgctgaacgcccacggcgacggcgtggcccactatcaacaccgccgtaaggacgagcgtttttatggtttgggcgataaagcgggcgacctgcagcgtaccggaaaacgctatgagatgcgcaatcttgacgcgatgggttacaacgcagtcagcaccgatccgctgtataaacatattccgtttaccattacccgccgcgatgacgttagcttcgggctattttatgacaacctcagtagctgctggctggatctgggcaacgaaattgataactaccacgccgcctaccgtcgctggcaggcggaagcgggcgatatcgactactacctgtttaccggcgagcgtgtgcttgacgtcaccaaagcctttgttcgcctgaccgggaaaacgctgttcgggccgaagtggagcctgggctacagcggttcgactatgcattacaccgatgcgccggatgcgcaaaaccagttgatgaattttattcgcctgtgcgacgaacacgccattccgtgtgatgccttccaactctcttcaggttatacctcgattaacggcaagcgctacgtgttcaactggaactacgacaaggtgccgcaaccgaaggtgatgagtcaggcattccacgacgcggggctacatctggcggctaacatcaaaccgtgcctgttgcaggatcacccgcgctatcacgaagtggcggaacaagggttatttatccgcgactccgaaaacgatacgccggaacgctccagtttctgggatgatgaaggttccaatctcgactttactaacccgcaaactgtcgcctggtggcagaacggagtgaccacgcaattgctggagatgggtatcgatgccacctggaacgataacaacgagtttgaagtgtgggacggcgaagcgcgttgccacggctttggcaatgagatagccattaaacatattcgcccggtgatgccgctgttgatgatccgcgcgtcgatggaagcgcagcaacgctttgcgccgacaaaacgcccgtatctgatctcccgttcaggctgcgccgggatgcagcgctacgtacagacatggagcggcgataaccgtaccagttgggataccctgcgctacaacattcgcatgggtttggggatgagcctctccgggctgtataacctgggccacgatgtcggcggtttctccggcgataaaccggacccagagctgtttgtgcgctgggtacagaacggcgtgatgcacccgcgctttaccatccattcgtggaacgatgaccatacggtcaacgaaccgtggatgtatccgggcgtcacgccagccattcgtagcgccattgagctacgctaccgtctgttgccctacttctacaccctgttatggctggcgcataccgacgacgagccgatgctgcgccctactttcctcgaccacgagcacgacgcgcagacttttgaggagtgcgacgacttcctgctgggacgcgatattctggtcgcaagtgtcgtcgtaccgggtgaacgtcagcgccgcctctggctgccggacaaccaaaccggctggtatgatttctataccggcgcgtggttcagcggcggtcagtggattatcgtcgacgcgccgctggaaaaactgccgctgctggtacgcgcgggggcgggactgccgctgagcgatcgtatctcctacgtgaacgcggctaaagatacctcgcgtgagctaaaactgttcccggtgaaaggcgcaggcgtatcgtcagggttgctgtttgaggatgacggtgagtcatgggggtatcagaaaggtcacgcgctgtggctggaatgggagatggtctgtaccgccacgacgattgatctgacgataaacgcgcgcggcgattatcgcccagcgtggcaaacattgcaggtatcattaccgcctggagaaaaacgcaagctgcgggtaaataatgaagacaggagtgagtgggcacggtag

SEQ ID NO: 374704 - DNA, 1302 bp, Salmonella enterica
atgagcttgggcatcaataatgatatggccgccaacaagccccgccgcgtagtaaaaaatctgcgctggtggatgctgatcctctttttgcttggcgtcaccgttaattacatcactcgcaattcgctgggcattctggcgccggagctgaaaagcagtctggggatcaccaccgagcagtattcgtggattgtcggcgcgttccagctagcctataccttgttccagccgctatgcggttggctaattgacgtgattggcctcaaactgggctttatgatctgcgccggattgtgggcgctggcctgcttacttcatgccggcgctggtagctggttacagcttgctattctgcgtttttttatgggcggcgcggaggcggctgcgaccccggccaatgctaaaaccattggcgaatggttcccgaaatccgaacgccctatcgcgtcgggttgggcgggcgttggcttctcgatcggcgcaatgttggcgccgcccatcatttacgttgcccatgcatcttttggctggcagggcgcgtttatgtttaccggcgtactggcgatgctgtgggccctactgtggtggatattctataacacgccggataaccacccgaacctgagccagagtgaactggactacattcaccaggataaggaagccccggcgataaaattaccgttcctcactgcgctgaaaacggtcgccagaaataaacgtttctatgggatcgccatcccggcttttatggcggagcctgcctgggcagtgctgagcttctgggtgccgctgtatctgtcaaaagagctgggtatggatctcaagcaaatcgccatgttcgcctggctgccattcctcgccgccgatctcggtagcgttgccagtggttatctgaccaggctctatacccgtattttcggttgtacccgtatcaattcagtcatcgcgagctccgttaccggcgcatttctgatgatttcactggcgatagtcgccttcaccaaaagcccttatatcaccatcatcctgatctccatcggcggcttcggccatcagatcatctcctgcatgttaagcgcgctggtcgtggagtcgttcgataagggacaaatggcaactgttaacggtatgcgcggttctgccgcatggatcgcgagcttcctgttttccctgattatcggggtgacggccgacaaaatcggcttcaacccactgtttatcgccatgggcttcttcgatctgattggcgccttcttcctggttacttttattgctgaacgtcgcgcacaacgcgcctga

SEQ ID NO: 374705 - DNA, 1074 bp, Salmonella enterica
atggaaaagaagctgaaaatcgcagaaattgccgcgcgcaccgggctgtcttccagtacggtgtcgcgcgtgctggctgggaaatcaaataccagcgtccacgcgcgtaaagaggttctgacctgcgcccgcgagttgggagtcatggaaggtatggccgcaggccgcctgttgcttaacaatttgcttgttttcgcgccgctgcgggcgtttgatgagcgactggacattttttactaccgcgtaatccagagcatcagtaaagcgctcgcgccgcatgaagtacgcctgcgctactgcgcgctggaagagaacgacagtgacccggcgctgtttctggccagaatgaatgacgcggagacccaggcggcgatcctgattggcattgacgatccgcacattcacgatctggcggcggatctcgctaaaccgtgcgtactgatcaattgtcgcgatgatcggatgcggctgcctttaattgcgccagaccatcgtctgattggcgcttttgccgcccgctatctctttgagatgggacatcgggaggtgatgaacgttatgtgcctgcgccgctacacgatggaacagcgtctggcgggtattaaagagtcatggcggcagcacaacctggattttctggacgagcgagatttactgagtatcagcaacttcagcgctaaagaaacggaagacaagattggcgcctggctggatgtagccgatgggaggcggttaccgaccgccttgctggtcggcggtgattttatggcggcaggcgctattaatgcgttacgtcttcgcggcctgcgcgtgccgcaggatgtttcaattatgagtattgacgcgtttaatctggcggcgatagaagatgttccacttacggcggtgcacgtgccacgcgacgagttgggcgtggaggcggtgcagatgctgcaacagcgcctaattcgcccccatgcgcccatcggctcgctattgttgcatgggcgtctggcggtacgggagtcggtacgacgggtgcgcccggggaaagggcacaccgtcgtcacagatgaggggctgtatgatagttaa

SEQ ID NO: 374706 - DNA, 1326 bp, Salmonella enterica
atgagtaatgtaacccaccagccaaagatcggcttcgtttccttgggctgtccgaaaaacctcgttgattcggaacgaatcctgactgaactgcgcaccgaaggttatgatgttgtgccacgctatgacgatgcggatatggttatcgtcaatacttgtggctttattgacagcgcggtacaagagtcactggaagcgattggcgaagcgctgaacgaaaacggtaaggtcatcgtcaccggttgcctgggcgcaaaagaagatcagatccgcgaagtgcatccgaaagttctggaaatcaccggcccgcatagctatgaacaagttctgcagcacgtacatcattacgtaccgaaaccgaagcataatccatttttaagcctcgtaccggaacagggtgtaaaactgacgccgcgccattatgcatatctgaaaatttccgaaggctgtaatcaccgctgcacgttctgcatcattccgtcgatgcgcggggatctggtcagccgtccgattggcgacgtattaagcgaagcgaaacgtctggttgacgccggggtcaaagagattctggtgatttcgcaagatacctccgcctacggcgtagatgtgaagcaccgcaccggattccacaacggcgaaccggtgaaaaccagtatggcgagcctgtgcgaacagttgtcaaaactgggcgtctggacgcgtctgcactacgtctatccctatccgcacgtcgatgatgtgattccgctgatggcggaaggcaaaatcctgccctacctggatatcccgctacaacatgccagcccgaggatccttaagctgatgaaacgtccaggctccgttgaccgccagctagcgcgcattaaacagtggcgcgacatctgccctgaactgaccctacgctccacctttattgtcggttttcccggcgaaacggaagaagacttccagatgctgctcgacttcctgaaagaggcgcgcctcgatcgcgtaggctgcttcaagtacagcccggtggaaggcgcaggcgcgaacgaactgccggatcaggtgccggaagaggtgaaagaagaacgctggaatcgttttatgcagctacaacagcagatctccgctgagcgtttacaggaaaaagtgggccgcgaaattctggtgatcgtcgatgaggttgacgaagagggcgccattggacgcagcatggcggatgcgccggaaattgacggcgcggtctatctgaacggcgaaaccaacgtcaagccgggcgacatagtgcgcgtgaaagtggaaaatgccgacgaatatgatttgtggggcagtcgggtttaa

SEQ ID NO: 374707 - DNA, 1203 bp, Salmonella enterica
atgatgcaatacgcttcttcctttcgtagcctcactgcaggcttggttctcttattccttttcgcttcgtctgtaaaggcggaggagcaaacgatcgcgccgccggacgttgacgcgcgagcctggatcttaatggattacgccagtggtaaagtgctggcggagggcaatgccgatgagaaactcgaccctgccagtttgacaaaaattatgaccagctacgtggtggggcaggcgctgaaggcagggaaaatcaagctgaccgatatggtgacggtaggcaaagatgcctgggcgacgggaaatccggcgctacggggttcatcggtgatgtttctgaagccaggcgatcaggtatcggttgcggatcttaataaaggcatcatcattcagtcaggtaacgatgcctgtattgcgcttgccgactatgtcgccggaagccaggagtcttttatcggcctgatgaacgcctacgcgaaacgactgggattaacgaatacaactttccagacggtgcatggtcttgatgcgccagggcagttcagtaccgctcgcgatatggcgctgctcggcaaggccttgatccacgacgtgcctgacgaatacgcccttcataaagagaaagaatttacctttaataatattcgtcagccaaaccgtaaccgtctgttgtggagcacgaatctgcatgtcgacggtatgaaaacgggaacgacgtcaggggcagggtataaccttgtcgcatccgctacccagggtgatatgcgcctgatctctgtcgtgctgggggcgaaaacggatcgtattcgttttaatgagtcagaaaaactgctgacctggggcttccgcttcttcgaaacggtcacgccgattaaacctgacgcgacatttgtgacgcaacgggtctggtttggcgaccagcgagaggtcaatttaggggcgggcgacgcggggtctgtgacaattccgcgtgggcagcttaaaaacctgaaggccagctttacgctgaatgaaccacagctcacggcgccgttgaagaaagggcaggttgtcggcaccatcgatttccagctcaacggaaaatccattgagcagcgtccgttaatggtaatggaaaacgtcgacgagggcgggtttttcagtcggatgtgggattttgtgctgatgaaattccatcagtggtttggcggctggttctcgtaa

SEQ ID NO: 374708 - DNA, 1134 bp, Salmonella enterica
gtgaatgatgtcccccaccgcccgcaggtgaaaccccgtaaagcgctgacgccgcttctggaaattcgcaacctgacgaagtcattcgacgggcaacatgctgtcgatgatgtcagtctgactatctataaaggtgagatttttgccctgctgggcgcgtcagggtgtggaaaatcgaccctgctgcggatgctcgctggttttgagccgccgaacagcgggcagattatgctcgacggcgtcgatctggcgcatgttccgccatatcagcgcccaattaatatgatgtttcagtcctacgcgttgtttccgcatatgacggtagaacagaacatcgcttttggtctgaagcaggacaaactgccgaaagcagagattgccagccgggtaaatgagatgctgggattggtgcatatgcaggagttcgccaaacgtaagccgcatcagctttccggcggtcagcgccagcgtgtagctctggcgcgcagcctggctaaacgccctaagctactcttgttggatgaaccgatgggcgcgctggataaaaaattacgcgaccggatgcaacttgaagtggctgatatccttgagcgcgtcggcgtgacctgcgtcatggtgacgcacgatcaggaggaagcgatgacgatggcgggacgcattgccatcatgaaccgtggaaaattcgtgcaaattggtgagcccgaggagatttacgagcatccgacgacccgctatagcgccgaatttatcggatcggtaaatgtttttgggggcttactgaaagcgcgtgaagaggatggtctggtcattgacgcgcccggtctggtacatccgttaaaagtcgatgcggatgcctctgtcgttgataatgtgccggtatatgtggcgctacgcccggaaaaaatcatgctgtgcgaggcgccgcctgccgatggctataatttcgccgtcggcgaagtggcgcatattgcctatcttggcgatctgtctatttatcatgtgaggctgaaaagtggtcagatgatcagcgctcaactgcagaatgcgcaccgttaccggaaaggattaccgacctggggcgatgaagtgcgtttgtgctgggaagcggatagctgcgtggtcctgacggtataa

SEQ ID NO: 374709 - DNA, 252 bp, Salmonella enterica
atgaaaaaaagaaatttcagcgcggaattcaaacgtgaatccgctcagctggttgttgaccagaactacactgtggcagatgcagccagcgctatggatgccggcctttccacaatgacgcgatgggtgaagcagttgcgtgatgcgcggcagggaaaaacgcctgaagcctctcccattactccggaacaaattgaaatacgtgagctgagaaaaaactacaacgtattgaaatggataacgaaatactaa

SEQ ID NO: 374710 - DNA, 162 bp, Salmonella enterica
atggagaatatagatataagcggagaggggagaataacggagctaaagacgtaccgtctaaaaaaggcgtccgaagacgcctctgtttaccggttaatcatgatggcgattaaatcggcgttttacaacaacaaagaatactggcacgaagaagatagctaa

SEQ ID NO: 374711 - DNA, 438 bp, Salmonella enterica
atgccggttagtgagtacaaccacatccttgtggcggttttatttgctgttgctatttttccatcctataccgcattcaatatggccggacgctttgccggaagcgccagaatgagcgcctggatatggctaataggcggcggcttcgcactgggcgtctgtattttggctatgcattttgtcgggatgctggtgatggatcacgcgattaacatacgcttcgatcctttcctcactggtttctccatgccgatcgcactcgactcccccctttttgcgttatggctgatcagcgctgaaaaattgcgccttcgccgtttactgccgggcgtgctggtgatgaggccgggcatcagcgcaatgcattataccgggatggcggcgctgcaattcgcctctcttatcgtctggaataacgcgtggatcgcgctttcgtga

SEQ ID NO: 374712 - DNA, 126 bp, Salmonella enterica
atgccgttcataaagattaaaacgtgtttgctcgccccctacagtctggcaatggtgaaaaattacgcgcaacgggaaaatgatcttgtcctgaaacgagacggcgatcccattcatttggggtaa

SEQ ID NO: 374713 - DNA, 645 bp, Salmonella enterica
atgaaattacctctttgtaccgcgacattactcacactctttttgccccccctttccgcgtttgccgccattcaggaagaggcgcatcagctttgccagactgatataaatcaaccgcctggcgatatccgctcgacgtctgaagttcacgtctccccgctggaagtgcagtatattgatagtccctctgaattagttaataacggtcaaccccttcaggcaagcatgaaaagctttgccgccaatactatccgtctggatgaccagcgatatacgctggaagagttccattttcatgttccggctgaaaacacgattgatggcaaacgctacgccatggagttacacctgatgcatcggaattcgaacggcgaccttgccgttgtcgcggtgatatttacagaaggcacggcaaataaaacgctggagcgcctgtggcaatctatccccacattgttagaaaagcgtgcaacgttatttgcgccagtggatattaatcagttactaccggcggacaaaacgtactggcgcttcaacggatcgcagccatcgccattctgtttagaaaatgccgcctgggttgttctgcagcatccgctaacactctcttcagcgcagttggaaaaattcgcatgccgttcataa

SEQ ID NO: 374714 - DNA, 1935 bp, Salmonella enterica
gtgaataatgctaaaaaaaatatagcaaagatattgctactactttctctttcccctggtatttccgctctcgctaatactcaaaagaataataacccaacagatgaacagtggtggataccttataaaaatagccaggcttttaatgagacacttgatcaatttggtctgacataccatcaactggaagcatcgccagaaaaagcgctttcacgatctgctgatgtcaacgatgttcttttctggcaaaaacgaacgatggccatttatgcaaatgctaaagagggtatatatcatattcccgtcactgaacaacatgataatggaagaagcagaaccaccacaaacgggcgtactcctgccttctttacctattattatgcgaatgtaaacgacaccatgacattgcgcaccgaaaaccagcctgacgatgtaaaatgttattctctgcttgagaataattattcagaaccgcaggcggttgacgcagtaatgttaaatcacaatagtgaaacaaaaattacgtttaaccataaaggtgttgtccttctccagtgctggggaaccagtgaagatgcttcactcaagcacgttaatactctgattagtactcgcgttatatccacgactgccagtacacagcccgtatttgtgttgggtgtaaatacattggatgactggaaaaatattagccagcagtccactcccagcggccagacattattatttgatggtcgaacccgttattacgcagcgaataacgttggaaaagcctctaaggatcacaacatagagcagacgctgcgtgaacatcttttgaataccattgtctacgataagctcaacggcattgatggttcatcgccaatcaatgaggcgctgcgtagccttgatattgcctcgtataacagttgctgctgggctgagggcggagatggcagaatcggtattggttttggcagtagcatcccgacgcaatccagttggggcgaatggcatgaattcggccaccaaaatcagatgcaatggtcctggaatggcttaggtgagacgacagtgaatatctattccatcgctgcctgccgcgcgacacgtggcgaagtggatgtcaaaacatgccatgaaaatctgcaatacaatggatttcaatgggaccagcaggccgtcggtaatttcctaaaatcaggccaaacctgggatttagatacagacactaacgttttccatcagctcatgatgtttgcacaactggaaaccagttggccggatctctatcccgcgcttggcaaagcctaccgtgaaattaataattattataacggcagcgctaaagtggattccaaacaagagaaagtcgatttctttgtggttaacgccagtaaatattccggtcatgatctgcgcaaattctttacgcactggggggtggattactccaccgatgctgacaatcaaattacagctatgaatctacctcaggttatcgaaccttcagggacagtaagtgcaacgctggaaaaaagagctgaccaaacacaagtagaagcctatgccaccattaaaaatgcagatacacactataacacgggatttgtcactaatacttcgactattggcccaacatctctggtgtggaatggcggcctttatcaaagcacgcctctgtacgtccaggttgtcgataccaaaaaccgtaacttcattgtcaaactttatgggcagagaacggcaggttattgcgaaccttacacattaaacacggcgggagcttgtaattcagggtctgataccacggtaacgattcgctacgactccagtaataatcaggatctgcctgccggtgaatatcacggcgtattgcacctcattgcccgcgactggcataacgataactggtcggagaatgtaaacttcaatatccatattaataattga

SEQ ID NO: 374715 - DNA, 429 bp, Salmonella enterica; identical to SEQ ID NO: 369093

SEQ ID NO: 374716 - DNA, 543 bp, Salmonella enterica
atgctgcagcaggacgcgcccgccgtccctgagggcttacccgagcattctcttcgcgatccttttattctggaatttctcgatctaaaggatgagtattcggaatctgaccttgaagaagcactgctcaaccacctgatggactttatgctggaactgggcgacgatttcgccttcgtggggcgtcagcgccgcttacggattgacgatagctggttccgcgttgatcttctatttttccaccgcaaattgcgctgcctgttggtggttgacctgaaagtgggcaaattcagctatagcgatgccgggcaaatgaatatgtacctgaactatgctaaagaacactggacgatgccgggagaaaacccacccgtaggattgattctgtgcgcagaaaaaggcgctggcgaagcttactatgccctgaacggcttgccaaataccgtgatggcgagtgaatacaaagtgcagctacctgatgaaaagctgctggctgatgaacttgtgcgctcacaaaacctgttggatacgcgcaaatcatga

SEQ ID NO: 374717 - DNA, 873 bp, Salmonella enterica
atgagcattatttctacgaaatatctcctgcaggatgcgcaggaaaaaggttatgccgtgcctgctttcaatattcataacgccgagacgatccaggctatccttgaagtgtgtagagaaatgaaatcacccgtgatcctcgctgggacgccgggtacttttaagcatattgcgctggaagagatctatgcgctatgcagcgcgtactctaccagtttcgatataccactggcgctgcatctcgatcaccacgaatcgttggatgacattcgccataaggtgaatgctggcgtgcgtagcgccatgatcgatggtagccacttcccatttgaagagaacgtaaagctggtgaaatcggtcgtagacttttgccactcacgtgattgcagcgtggaggcagagctagggcgactgggcggtgtcgaagatgacatgagcgttgatgcggaaaatgcttttctgaccgatccgcaggaagccaaacgctttgtcgaactgacgggtgtagacagccttgctgttgctataggtactgcacacggtctctacactaaaaaacccaaaatcgatttccagcgtctggcagaaattcgtgaagtggtagatataccgctggtactgcacggcgcaagcgatgtacctgatgaatatgtacgccgcactattgaattaggtgtatgtaaagtgaatgtagcgaccgaattaaaaatcgctttcgcggctgcggtcaaaaaatggttcattgaaaacccggacggcaacgacccacggtattacatgcgtgttggtatgaatgccatgaaagaagtagtaagaagtaaaataacagtttgtaattcatatggaaaattattacccgctttacagtactaa

SEQ ID NO: 374718 - DNA, 1155 bp, Salmonella enterica
atgtcagaaacctatacctccgcagccgcgacaacagaaacctggacagaaaaagagatccgtcagcagccagccagttggctccgctcgctgaatcatatcgacaatattcgctccgcgattgacagttttctcacaccattgctgcataaaaacaacctcaggatcatcctgaccggggcgggtacttcagcatttattggcgacattatcgctccctggcttgccagccagaccggaaaaaatatctgtgccataccgactaccgatctggtcaccaatccgacggactatctgaacccgtcgcatccattactgttgatctccttcgctcgttccggtaacagcccggagagtgtcgccgccgttgaactggcaaatcatttcgttccagagtgttaccacctttcgatcacctgtaacgaggctggtagcttgtatcaaaatgccgttgaaaacgacaatacttttgctttgttaatgccagcagaaacacacgatcgcggcttcgcgatgaccagtagtatcaccaccatgatggccagttgcctggcagtcttcgttccggaaactattaatagtcggacattccgtgacgtggccgatcgttgccaggcgattctgaactcactcggtgatttcaaccacggcgtgtttggtaatgagccctggcagcgaatcgtttatctcggcagcggtggactgcagggtgccgcacgtgagtcatcgctgaaagtgctggagctgacagcgggtaaactggcagcattctatgactcgccaacaggtttccgccacggcccaaaatcactggtcgatagcgaaacattgatcgtggtgtatatctccagccacccttatacacgccagtatgatctcgatctgctggctgaactgcgtcgcgatcggcaggccatgcgcgtcatagccattgccgctgaaagtgatgccgttatcgaagctggcccgcacatcctcctgccgccagcacgacacttcatcgatatagagctggctttttgcttcctgatgtacgctcaggtattcgcgctcacacaatcaatcagtgttggtaatactccagatactccttccgccagcggcaccgtcaaccgtgtggtacagggcgtcgttattcatccctggcaggattaa

SEQ ID NO: 374719 - DNA, 1134 bp, Salmonella enterica
atgaggcaaattttgcgcgccaggcgactgctgacagagcaaggctggctggacgatcaccagttacgtattgaagagggcattattactgcggtagagcccattccggcaggcatagcattgcgtgatgccgagttgttgtgtcctgcttatattgatacccatgttcacggcggcgcgggagtcgacgtgatggatgaatcgccggacgcactcgataaactggcaattcataaagcacgtgaaggggtagccagttggctacccactactgtcacagcgccgctaacggcaattcaccgcactctggagcgtatagcgctacgctgccattcgggcggcccaggcgcgcaggtgttagggagctatctggaaggtccctacttcacgccgcagaataaaggagcgcatcccccggaactgttccgggaactgaatctcgtcgaattaaatgaactgatagcagtctcccagcataccttacgcgtggtcgcgctggcaccagaaaaaaccggagcattagagacaattacccatctgaagcagcaggggatacgggtgatgctaggacacagtgcagctacctggcagcaaacccacgcagcttttgacgcaggtgcggacgggctggtgcactgctataacggtatgaccggtctgcatcaccgggagccaggaatggtcggcgcagggttaacggacccacgagcttggttggagcttatcgctgatggccaccacgtccatccgacggcaatgaagctatgttgctgttgcgccaaagatcgggtggtgctgatcaccgatgccatgcaggctgcaggtcagcccgatgggcgctatacgctctgcggtgaagaggtagagatgcacgccggtatcgtgcggaccacttccggcggtttggcgggcagcacactgtcaattgatgctgcggttcgcaatatggtcgagtttacgggaatcgctacagtggaagcgatccatatggcttcgctacatccggcccgcctgctggggatcgatcatcatttgggatcgttaaaaacaggcaaacgcgccaatatcatcgcgctagataacagactgtatttacaacagatctggattcagggccaagcatttcccctataa

SEQ ID NO: 374720 - DNA, 1296 bp, Salmonella enterica
gtgaaacatctgactaacatggtggagcagcataaacgcgggaaggcaaacgggatttatgccgtttgttccgcgcatccactggtactggaatccgcgatacgctacgcccacgccaatcacactccgttgttgatcgaagcaacttctaaccaggttgatcagtttggcggctacacaggcatgacccctgcagattttcgcgattttgtctgccagctcgccgattcgctgggatttccgcaatcagaattaatcctgggcggagatcatctcggtcctaatcgttggcaaaacctgcccgcgacacaggcaatggccaatgccgatgacctgatcaaaagctatgtggcagccggatttaaaaagatccacctggattgcagtatgtcctgcgccgatgatcccgtgccactaaccgatgaaatcgtagcggagcgggcggctcgcttggcgaaagtggcagaagaaacctgccagcagcatttcggcaagtccgatctggtctatgtcatcggaacggaagttccggttcccggcggagctcatgaaacattaacagagctagaagtgaccacgccggaggcagcacgcgccacgctggaagcccaccgttatgcattcgaaaagcaggggctggatgctatctggccgcgcatcaacgcactggttgtgcaacccggcgtcgagttcgaccacacgcacatcatcgattatcaaccgcaaaaagccaccgaactgagcaagatggtggagacgtatgacatgctggtattcgaagcgcactccacagattaccagacgccgcagtcgctgcgccagctagtgaaagaccacttcgccattctgaaagtcggcccggctttgaccttcgccctacgcgaagcgctgttctcgctggcggccattgaagaagagttgcttccggccaaagcctgctccggactacgtcatgtacttgaaagcgtgatgctcgatcgcccggaatactggcagaaccactatcatggagatggcaatgcacgccgtctggcgcgtggctacagctactctgaccgcgttcgctactactggccggacagccagattgatgacgccttcgagcggctggtgcgcaacctcgcagacgaacctattccactgccgctcatcagccaatatttaccgttgcagtacgtaaaagtccgcgagggagatctcaacgccacgccgagagaactcatcatcagccatattcaggacatcctgcagcagtaccacgccgcctgttatggcacgacgttctataacgaataa

SEQ ID NO: 374721 - DNA, 810 bp, Salmonella enterica
atgggccatactgactcttctgcagataaacgcgtaacgggtaccagtgaaaggcgtgagctgattatccagcggttgcgacagcagggaagcgtacaagtaagcgatctttccgtactttttggcgtatctacagtgacaattcgtaacgatctggctttccttgaaaagcagggtatcgcagtaagagcctacggcggcgcgctaatctgcgacagtaatacttcatgtatggagccttctgtagaagataaaagttctcttaatacggcattaaaacgcagtattgccagagctgcggttgaactgattaagccgggtcatcgtgtgattcttgactcaggtaccacgacttatgaaattgctcgtctgatgcgcaagcatactgatgtgattgcaatgaccaatggtatgaacgttgctaatgcattactggaagccgagggagtcgaattattaatgactggtggacatctccgccgtcagtctctgtctttttatggcgaccaggcggaacactccttacagaattaccatttcgatatgttgttccttggtgttgatgctattgatttagagcgtggtattagtacacataatgaagatgaagccaggcttaatcgtcggatgtgtgaggtggcggagaagatcattgttgttactgactccagcaaattcgatcgttccagtctgcataagatcgttgatacgcaacggatcgatatgattattgttgatgagggtattcccgtagaaagtctggaagggctacgtaagagcggaattgatgtgatcctggtgaaaatataa

SEQ ID NO: 374722 - DNA, 165 bp, Salmonella enterica
atgattatccgcaccatactgtttatactgaatagcgaatacagtgtgtctgacgggttattagaaaacaccataataataaaagacgataaaaatatcagggtggtatattgtgatacagaatgtattaccgatatgaaaatagagtgcggagaacccttctga

SEQ ID NO: 374723 - DNA, 1938 bp, Salmonella enterica
atgaacaagcattactatacccaaacgcctaatttcacgagccatggaacggcagatgttgatacccgtacacgcgcatttggttttaactttacccttgctacgttaaatggtaatcaaggcatggggccggagctggaaatagccctaaattataataactcagacataagcaacgcttgggcaatcgggaacggttttagctatggctttacagtctatgataaacctaatggtagtcttgtactaagtagcggagaaagttataaagtcagggataatggctctcagccgatcttgctccagcaaaaaatcccctctgtcatttttaaaaaaaagaccatgtatgaatatcaagtagttgataaaaatggtaatattacttatcttaaggaccatttacaaaatggtattttttttccagtaaaaattgtttctgcgctagggcactctctcactcttcactggaaaaattcaaactcaggttttgtcctttcttcgattactgacgatagcaatactactttgtgttcgcttttttacccaactggtaatggcagtacggaaataacactctatcctgatactgcagagacatttacagttatactgtatacaacgaataattatcttacaaaaattacccataccctgctcgggcgccaattcccatgggaattgtattatcaggacgtgggaatgggggacggcgttcaaacgctcgttaaggttaaaacccctacggggttgattaaaagagcaatctataactatggtcagaagaaaggattaatccactttcctcagtctgcaaatttatctccactcccggcagtgacacagctcattgtgtccccgggtctgggacagcgagatatgattacaaattattttgctactgatagcaacaacgacgctgccagcccttttaaaaattacctgggttatgattataatttaggtagcggttggtcacctgacagtgacttcatgtatgatattttcgatcctaagtatacttaccagactatcgttactcagcctgcaactgatggtaatagcgaaatcagaactgtttatacttataataattttcatttgcagaagtcagttaagacgactgaaggtgatacgactcacctgattgaagtcaaatactatgttgatgactatccttataagccatataacgatctccctgcacaattccaatcaccaagaatacaaaccgaaacttggattaaccgggctaaagaatcctttactcaacggactgggtttgaatacgacacctttggaaatttatgtcgacaaatttcgctttgtgatgaacgtggtgaagtcactaacgaaagtactgttatttcatccagttattatccggcccaaggggaagaagatagtatagatggtcagagcggttgtcccgcagatccctggggatttacccactggctgaaaagtaaaacgactacgccacctattcttcacgattatgaagatgttccggttcgaacgcagctttatcgctaccaatcttctgaggtcctggaagatatgccggtcacctatgccattattcccgacatggagacgctaaaaagcagtgatatcatcggtgatagaattcatattctgatgcagcaaaaatcagagtattttacggataagaagtcaattcatttcggccgtaagagaaaaaatgcaattagtgtttttgatgtcaatggaaaaagttttactaaaacgaatacttttgcctggtcatatactaatactagcacaacatgctcggaaacgctgacgacatatgataatttaaaagcatcaacaacggttattcgctctgcttatacgggaaggatgcaatcctatacgaacagagcgggtaatcaggagaaattcttctatgactcactaaatagctgcgcggaatag

SEQ ID NO: 374724 - DNA, 1056 bp, Salmonella enterica
atgtcatgggaaaacgttgcaggcctttctaaaattcagatttgggctgaatcatgctcttcaagcgatggtgatgaggcatttctgtttgtaaacgataatcatcagatactcattactgttggtgtatcgttagcgctctatgaaacatctaaagcggggcctacgctggaagaagttaaaagcgcaatatcattgatagataatagtgatggggatgcactgaaatttttagttgaaggggatgcaggcgattatatttctgtttatgatcccagtcatgttaacgcacaaaaaattaacaactcaaatttccaatatcagtttaaatattacttatctagcaacaagactattaacccaaatgttagttcagaagaggtttcagcgaaacttagctataaaaatagtgatggttcctttatctatgatatgtcaagccagggtgattattcaatcaaagattatgtaaaagttaccatgtttgctgaaaaagaatatggtttaaaaggttcgggtaaaactacagtaacgctagaaaaagactctgtttctccccaccatgtattttcagattataaaggctataaactggatgatgccacgctttatctttatcatttaactatagctgacagctatttccacattgtggatttgaactacggcccccagcagggtgtctatggtagtatccagaatcttgcctatggatacgatcaaagccaggcgcctatgtggatgtatactgccagcgtcttttgtccggcatttatacacggtttaggtgaaaagacaatttccgatgtatataaatatgatataggcaatgttgatactatctgtgtgcgttatgattataatcagcgtcctcatgagattgccttacttgccgctcaagttgatataaatcgccacgatgctattactggtcactcacctttaacagggggacttactcttcacgatcagtttggcaataaaattatcattgatcttcattataaatatgtcgatgatcataagcttattccagtgttaaacggcgtaagttaa

SEQ ID NO: 374725 - DNA, 174 bp, Salmonella enterica
atgaaaaagaccggctataccaaagaaccgatagcgtttgtactgaaacaggccgaaactggccccctcgtcggggaagtctgcagacgaagcagcataatctgcgcgggaataagtgtgccagaggcaactgctatgatatctcctgcgcagaaaggtgctttcactcgctga

SEQ ID NO: 374726 - DNA, 381 bp, Salmonella enterica
atgatgacgccgaccattccggtctcgccactcgacaggctcttggttgaggggataagcccacacgaattggtacgccggaagttgatgtgtttattcaactcttgcgcttcggcaggtggcgagacgttaccaccgctgcttacccggggtatgccggaatggcacgagttaaatgtgggtgacaaacgggttctcaactggttttgccgtgaacttcgcgctgctattttgcgttatgagccgagaatcaacgtcctgcgagtcagtgtaaaagatgcttatcatcagccgctggcgttgtatctggaagcgatattacaggatgagcctgaaccgttaagactggatataacttactataatggtagatggcgctag

SEQ ID NO: 374727 - DNA, 249 bp, Salmonella enterica
atggacgcggtttttttaaagctcgacaatatcaaaggcaaaagccaggctgaaggctttaaagatcagatagaggccatgtcttatagccaaaatgtggcaacgcaggtaagtaatgatgttagtggtggggctggcggtaaaccgctggaaacgatgtcgctgaacttcacgaaaaaatcagaaggcgctcaacgggactccggctcgtcagtatgggatctggagataagccagaaagggaaatga

SEQ ID NO: 374728 - DNA, 180 bp, Salmonella enterica
atgccccctttgggacattattgggctacgcccccggtctactcttcagattacagctccctcgatctgcgggacgacgacgatgccgcttttcgtagctacattgacgatgaatatatggggcataaatggcagtgcgtagaatttgcccgccgttttctctttctgaatttttactga

SEQ ID NO: 374729 - DNA, 504 bp, Salmonella enterica
atgaacagtattttttattctgttattatattgctattacttactggcgcgatactcttcctgatgtgggaggttaataaaaaacgtcctgatggggacatagtaaatttaaatcaaactgagctcatgacaaaggaagagggtgaagatcatttttcagtattaatgaattcgataacgccggtgtggtactggcgtgttaaccatgaatatatcgatttccttcatgcaacgataaagcgaatgacaatgactgagttgaatgaaacgcctggattatttgacgctcaacgccgttgcagcgaccttaactctgccgtctataagtattacgacaatattaagaagcgttgcctgaacggtgaaaaggtaccgtattcggatttggatgtccttaatttacgtcagtgtttccgtgagctgagccttgaagcctacccggcgctggtggcgctggtatggcctgaatatcagcgcccacagattaaaccggatgagatttaa

SEQ ID NO: 374730 - DNA, 411 bp, Salmonella enterica
atgcttcctgagcatctggtttcctctcattttcgcctgtcatcgccgccccctgaagccacagaaaacagtaaaaatttgactcagggaaagataaaactcagcgattataagcctgatattttaattagcgctaacgctgccgggcaacccagaaacgtattatttgaagaacgtgaccgtcatattagagaacgtctgtattgtgtggctaaaattgaaacgtttgcccgccttataaacgcactacaggcagaaggcgatattgatgcccaaacgctaagtaaaatactggcggataagaccgcaatgataaatgaaaaaggcaatgccatttggcttaatttaatcactcgcgagagcaatacgccgctattttattcactggaagataaagatgaaagaggttga

SEQ ID NO: 374731 - DNA, 405 bp, Salmonella enterica
atgaaagaggttgaagacaataacgtttatttggctttagataaccataaaagtgatgaatttatcttaaagcaaaatattgcagcgctaatcgccagtaaaaatgccacgctggaaaaggtaacgcaggaggtggtctccataccagcggcgttagtgcgcctgaagtggcaaaaccgacgggagatttatgcgttacaggtcaaagaggaaatttatggcgcgaccatcaatgctattatcgagcaacatcctgaattacgagaaaaaattatgtctcgtcttgaaagcaattggcaacatttgctagctcgcgagacggcaaccttacgcctgacgcgcaagctttccgatggcgattaccagacgcgcagcgtcgctaccgtcgcacggcaagaaaaatag

SEQ ID NO: 374732 - DNA, 885 bp, Salmonella enterica
atgtctcatctatacgaccctaccactcagtattacaccggtgaatatcctaagcaaaaacagccggcgcccggcgtacaggcgaaaatgacgcctgttcctgactgcggcgaaaaaagttatgtcggcagtggtcgccttaaagatcgtaaggcactggtgacagggggcgactcagggattgggcgcgctgccgccatcgcttacgcgcgtgaaggcgcggatgtcgcgatcaactatctgccagcggaagaagaagatgcgcagcaagttaaagcgctgattgaggagtgcggtcgtaaagcggtattactgccaggcgatctcagcgacgaatctttcgcccgttcgctggtatacaaggcgcgtgaagcgcttggggggctggacattctggcgctggtagccggtaaacagacggcaatcccggagataaaagatctgaccagcgagcaatttcagcaaacattcgccgttaacgtttttgccctattctggataacccaggaagcaattccgctgctgccggaaggtgccagcattatcactacatcgtctatccaggcatatcagcccagtccacacctgctggactatgcggcaaccaaagcggcaatcctcaattacagtcgcggcctggcgaagcaggtggcggaaaaaggaattcgcgtgaatattgtcgcgccaggtcctatctggacagcgttgcaaatttccggcggtcaaacgcaggataaaattccacagtttggtcagcaaacgccaatgaagcgagccggtcaaccggcagagctggcgccagtgtatgtctatctggcaagtcaggaatcaagttacgttaccgcagaagtccacggcgtgtgcggcggggaacatttaggttaa

SEQ ID NO: 374733 - DNA, 426 bp, Salmonella enterica
atggcaatgcgtcttaacgagaatctggacgacaacggtgaaatgcatgaaatcaacgtgacgccgtttatcgatgtcatgttggttctgctgattatctttatggtagctgcgccgctggcgacggtggacgtcaaagtgaatctgcccgcgtctaccagtacgccgcagccgcgcccggaaaaaccggtttatctgtcggtgaaagcggataacaccatgtttatcggtaacgatccggtgacggatgacacgatgattgccgagctaacggccctgacggaaggaaaaaaagataccacgattttcttccgcgctgataaaaccgtagattatgaaaccctgatgaaagtaatggatatgctgcatcaggcgggttatctcaagattggtcttgtcggtgaagagaccgtgaaagcgaaataa

SEQ ID NO: 374734 - DNA, 735 bp, Salmonella enterica
gtgggtaataatttgatgcagacggatctttccgtctggggtatgtatcagcacgccgatattgtcgtgaagtgcgtgatgattggtctgatcctggcgtcggtcgtcacctgggctatctttttcagtaaaagcgttgaatttttctctcagaagcgccgcttaaagcatgagcaacagcaattagttgatgcgcgttccttagatcaggctgccgacatcgcagcaggtttcagcgcaaaaagcctcagcgcgcagctcatcaatgaagcgcagaatgaactggaactctctcagggcagcgaagataacgaagggattaaagaacgtactggtttccgtctggaacgtcgcgtcgcggcggttggtcgctacatgggacgaggcaacggttatctggcgacgattggcgctatttccccgtttgtcgggttgtttggcaccgtatggggcattatgaatagcttcatcggtattgcgcaaacgcagaccaccaatctggcggtggtcgcacctggtattgcggaagcgctcctggcgacggcgattgggctggtggccgcgatcccggccgtcgtcatttacaacatcttcgcgcgtcagatagggagttacaaagcgacgctgggtgatgtggcggcgcaggtactgctgctacaaagccgcgatctcgatctgaatgcgagcgcctccgcgcagccggtacgcgccgcgcagaaattacgggtaggataa

SEQ ID NO: 374735 - DNA, 1188 bp, Salmonella enterica
atgacgaataaacagttggatacaaaactggtaaacgcaggacgcagcaaaaaatacacgcttggctcagtgaatagtgtgattcaacgcgcttcttcactggtatttgacaccatcgaggccaaaaaacatgccacccgcaatcgcgccaacggcgaattattctacggacgtcggggaacgctaacccacttttcgctccaggaagccatgtgcgagctggaaggcggtgccggatgcgcgctcttcccgtgcggcgcagcggcgatcgccaacaccatcctggcattcgttgaacagggcgaccacgtcctgatgaccaacacggcttatgaacccagccagaatttttgcagcaaaattctcggcaagctgggggtgacgacaagctggttcgatccgctcatcggcgctgatattattcaacatattcagccgaatacgaaagtcgtatttctggaatctcccggctctattaccatggaagtacatgatataccgactattgtcagcgcagtcagacgcgtcgcgccaaaagccgtcatcatgattgataatacctgggcggcaggcattctgtttaaagcgcttgagttcggtatagatatctctatccaggcgggcacgaagtatctgattggtcattctgatgcgatggtcggtacggccgtcgcaaatgcgcgctgctgggaacaattgcgggaaagcgcctatctgatggggcaaatgctcgacgccgacacggcttacatgaccagccgcggccttcgcacgcttggcgtccggctgcgccagcaccatgaaagcagcctaaaaatcgccgcatggctgacaaatcatcctcaggtcgcgcgcgttaaccatccggccctgccgggcagccagggtcatgcgatctggaaacgagactttacaggcagcagcggtctgttctccttcgtactcaataaaaagctgaccgatgcggaattatcggcctacctggataacttttcgctgttcagtatggcctactcttggggagggttcgaatcgctgattctcgccaatcagccggaacagatcgccgcaattcgcccggcaggcggcgtagattttaccggtacgctgattcgggtgcatattggtttagagaatgttgatgatttaatcgctgatttagccgccggattcgccagaattgtgtaa

SEQ ID NO: 374736 - DNA, 660 bp, Salmonella enterica
atggctgtcattcaagatattatcgctgcgctctggcaacatgattttgccgcgctggcgaatccacacgttgttagcgtcgtttactttgtcatgttcgccacgctatttttagaaaacggtctgttgccagcgtcatttttacccggcgatagcctgctattgctggcaggcgccttgatcgcccaggacgtgatgcattttttgccaacgattggcattcttaccgccgcagccagcctcggctgctggctaagttatatccagggacgctggctcggtaatacgcgcaccgtcaaaggctggctggcgcagcttcctgcaaaatatcatcagcgcgccacctgcatgtttgaccgtcacggtttgttagcgttgcttgtcggacgctttctggcatttgtacgtactctgttgccaacaatggcgggcatttccggtctttccaaccgccggtttcagttttttaactggttaagcggcctgctgtgggtgaccgttgtgaccagtttcggctacgcgctcagtatgattccgtttgttaagcgtcatgaacatcaggtaatgacatttttaatgatccttcccgtcgcgctgctggttgccgggctgttaggtacgctggtcgtgttgattaaaaagaaatactgtaatgcctga

SEQ ID NO: 374737 - DNA, 921 bp, Salmonella enterica
ttgataaaaaaatggcgcgttatgaatcgtgaagcaatttgcttacagctggcggataaaattaatcatttgaaaaataatgataaaataatcagcgagcggctggcgggcattcgtctgttatacggtgttgaaccgggaccgcgcacgccggtcatgtatcagccaggcatcatatttctcttttccggccataaaattggctatattaacgaacgcgagtttcgttacgatgctaatgaatatctcttactgaccgtgccgctcccttttgaatgcgagacctgggcgacgccggaggtaccgctggccggtattcggctcgacattgatgtgctgcaactgcaagagttgctcatggacattggcgaagatgaacgtttccagttgccgatggcggccagcgggattaactccgccacgctgtcggacgagattttatgcgcggtggaaaggttgctggatgtgatggagcgcccgctggatgcgcggatcctggggaaacagattattcgcgaaattctttatcatgtgctgatggggccgcgcggcggggcgctgcttgcgctggttagccgccagacgcacttgagcctgatcagtcgcgtacttaaacagatcgaaatgaaatacaccgagaacctgaatgttgagcaactggcggcagaagcgaacatgagcgtgtcggcgtttcaccataattttaaggcggttaccagtacctcgccgttgcagtatttaaaaagctaccggctgcataaggcaaggatgttgataattcacgacggtatgaaggccagcgccgcggcgatgcgggtcggctatgagagcgcatcgcaatttagccgggagtttaaacgttattttggcgttacgccgggcgaagatgcggcaagaatgcggataatacaagggaactaa

SEQ ID NO: 374738 - DNA, 1164 bp, Salmonella enterica
atgaacaattttaaattacatacccctacccgcattctgtttggtaaaggcgctatcgtcgatctccgcgatcagatcccgcaggacgcccgcgtgctgattacctatggcggcggtagcgtgaaaaagaccggcgtactggcgcaagttcaggaagcgttaaaaggactggatgttcgggagtttggcggtattgaaccgaacccgtcctatgaaacgctgatgaaggccgtgcagcttgtgcgcgacgaaaatattacatttctgctggccgtgggcggcggttccgtactggacggcaccaaatttatcgccgcagcggcgcagtatgcggacggcgtcgatccatggcacattctggaaactggcggtactaagattcgtagcgcgatcccgatgggatccgtgctaaccctgccggcaactggttcagaatcgaacgctggcgcagtcatttcccgtaagaccactggcgacaaacaggcttttcactcttcgttcgtccaaccggtgttcgccgtactagacccggtatatacgtatacgttgccgccgcgccaggttgcgaatggcgtcgtggatgctttcgtccataccgtcgaacagtacgtcacttacccggttcacggaaaaattcaggatcgcttcgccgaaggcattttactcacactgatcgaagaaggtcccaaagcgctgcaagagcctgaaaactatgacgtccgcgctaacgtgatgtgggccgccacccaggcgctgaatggcctgattggcgcaggcgttccgcaggactgggcgacacatatgctcggtcatgagcttaccgcgatgcacggtctcgatcatgcccagaccctggctatcattctgcctgcgctatggaacgaaaaacgcgacgttaaacgcgcaaaactcctgcaatacgctgaacgtgtatggaatatcaccgacggttccgacgaagcgcgtattgatgccgccattgccgccactcgccatttcttcgaacaaatgggcgtgcctacccgcctgtccgattacggtctggatggcagttctattccggcgctactggccaaacttgaggcacatggatgcaaaaatttaggtgaaaatcaggacattacgctggatgtcagtcgtcggatttacgaagcggcacgctaa

SEQ ID NO: 374739 - DNA, 828 bp, Salmonella enterica
atgtctaatccaaccattatcaggctacaggatggcaacgtaatgccacaacttgggctgggagtctggaaagcaagtaatgaagaggtgatcaccgcgattcataaagcgctggaggtgggctatcgatcaattgataccgccacagcgtatcagaatgaagaaggcgtcggcaaagccctaaaagaagcggacgtggcgcgggaagagctgtttatcaccaccaagttgtggaatgacgatcaaaaacgttcccgcgaagccctgcaggagagtctgaaaaaacttcagcttgattatctcgatctctatctgatgcactggccagtaccggctatcgatcactatgtggaagcctggaagggcatgatcgcgctgcaaaaagaggggctggtaaagagtatcggggtctgtaactttcagatccatcacctccagcgtctgattgatgaaaccggcgttacccccgtcataaaccagatcgaattacacccattgatgcagcagcgccagctacatgcgtggaatgcgacgcataaaatccagactgagtcctggagcccgctggcgcagggcggcgaaggcgtattcgatcagaaagtgattcgcgagctggcggataaatacggcaaaacgcccgcccagatcgttattcgctggcatctggactgcgggctggtcgtcatcccgaaatccgtcaccccttcccgtatcgcggaaaactttgctgtctgggatttccgtctcgataaagatgaattaggcgagatcgcaaaactggatcaaggaaaacgcctcggtcccgatccggagcagttcggcggttaa

SEQ ID NO: 374740 - DNA, 1212 bp, Salmonella enterica
atgagtaatattgtttatcttaaactcattggtgaacaacaaggcgatatttctgatgggggtggcacaattgcttcagtcggtaatcgttggcaacagaaccatgtgaatgaaatatttgttttttctttgggggcaggggtaacgaatacaggcaaaggtacgaacctacagggattaacattcagtaaacaaatagataaaagctcaccgctattaatgaatgctattaataacaatgagaacctgttttttgagttttggttttaccgcataaatagatatggtcaatgggagaagtattattatattcagctcagaggtgcttcaatatcaagcattcagcttcgcattatagaagacgaaatccatacagaaacaatatctgtcaattatgattatatcctcagtaaacacctgataagtaataccgagtttagttatcttgctctacctgcggagtacaataagctgtttgttcctgcgccgaaaccacagactcaaacccttaacagcgctggtgtaggccgactgctggcggccggaggaatttataatggcaacatcgagggattcagggacactgcagaaaaactgggcggtgatgccgtcaaaggttacgatcagattcttaatgagaaaacggtcagtactgccattatagcggcctcaattgccgcaggttatgggcttgggaggatgggattaagttcgacgataagaagtcttgaaaagctgaggcggattgaaaccaagggcgtatcattagggcgtagtgccaccgctgataatttatatcgtcggactagcaatactgaagtcttttcagatctaaaagtgcctatgcagatgcgctttgttgaacaggctgcacgtgaaggtgggataggcttagggggagttaaagtgaaaattatcagggattctgacctgaaaggtaagaatatctatggttatactcaccctaatggtgatattgatttgtacccagatgcttttacggatattgagcaattaataaaaacattaggccatgaaagaacgcatactatgcaaatctatctctttaagcatccaaatacatatgctgatgatgcaatcaagatgaatagagaattgatattgaatgaaaaagccgcccatagtattgaggatagcttttggcaattttacctcaataataagactggaaagctagaggagtacaaatag

SEQ ID NO: 374741 - DNA, 282 bp, Salmonella enterica
atgaactctttgacctatcttgaatggatgaagcacttaccaaaagatgatggtagttacacctcatgtgaatgcccagtatgtggtaaaaaaggactttcttatcaatactttggtttcgataatagtgatattggatggaaagttatttggtgtgaaacctgtaaatcaggagtaaaggtttcgagaaccaaaatacccgaaggggctagtaggttaatagattttcaggagcaggaatgtttctttgaaacgaagcctgcactgaaactattcgtttag

SEQ ID NO: 374742 - DNA, 132 bp, Salmonella enterica
atgttcctgataatactaattaaatcgctcattatcggcgtactggtcggcgtaggggtgggcgctggggctgctggcgaagaaaacggtggtttatacggtgctcgcgccgcaggggattgtctggggtga

SEQ ID NO: 374743 - DNA, 285 bp, Salmonella enterica
atgacctatgagctggagtttgatccacgcgcgctaaaagagtggcaaaagctgggtgaaacggtaaaagaacagcttcgcaagaaacttgtcgacgtgttgtcacatccgcaaattgaatccgtgcggctgcgtgaactgccagattgctacaaaatcaagctgaagacctcaggctatcgtttagtgtatcaggtgcaggacgacgtggtattggtggtggtgattgctatcggcaagagagagaaatcggccgtttatcgccaggcagacaaacggctttag

SEQ ID NO: 374744 - DNA, 216 bp, Salmonella enterica
atgcaatgggataacggtaaaaacgctggtttcacccaaggcgaaccgtggataaacctgtgcaataattatgcgaatgttaatgtcgcggcggcattgagcgatgaaaactcggtgctctacacctatcaaaaactgatcgcgctgcgtaaaacacagcctgtactgatctggggcgattatcaggatctcctcccggatagcccatcgctatag

SEQ ID NO: 374745 - DNA, 315 bp, Salmonella enterica
gtgaaccgtgacgtttttacgccgcgtaatctgatgacggtaggcgaaatgtcctctaccaccctggaaaactgccagcaatatgccgcgcttaacggcaacgagctatcaatgaccttcaattttcatcatctgaaggtggattaccccggcggtgaaaagtggacgctggcaaaacctgactacgcgccgccgggcgcgatccctatgacctgctggccattctggccagtaaatcccgcgacaacagccgcaagccgatgcaatgggataacggtaaaaacgctggtttcacccaaggcgaaccgtggataa

SEQ ID NO: 374746 - DNA, 669 bp, Salmonella enterica
atgactattcccctctggtggcaaaacggcgtgagttaccagatctacccgaaaagttttcaggataccaccggcagcggcaccggcgatttacgcggcgtcacccagcgccctggctatctacagcagctcggcgtggatgccatctggctcacgccattttatatttcgccgcaggtggataacggttatgacgtcgcaaactatacggctatcgacccggcctatggcacgctggatgattttgacgagctggtggcgcaggcgaaaacgcgcgatattcgtatcatcctggatagggtgtttaaccatacttcaacccagcacgcctggtttcgcgaagcgctgaacaaagagagtccataccgtcagttttacatctggcgcgatggcacgccggatgtctacccgaacaactggcataaccagagcgaacagtattatttacaccttttcgcgcctgaacaggccgatctgaactgggaaaaccccgccgtgcgcgccgagctgaaaaaggtttgcaaattctgggccgatcgcggcgtggatggcttacgtctggacgtggtgaatctgatcgccaaacatcaggattttcctgacgatccggcgggcgatggacgccgcttttataccgacgggccgcgcgcgcgtttttacgcgaagtga

SEQ ID NO: 374747 - DNA, 303 bp, Salmonella enterica
atgaagtggcatgagcagttcatttcccacttcgcggagatcttctttccgctactaccggcattgatcagcggcggtttgatcttaggctttcgtaacgtgattggcgatgtgccgatgagcaacggccaaacgctggcgcagatgtatccgacgctaaaaacgctttacgattttttatggctgatcggcgaagcgatcttcttctatctgccggtggggatctgctgggccagcaaacgccaggcgtctggaacttcggcttgtctagcattgagaaggtgggctatcaggcgcaggtaa

SEQ ID NO: 374748 - DNA, 300 bp, Salmonella enterica
atgagcgaagtaaaacaagccgatatcgaccggctgattgaacgggtcggcgggcgcgacaacatcgccacagtgagccactgtattactcgcttgcgctttgtgctccgccagccggcgaacgccaggctaaaagagatcgaacaattaccgatggttaaaggctgtttcaccaacgccgggccgtttcagatggcgatcggcactgaagtgggcgattactataaagcgcagctggacgccaccggtaaagcgcatactgataaagaacaggcgaaaaagccgctcgtcagaacatga

SEQ ID NO: 374749 - DNA, 294 bp, Salmonella enterica
atgattgttggcaatattgaacatctggaggcctggatactgacggcgctatgtcaggcgattgagcatatcaaagcgcatgtcgcagcaacgaccgcgccagataagtatgacattgacagcgacaggctgttttatatgatttctgaaaatatgacggagctgggcgaatcgcgtagcgcagagtaccacgcccgttatcttgatattttttgtgccggatggcggttggcctacacggtgctattttgtaggctggataagaggcataagcgtcgccatccggcatcataa

SEQ ID NO: 374750 - DNA, 297 bp, Salmonella enterica
gtggaaccccgggacaaagggcgtcttgagctgaacttccttatcccgaacacggaactgctgacgggcaagcgtctgcagccgtattacgaccgggccgaccggccgagtatcaatgcgtggcagaccatcgtgaacgcgaagctgggcctgcacgaccctaacgcgccggagaaccgacggacgctggtcacgctgaacaccctgcccagaacgaagcaggaggctgctgaggcgattacggacggtctggtgcgctttgtgtggccggagagtttaaaactcgttaggacgtga

SEQ ID NO: 374751 - DNA, 240 bp, Salmonella enterica
gtggtgcggaccacgaagaccagcatcagcctcgcggacccggaagggggccgcaatctcagactcaggggagcaatctatgagcagtcatttgaaaatggcgacggatttcaggcagaaatcgagcgagcaggcgaacgctaccgggcaactgctgaagcaagagttcgacaggctcgggacgtgtgtcagcaggtgcagagcttaagcgagcaggtgaggcgcttgagccgtcagtga

SEQ ID NO: 374752 - DNA, 1062 bp, Salmonella enterica
gtgggccaggggcgccatacccggtttgaccccacgcctcccccgaatccgccagccggcgtcactgacatccaggggctggtgcggttcgacgacttgtactggatagcggtagacgtgaaaacggacgggcagcagctggccgacatcatggagcagcgtccgctgggcctgcggcgcaacccgaacagccagccggtgagcggaaacgcctttcgccgggagacacggtacaaaacctggcgctcagacgtgcaggagaaagcggaggctgtcggctatctcactcattaccgtcacgtcaatgataacgacctggtgccacagataccgccggaggtggatatggacagcgagctttacgagaagctggggtggctgggtgacaaactgggctttgactggctggcaacatcggcaataggtcttttaccgcgaaccttcggggggaatgcgggtgtggatatggggattacacaggaaagagacacgtactggcatcacggaaaaacggttttgtttttacgcgcagaacagagcgtcatgaagtctggtgagagaaatacgctgtggatagggggcggaacggtaagctacacggagaaagcggcggtcaaacggtatcttgtcccttccctgaatgaagaatgcctgaaatctacgggagagcatcaggcggcgtttatacaatgtctggctccgggagagctggagaagcgttttccccagagagaaaatgtggcctcagcggggttattcaccaaacccctgaatcattttatggcgagtaagtaccttccctatattcacaatcaggtgctggagctggccgatccggcgtgggatatggagcggaaagccatgcgaaccctgttccgggaggctgtagaacaaaaggcaaacttcagcaatccggatgaagttgaacgtaaccgcgagtttctggcgcttcaggacatgctgcggtttacgctgagccggctgcagacagaagaaaccggaaaaaatgctctgttgcgctttgcggcagtcacggaggaagaagttgaacttcctaactaa

SEQ ID NO: 374753 - DNA, 783 bp, Salmonella enterica
ttgaacttcctaactaaaaagcgcgtcatgcttctcatttttctggttccggttctgctgtatatcgggtacgaactgtttctgagcaggaaactctcgccgcccgccgactctgagcggctcaccgtgtctttccgcgtgccggagggcgtcacgcttttgccactgggagggctatacgagtcatctgaatgtacgaatacaaactttaccgccgggggaaatacttatcaggctgacgcgacgacgggggtttccctgccctttgtcagccaaggatcgggaaatattatgtcggtcagtatcgcgaaagatggcggggggcgttgtcggtggaagttaagtagaatccgcgtgcatttcaggttatctgacgatagtcctttatctaaggggagaaatatcttcgatactagctatctttttgattttagggattgggggattgttaatacgtatgatactggcgatgccaaaaatgtcagtggcaatctgaatataacagctgattttttcccgatgatctttataaatcatatgttcaaagaagctacactacggctttttggcggggatactaattatgataaatggagccgacattatcgcttgtctaatacaaaaaacattcatctatatccgtttgttcatatagataagtcagtcatacttgaaagcccaaatcctcctcctggaaatattaccgcactctatcccgatggcagtagggatgatatacccggcatcatccctgattataacaagttgctgtcaatgaaatag

SEQ ID NO: 374754 - DNA, 507 bp, Salmonella enterica
gtgggtaagatcaatgttaccttctttccttttgcggtggtaattggttatctaattaccccggtgttcactgatataattttattaagtacgatggggaatacgcaggcaggagggttgattattctgcaatattacagccagataatggcgtgttacttcctctatctcctcgcggttatagtggtaatctgttacttatatgtgacgttacgcaatctgtttttaaacaatttgtcactggcgaacgatacgatttgttttcgttcatctgtaacttcacacggtatgctgtggcggtcactggtggtgtttatgctatccggcgtgacgttgggactgacttatccgtggttgaaaatttggctggtgggttggctggcgcaaaatacgcaggttcagggcgatctggattcccttgagctaaccaatgatgagaagccgctggaaaatggtccgctgatgtggatttcccgtggcatcatgccttacttcccgtttatctga

SEQ ID NO: 374755 - DNA, 1512 bp, Salmonella enterica
atggagttcagtgtaaaaagcggtagcccggagaaacagcggagtgcctgcattgtcgtgggcgtctttgaaccgcgtcgcctttctccgattgcagaacagctcgacaaaattagcgacggatacatcagcgccttgctgcgtcgcggcgaactggaaggaaaaccggggcagactctgttgctgcaccatgttcctaatgttctttccgagcgaatcctcctcattggttgcggcaaagagcgcgagcttgatgaacgtcagtataagcaggttattcagaaaacgataaatactctgaatgataccggctcaatggaagcggtctgcttcctgaccgaactgcacgtcaaaggccgcaacaactactggaaagtgcgtcaggctgtcgaaacggctaaagagacgctatatagctttgatcaactcaagaccaacaagagcgagccgcgccgcccgctacgtaagatggtctttaatgtgccgacccgccgtgagctcaccagcggcgaacgcgccattcagcacggtcttgccatcgccgccggtattaaggctgcaaaagatctcggcaacatgccgcccaatatctgtaacgccgcctatctggcgtcacaggcgcgccagttggccgacagctacagcaaaaaggtcatcacccgcgtgatcggcgaacagcagatgcgcgaactgggaatgaacgcttatctggcggtcggccacggttcgcagaacgaatcgctgatgtcggttatcgagtacaagggcaatccgtccgaagacgcgcgcccgatcgtgctcgtcggtaagggcctgacctttgactccggcggcatctccatcaagccatccgaagggatggacgagatgaagtacgatatgtgcggcgcggcggcggtgtacggcgtgatgcgcatggtcgccgaactccagctaccgattaacgttatcggcgtgctggctggctgtgaaaacatgccgggcggacgcgcgtatcgtccgggcgacgtactgaccaccatgtccggtcaaactgttgaagtgctgaataccgatgccgaaggccgtctggttttgtgcgatgtgttaacctacgtcgaacgttttgagccggaagccgtcattgacgtcgcgactctgaccggcgcctgcgtgattgctctgggccatcacattaccggcctgatgtcgaaccataatccactggcgcatgagctgctcggcgcttccgagcaggcgggcgaccgcgcgtggcggctaccgctgggcgatgagtatcaggaacaactggagtcaaactttgcggatatggcaaacatcggcgggcgtcccggcggcgcgattaccgccggttgtttcctgtcgcgctttacccgtaaatataattgggcgcacctggacatcgccggcaccgcctggcgctccggcaaggccaaaggcgcgaccggtcgtccggtagcgctgctgtcgcagttcctgctcaatcgagcaggttttaacggcgaagagtaa

SEQ ID NO: 374756 - DNA, 1503 bp, Salmonella enterica
atgagcgcacctctgttaattgcccgcacgccggaaacggaactgtttttgctaccgggtatggctaatcgtcatggactaatcaccggcgctaccggcactgggaaaaccgtcacactccagaaaatggcagaatcgctgtcaggcatcggcgtaccggtgtttatggcggatgtaaaaggcgacttaaccggcgtggcgcaagaagggctggcgtcggagaaactgctcgcgcggctgaaaagtatcggcgtgtctgactggcagccgcacgccagcccggtcacgctatgggatatctttggcgagaaaggtcatccgctgcgagcgacggtttccgatctcggcccgttgttgcttgcccgcttactaaacctgaacgaggtacaatccggcgtcctgaatatcattttccgcatcgccgacgaccagggattattactgctggatttcaaagatctgcgagcgattacccagtatattggcgataacgccaaatctttccagaatcagtacggcaatattagcagcgcctcggtcggagcaattcagcgcggattgcttacgctggagcaacagggcgcagggcacttctttggcgagccgatgctggatatccacgactggatgcgcaccgatgccagcggcaacgggatcatcaacatccttagcgcggaaaaactctaccagatgccgaagctgtacgccgccagcctgctgtggatgctctccgaactctatgaacaactgccggaagcgggcgatctggaaaaaccgaagttggtttttttcttcgacgaagcgcatctgctgttcaatgacgctccacagatactactggataaaattgaacaggttatccgtctgatccgctcgaaaggcgtcggcgtctggttcgtctcccaaaacccgtcggacattccggacaacgtgctcggccagttgggcaatcgcgttcagcacgcgctgcgcgccttcacaccgaaggatcagaaagcggtgaaaaccgcggcgcagaccatgcgcgccaatccggcgtttgatacggaaaaagcgattcaggaactgggcaccggtgaggcgctgatctcgtttctcgatgctaaaggcagcccgtcgatggtggagcgggcaatggttatcgccccctgttcacgcatggggccagtaaccgaggatgagtgcaacgggcttatcaaccactccgcactgtacggcaagtatgaagacgacgtcgaccgtgaatcggcgtatgaaatgctgcaaaaaagcgtgcaggccactaccgagaagcaaaacgcccccgcagcgaaaggcaaagaggcggcagttgacaacggtatcctcggcgggttgaaggatatcctgtttggcagtaccgggccgcgcggcggcaaacacgatggtgtggtacaaagcgtagccaaaagcgcggcgcgtcaggttactcaccaaatcattcgaggaatgttaggcagtctactggggggcagaagacgctaa

SEQ ID NO: 374757 - DNA, 627 bp, Salmonella enterica
atgtgctggacagtagccgctgtgcttcgtattgcgttaggttccgcgaccgtggctgcggttacaacagcgggcgtggtactgccgattattaacgtaacccatgccgatcctgcattagtggtgctggcgacaggcgcgggaagcgtaattgcgtcacatgttaacgatcccggtttttggctgtttaatctgggttcaaaagacgatattcgtgatgagcagcgttatcatagctattgtgatgcgatgacgcgccggggactggcgccgttgcgcatcaatccgcgcgctatctcctctatccatctggggatacagctcatgcgtgatgcgcttgctgcacgcccggacgtagatggcgtcttttgtactaacgacgatatcgcgatgggcgctctactgtggtgctgggagcgccaactggccgtaccggagcagatctccatcgccggattccacggtctggagatgggcggacaaatgataccgagcctcgccagcgtcattcctcccgcttttagatcgggcgcagcgcagatgttgcttaacaaaattaaaaataacgatctcaaccataatacaattggtttgggttatcagatttatcacggcaacacattataa

SEQ ID NO: 374758 - DNA, 927 bp, Salmonella enterica
atgacctttgaacagctcctggaagagtatttttttgcccgtctgctgcgccctgatacccagaactgctattgcacggcggtaaatcagtttacccactggcgcaacgtactgcccgccgaagtcacgccgcatatggtgctggagtggcgtcattacctgttaaatgtgcgctgtatcaagccggtgagctggaaccactatatgcgccatatgcgggctttgtataacttcgcgattgaacagggattactggagcagttcatcaatccattccagaagacatcgctgcgggaatcccgtaagaaaaagaaaaccctgactcgcgagcaaatcctcgcatcccgcaaagtactgaaccaatttatcgaacgggagaaaatgcagcgcggctatcgttcgcctttatatccggcatggttttggctgaccgtggttgaaaccttcaactacaccgctatccggctgaatcagcttattcacctgcgggtcagggatatcgatctggtccatgacacgctgtttattcagagcgaaggcagcaaaagccatgatgaacatatcgttcccatcgcctcccgtttacggccctatctggagcagatgcttgaagaagcgaaaacaaagggaatacgggctgacgatcagttgttcaacatcaatcgtttcagtcggcggacgctgcgccagggtaaaccgatgacagaaaatcaggtgagttatttctttgccaaactcagcgatgcctgccacagccgtttttcatcacatcgctaccgtcataccgttgccacagaattgatgcagaaaccggagcaaaatttgtatgtcacgcagaaactactcggacaccgcgatattaaggtgacgctcagctatattgaacacaatgtcgagatgctcagaagttgcgtggagagagattga

SEQ ID NO: 374759 - DNA, 1620 bp, Salmonella enterica
atgcggatatggctgacgcgcaaaaagcagaacaccacaccatccactggcgaaccagacgtcacggagggatggctgcatcctgaatccgcgcaaacgctactggttgaaactactcgccaacagctgatccagtttattcgccagagcaccgccgttcccgcctcactgttcgaacgcttctggctgataccaatccaccgcttcgcagaattggcgcagttgttcccagcctcggaaaaccaccaccattcccacgcaggtggcctgctcgatcacagcctggaagccgcctgttatgccgcacggctgcggcagagttatctttttccacctgatgcagcgccggaagatcaggccgcacaatccgaacgctggacaacggtcatcatttacgccgcgctgctgcacgatctgggcaaactcatcaccgatattgaagtggaagatattaacgggcaacgctggtttccgtggcatggtccgctggcccagccttatcggttccgctatctgccgcaacgtgattacctgcgccatccggctgcggcagttcttctgcttacccaactgctccctccggaaagcctcgactggctcgccgccgatgctgctgcgttatccacactgctgcattgcctgaacggacagtatcagtatgccgggctggcgggtgaactggtgcagaaagccgaccgggcgtcggtggcgtttaatatcggcggcgatccggtcaaggctatccaccgcccacaaacctcgctgccgcagcaaatcatcgccgccctgcgtgacttgctggcaaatgaattccggctcaacaacccgaacggcggttctgacggctggctgacggaagaggcgctgtggctggtcagcaagaacgctgccgatgccgtgcgtggctggttgctacgccagggtattgacgccgtaccgcaacataacgtgcggctgttcgatgagatgcaggcacaccagttgctcattccttgtgaggataaagccatctggcattgccggattgaggccagcggcggctggagcagtgaactcacgctgctgcgcttttccccttcgctgatttgggaagatccgcaacagcggcccgcaacctttagtggaaccgtcacaccgatagcggaagtccagaatgcgacagaaacagtaattgcaacggatatcactgtggaacaaccatcccctctacccgaacgggacgataccctactatcaggcgaagccttctggcagtggctggttcgtaatgttcaggctcaacatctggaagtcaatgaacctaacgcccgaatccataccgtcgctgggtcggtgtttctagtgacgcccggtattttcaaactctggcttagcacctgcggtcagaatgtccctgaagaatactggcgggaggtacagaagaagttccagaacctgaatcttcaccgaaaacaaaaaaacggcctcaacatctggcactgcgccgttgtcggcccacgccgttgttcacgtctgaagggatatctgcttgacgatcccacgccgctttttggagatgacgttccctttaataaccctcatctcttgctcagtgaaggagaagacacccatgacctttga

SEQ ID NO: 374760 - DNA, 912 bp, Salmonella enterica
atgaacagaagcaacgatctttaccagaaagtcaccgatgaaattatcgccgcgctggagaaaggcgtgatcccctgggttcgcccatggcgggaaggggaaccggtggtgccgatgaatgccctgtccgggcggttttatcacggaatcaacattcctctgctctggaacagcgcagaacgacaggggtatgaaagcgatcgctggctgaccttcactcaaattcgcaatgcgggcggtaacatccgcaaaggcgaaaaatctacactggccgtgttctatctgccccagcagcgcgaagtagtggacagcaatgggaacacggttcttgatgctgacggcaaccctaaattgacgtcctacgccgtggtacgcgagttccggctgttcaacattcagcaatgcgaagatctgccggaggcgttttcacagcctgtcgtgatggtcgatgatcctatcgccgccgctgagcaggttgcccggcaaagtgcggtagtgatcactcaccgacgccagaaccgggcgtattactcgccggggcgcgactgcatcatcatgccgcatcctgagcagttcgcttcacgtgaggattattacggcacgctgctgcatgaactgacgcacgctaccggacacgcttcacggctgaaccgggatggcatcactgccggaaagcataccttcggcgatccgacgtacagttttgaggaactaatcgccgaaatgggagccgccttcctgtgcgctcatgtcggcattcaggcaaagctacagcatgacagttacatcgcatcgtggctgaaggtgttgcagcagaacaaaaaagcgattttccgcgccagcggattagcacgtaatgcctgtgaatatctgcttgaacgggcgcagcagccgttagcgctgagcgcatga

SEQ ID NO: 374761 - DNA, 294 bp, Salmonella enterica
atgccaacttcaccttgccctgaagcaaaatccttatcgctgtctgtctcaactgaggcctgggaaaaggtagtcagttttccacccgatccctctcaggaagacgaccgtctcgaaaacctgattgtcgccaccattctgacattcaaaagcgcaggcccggaccgtaagagcattaatttcggtctgtactgtttgccttctgacggcagcagcactgtaccgctgatgacaccgctgcgcttaacccttgaagatgaccacctgttggttactgcccttcacaccagctga

SEQ ID NO: 374762 - DNA, 873 bp, Salmonella enterica
atgatatctctcgaaacactgcaatcagccatctccaacgtttctgtgtggcgtcaaggagacgtatgcgcgccgcataagccgttgctgctgttgtatgtgttgtcgcagtacaaagcaggacacccacgcctgtttaattacggccttgagatccacgaaccgctcactcgcctgctgaaagagtttggtcccaagcgacgcactgactatcccaatatgcctttctggcggctcagaactgacggcttctgggaaataaccaacgcagaaggttgtaaaccgcgtaaaggcaacacccagccgacaaaaaaagagctgattgataaccaggtagcgggcggctttgatgaagcggcttaccagcaattgctagctcaccctgaaatgattgaccaactggtccagcaaatcctgatggatcgcttccccgagagtattcagcggatcctcgccaaccaactaggtctggattttatcgaccgttcgaagaaccgcgatccgcgattcagggatatcgtgctccgggcttaccactcccgatgtgctttctgcggttatgacctgcggctggatggtgcgctggttggaattcaagcagcccatatccactggaaaacctatggcgggccatgtgtagtgaacaacggtctggcgctgtgttcgctgcaccatgatgcttttgatatgggcgcatttgggctggatgaaaacctgactatccgcatctctggcggcctcagccgtagccctgtggtggacaacctgttctggcaacggaacggccagcaattgcatcttcctcatgacacatcgctgtggcccactgaacaatacgtcggctggcatcgtaagcagatcttcaaagcctga

SEQ ID NO: 374763 - DNA, 921 bp, Salmonella enterica
atgactagtcgtccccagatgataatcaacgtgttacaggctaatcccggccagcagtttactgcacgccaactggcgcagaaaatcattgagcactacagcgcagaactggctgaaaaacgtaaaaatccacgttttgccagcgatgaggcttttttaagccaaattaccgctgaagttggtggcagtcggactgttaaagcgaaagctatgtgtccgcaggtgatgacgcgtgataagccaagaccacgattgttttattggggggagtctgtggttgaacaggcggatgctaatgtagcccccgaaccaacggttgaaactgttagctttaccgagcattcgttatatccgatcctgattgattatctctcgcaggaagaaggactattgtgccgtcgtattgacgaaaagcgctcaagcaacaacaaagggttgggtggcaaccattggctttatcccgatattgtcgcattggagcctcttgataaagagtgggacgatgtggttcaaaactgtgttcgccatagtgaagggcgtttgacacgactgtggtcttttgaggtgaaaaaacagctaaaccgtagcaatgtacgtgaatgtttcttccaggcggtcagcaattccagttgggcgcatttcggctatctggtggcgactgaaattaacgaagataaacagcgtagcgtggagcgtgagcttcagatgctctgtgcgttgcacggtattggtgtgctcctcttggatccgcatgatttctctaatagccagacgttaatcccagcgcgtgaacgtaccagcgtggactggcagtcagtgaaccgtttggtggaagagaatcgggattttaaagattttattgaactggtcggtgagtaccaccagaccggaaaaatccacaaatcgttgtggaacaaataa

SEQ ID NO: 374764 - DNA, 147 bp, Salmonella enterica
atgcaaaacagtcagcatcagaatcttgttgggtttatctggaacatcgcaaacaagctgcgcggaccctatcgcccaccgcagtatcgacgagtcatgctgcctttgattgtattacgtcgcttcgatctagatagctgcgcctaa

SEQ ID NO: 374765 - DNA, 597 bp, Salmonella enterica
atgacgctttatcaagttaaacctgcttttcaggcgctgcttcgccccgtaatggcctggctatatcggcatcatattacagccaatcagatcaccctttccgctatggtcctctcaattgcgaccggcctgatattgattgtatggcccctgtattttctgttgcccatcgtgttatttgtgcgcatggcgctcaacgcgctggatggtatgttagcgcgcgaatgcggccagcaatctcgtttaggctccattctgaatgaaacgggcgatgtgatttcagacatcgcgctttacctgccgtttctttttctggctgacagcagcgcgccattagtgctcgccatgctcctggcgatggtgatgagtgagttttgcggaatattagcgcaaacgattaacggcgtgcgtagttatgccggaccgtttggcaaaagtgacagagcgctggtgtttggcgcaggggggctggcgctgaccgtttggcctcaggcggcgcagtggagcaatatagtctggagtattgctctcgtactgctgctttggacgatagtaaaccgttgtcgaagcgcattaatttcggtgagtgtcaaatga

SEQ ID NO: 374766 - DNA, 432 bp, Salmonella enterica
atgatgctgctcgaagaatccctgctcgtcatctttgcgcttttgctggttgccactctggtaaatcaaattctggtgtggcgtcgtcctgataaggactggcgcgaattgacgctacgcattcggacctggtggctaatcattattctgttttcgctggcgctattgagtccgacctggctggcattgaccttttttgcgttactcagttttatggcgctaaaagaatttctgacgctggttccctcccgtcattctgaccgaatgccgctgttgtggatattcattgcgattcccatcaattattggctgattggaattggctggtacggcatgttcgtggtgtttatcccggtttatgtcttcttatttttaccggcgcgcatggtgaaaaaagcaatttatggacgatctcaggcacagcctgcttga

SEQ ID NO: 374767 - DNA, 1227 bp, Salmonella enterica
atgccattcagtgtcggtcagggttatttcacaacttctatcagcgctgaaagatttaacgctataaaggaaagctcatccactccggaaatgagcttatgggaaaaaattaaagcatgttttttctccacgtatcatgcagatgcccttgaatgtatctttaaactttaccactatgaggagctgaatttaacaccggtacaggttcgcggagcatataccaaactccgtgcactagcctctccgggatgtaaagaccagtttattatagaatcacaagagcaaaccgatgaattgattattaaaggggataataattcaattcttttatctgttaaggttgaatgtcattcggaagcttttagcctcgccaaagaaatcaataaattatatcccaagataaaaaacacttctttaggcgacattagcaggctggtgatttttggcgacagtttgtctgactcaatgggacgcatgtttgaaaaaacacatcatatgttaccctcctatggtcaattctatggcggaagattcactaatggatttacctggcctgagtttttatcatctcctcaatttttaagtaagaagatgattaattttgccgaagggggaagtacatcggcaagctattcatgctttaattgcataggcgactttgtatcaaatacggacaggcaaattgcatcttacattccttccagccaggacctggccatgtttttattgggagccaatgactatatgacgctacataaagataatatagcaatggtcgttgagcaacaagctgatgatattgaaaaaataatttctgaaggggttactaatattctggtcatgggaattcccaatttgtcttcgactccctatgcagtacattctgatgataaaagaaaacttgaagatgaaagttttgctcacaatgccttgctgaaaaagtatgttacacaattaaaagaaaaatacccgcagcataggatatgctattttgagaccagtgatgcatttaatcagataactgctgtggccaatggtataggttatgatacggaaaacgcttacactcaccatggttatgttcatattcccgggactaaagatcctctgctagatataagtccgcgatatatctttaatgattctgttcatccaactcaggagattcataattcttttgctataatactagaaaattttatagttaatcattattctaatgtataa

SEQ ID NO: 374768 - DNA, 429 bp, Salmonella enterica
atgcctatttcaattagtagacatggtgcaccttttgttgttcaacatgataattctattagatctggtgcaagtcactcatcatcactttcaaaagcaatctgtcatagcagcaactcttacgattcttacgattcttacgattcttacgataaaataaagtttataagttgctatggtgcaaacgggggctgtttctccaatgcacagatgttagcaaatacctcagggaggcctgtcacagggtactatgggagagtaaataagttaacagccaatctggattttactggtcgtacattctacccacaagataagactattgcccgtatttgttctgcgggtaatcggattctgagctggccagttaaagcgttggtctacttgagaggtctgctaacccataacgcggatgataatctctggtaa

SEQ ID NO: 374769 - DNA, 273 bp, Salmonella enterica
atgatcgacttaactgcagaacagcgacagttggcgaaaatagttcatgattatgcctgccggttccctctgacagaaaatggcgatgctcagttattacagggctgttatgactatatggatgcttttaagcgggtaatggacagcgcttcaaaagtccagatggactacatttgcctgcaataccctggatattttcgctttgcaaaatggatggaaaggctggcacaaggcattgcagatggagtcattgaagtgccgaaagatcactaa

SEQ ID NO: 374770 - DNA, 237 bp, Salmonella enterica
atgaagaaagcgacaatcaagatgtaccgtattctggaatcgggcatcgaggccgagtatttcaatatcattctggaaaacgtcaaattcacaacggtcgcaccattcctctctcctaacggtatgagtagtactcaccttgaaacgcttgaattgcgttatgaagcaattacctggaagtatacggagggtaatattatctatcgtgattcatggaacgatcgttgttgtgcctga

SEQ ID NO: 374771 - DNA, 192 bp, Salmonella enterica
gtgctggtcaaccacggcgtcggcatcacctgcctgaactatcacggacgcggtacgctggcagggcttattacgccgccgcgtttgctgcggatgctggagatgactgcgcacgaaaatagtattcccgttcaccatcctcaccgaattccatcaggtacgggcgcaaccgcgctggtaacatcgagttaa

SEQ ID NO: 374772 - DNA, 210 bp, Salmonella enterica
atgatcttttctgcgcaggaaacgcttttttcattgctgcggctaaacgggatttcaggacatgaaagcagcattgcagatgttatgcagcgcgcgtttgaacgacaagccaaagacgtctggcgggatcgctcaggcaacctcgtcgcctgttatggcagcgacaaacctgacgctcttcgcctgataattttttgcgcatatggatga

SEQ ID NO: 374773 - DNA, 978 bp, Salmonella enterica
atgccaattactatcggtagcagttttttaaagagcgagctgtttcctgaaaatagtaacacgcaacgctcattcttttatttattatgggaagcaattaaagagttcttctgtggcacgggaagagcagatgccgacagatatataaaagagttatgtaatattacctctccgcctggcgcacaacgtttacttgatttattctgtgcgttatataaattatcatcaccaacatgcagagataattttcattttgagtactataaggatgctgagtgtcaatatactaatctatatatagaagatggtgcagaaactccattacgtattgtgatacgccaggattactattattatagcattatggacaaaacagtgacttgtatttatacatatcccgaaaccctgaagacataccctgatgttagtataaaaaccggtacttatgtttgtgagccactatgctgtttattccctgaacggttactactcacactacccggcgacataacattttcaattagtttaaatgagataaaagagacacttatcggcatggcagaaaatggaactttatatagctggaaggagcaggaaagaaaaatagctatatcctccaggattaatactggcattgcgcgggcaggtgtaacgcatattgacaaagccacccaaaatataatagcctcaaaggctatttcagccgctgacctaaagaatacgatatatgatgcaaattatacacaaagctcaattatgcagatggtttattcatgtctgtttaaaaatgatatattagcgaatcttctttatgaagaaacctgttataatcaattatgtttaaacgaacttactgaatatgtagcacttcaaattcataactgtcttttttctgaaaacttatcttcactagttgaaatagcagaaaaagagactcaccatcagcttttactaaaccataaaaataatcatttataa

SEQ ID NO: 374774 - DNA, 378 bp, Salmonella enterica
atgaagaaatcagatcacgatgtacacgaaaagacagcgtcctggagcattttgcaatcagaatggctaaaaaagtgtgggcggctattattactgttactttaccgtttcgctatcgggtgggccttttttcagttgctcaccattattgtcgcaggaatattattgttgggggtcttactgttccatcccgtaatctttgtacagactataacaattacagaaaaattaaatcatgcctcggtttatttatggaatatacttaagttatgtctatggaattatggtgtcattgcagggtttatttttatgttgggatgtacgataaataaaagtatacggcaagctcagcgcctatccagaaaatttgatgtataa

SEQ ID NO: 374775 - DNA, 777 bp, Salmonella enterica
atggtaaagcgcgtatcttctttcctcttgttcagcctgttgtctcttcaggcaatgtcagctgagacccagattgattcccatcggccaaaagatgttgtcgatattactacagtcgctcccgacgtacaggtagacatgcgatattttacttcttataacgttattggtcgcccgattaaaggctataaagcgcctgtttgcctgttaacgccgccagcggcgaacgcggtgaagcaggtcgccgatcgtctgcctccctttggacttaccttaaaaatatatgatttcttccgaccgcaaaccgcagtgaatgactttaccgccagggccaaagctccttctcaaaaacaaatgaaaaacgaattttatccgcaagtagataaaagtagcctgtttgaggaaggttatatcgccgccaaatccagccacagccggggaagtacgcttgatctaatgatcgttccgctcgacagtaagttaccagtataccatcctgggcgacctttggcggattgtgctgcgccagcggcgcaacgttcgccagacaatagtctggatttgggtactggctttggctgttttagtccgttatcccatcctgataatgccatgcttaccgctcagcaacgcgcaaatcggttgttattacaaacattgatgcgtgatgcgggcattatacagaatggtggcatttctcccttactaatgagtcatacccgaagacttggtttgacattcccgttaaagagagaacctcaaacgacgctttgttga

SEQ ID NO: 374776 - DNA, 150 bp, Salmonella enterica
atgtgttggattgctgcgcatgttggcgaggaggttcccctctccgccaacacccgcctgtttttcgtggcttttctgaacagtaaatgctgcttaatgcttaatcatgatatggcggacaagggtgtagtcttccagaccatacagtga

SEQ ID NO: 374777 - DNA, 2982 bp, Salmonella enterica
atgttggtcaatctgtgtaattacaaacaaagcgtcacgctcattgcaaacagtggcgtccagtttcttgattttggcttaacgccgcaagagtcggcccactacggacgctttgtgcgcaaaacggcaaacggtccgctactgcgcctcgattttgatctgacaagcggacgctacaccttgccaggacgtgctggcggtcaacctgaagtcgtgaaaccggaaagcacccaggcgctgcactattcactggacgtactcgacgggatctggcttcccctgccgtttctgcgttttaatccgccgcgaacctttattgacgggccggataactgggcgcgcattcatgtacgtaaactcagtaaaccggatagcgccggaaacacacaccggatcaccctcgccttcgacagtcaactggcaaaaaatatgccttcggcgttagcgccttgcgaaaacgatctgctcaacggcacgcgttttgctctcgcctggcgcgatgaagaagtcgccgattttcttgatcagacatggattgacggctggctgcgcgagtcgtttcttcagtatgcttcacaggtggaaaaccgttcagaacaggccattcaacaagcgctgcgtagctttgagtatcaggcgcactggctaaatttgctgacgctgttgggcgaacagcttacggtgccggaagtgaagtttgtgacacatacgctaagtacgcctgcgatccctgtcgatctgattctggatgttggcaatacgcatacctgcggcgtactgatcgaggatcatggcgacgcgaatgacggattacgccagacggcggagcttcaggtgcgttctttaagcgagccgcagtatctgaacgatcctttatttaccagccgggtggagttctccgaagcgcgctttggcaagcaacacttttctgtcgaaagcggacgagacgacgcctttatctggccttctattgcgcgtgtgggcgacgaggcccgcctccttgctatgcagcgtctgggcactgaaggcagtagcggcatctccagcccgcgtcgctacctgtgggatgaaacccccgccttacaggactggcgctttagccagatgaacggtaaaacgcagcgcgaaccgctagccaccgcgtttccgctgatgaatttgatgaatgacgacggacaaccgctattcagcctgccggatgaggaaagactaccggttttttcgccgcaatacagccgtagcaccttgatgacgcatatgttgtgcgaaattctggcccaggcgttgggacaaattaacagcgtcgccacccggctacgactcggctttcccgcctcgccgcgccagctacgcactctgattttaacgctgccctccgccatgccgaaacaggagcgggaaattttccgccagagaatgtttgaagcgctggcgctggtctggaaagccatgggctggcatccgcaggatgaagatttcaccacgcctaagcagcgcgaaaaaagcgtggtgccggtgccggaaattcagatggagtgggacgaagcgagttgcggccaactggtatggctttataacgaatctgtttcgcattacgccgggcgtacagaatccttttttaatgcgctggccagaccggatcgccagccagaacccggcgttgaacccggacgtgcgctgcgcgtagcatcgattgatatcggcggcggcacgacggatatggcgatcgttcactatcagttagatgacggcgtgggggccaatgtaaaaattacgcctcatcttctgttccgcgaaggttttaaagtcgccggggacgatctgctgttagatatcattcagcgttgcgtactcccttccctacaaacggcgttgcaacgggcaggcgttactgatgccgccgccctgttggcgaccttatttggcgattcgggacgaattgatactcaggcgattttgcgccagcaaacggcgctgcaattatttatgccgctaggacatgcggtgcttttcgcctgggagcaaagcgacataaacgatccatttgccggtttacatgcgacgtttggcgatctgctaacctgccgcccaacaagcaacgtgatgaactatatccagcaggcgatcgaacatgctttgccgtctggttcgccgggatttgatgtactcaatgtgccattgcaaattcagtttagccagcttcaggaggcgctgctggctggtcagtttacactgacgacgccgcttcatgcggtctgcgaagcgatctctcactaccactgcgatatcttgctggtgacggggagaccggcctgcttacccggcgtacaggcgctcatccagcacttacaaccggtgccggttaaccgcattgtctggatggataaatatcaggtgcatgaatggtatcccttcaatcaacaagggcgtatcggtaatccaaaatccactgccgcagtgggcgcgatgttgtgcagtctggcgctggatttacgtctgccgcgtttcaattttaaagcggctgatatcggcgcatattcgaccatacgttatctcggcgtactggataataccgtcaatacgcttcgcgatgaaaacatctggtatcacgagatcgatctggataaccccgacgcaactctggacgctcgcctgcattttccgctacgcggcaacgtaacgttgggcttccgtcagttggctaacagtcgctggcctgcgaccccgctctattccctgagcattaattccgctgaactggcaaaaactatcgctggcgacggcgtactgaatgtccgactcaaattacacggcaaaagcaaagatagccccccggaatctttcatattaagtgatgcctggctccaggacggaacaccgatcgccgccgatgcgctgacattaaaattgaatacgctggctgaccgccgccacagcggtagccactactggatagatagcgggagtgtatacctgaaatga

SEQ ID NO: 374778 - DNA, 1311 bp, Salmonella enterica
gtggcaaaaactctcttacgcagcggcaatctggatgactatcaggccgtgggcggcggcggtcaggccgtatttgaatcagcatggcaaattcgcgaaacgcttcgtctgcgtaaacaacaggcgatggctgactgtctggcgattccgcagcttaacgataatggcgatcgggttgactggtattcgccgattgaaggtcaggcgatagcatggaaagctgccgacgaggagacacattttcgggcgttacgttatttagccagcacatttgaaagcgcggccgcactcagccggaaaagcctgcaatccggtaaaacagcgctacaactatttggttctctgcttgagaaagcgacacaatttcccggcgaaaatcatgttttcctggttaatggcaaaccggttattaccttctggggattcgttaatctcaacgaaaatacacgcgatgatgtactggattgcctgcggacaaccgaggcgaaagccgacatccctctggtcgagccggaacctgagccggaagaaaagccgtttgtggaggcggtatttaaccaagcggataaatccttactggcgtctgtcactgaaccgccgaatgcgttagatccaattgtgtcgccggttattgtcaacacaccggattcgacgcccagagctacagaccaggcgaaaaggtcccgccgtctgccgttgtggagcttacctgtcgctgccgtagttatcgctgccgtcgccacgccttttttctggcaatcctcattcgttgaaggttcctctcctgctcgtgtcgtgcctgccgctatcacgcataacccattgcctgaactaaccgcccacttgccgctgcatcgtgctgatgtaacgcctgcccctaaggtggtaccgccgccggaagcgcctgtcattattgccgctatccccaaagacgcgctggtgatggacagtacgcaaatgaagcttgggactacgcgctttttaaacggtaactggcgggttatcgtggatgtaaaagatccgattaccggcaagccgccctctctgcgttatcagatccaaaataacaaaggtatcgcgcgcgtagtacatggcgataacgtggtttgtcgggcggagattttctctggtctgcatcaaacgggcgagctgatgattaaaagtcgcggcaatgcgcgctgcaccgacggctcacgttatccgatgccggaaattacctgtaaagcgggcgtcaatgacgtcgcaacctgtaccgcccgttatgacgagcacgcggcaattccgttgacgtttaaaaagataggtgcctga

SEQ ID NO: 374779 - DNA, 384 bp, Salmonella enterica
atgatttgggtcagcgcgcaggaagtcattgccttccacgatcgtattttgcaacgctttcccggagtggttggcctgtctgaccctggcagagcacaggcattgatttatcgggtgcagaatcgtgttcactacgaaggcgttactgacctgtttgaactggcggctacctactgggtcgctattgcccgcggccatatctttcatgatggtaataaacgcactgccttttttgttaccatggtatttcttaggcgtaatggcatccgtattcacgatactgacaatacactggaaaatctgacggtcgaagcagctacaggggaaaaaacagtagaccagttggcacagtatttgcgaaaacaggtggatgatcccctttaa

SEQ ID NO: 374780 - DNA, 222 bp, Salmonella enterica
atgcaaacctatacttctacccaggccagggccaacatttccaccgtgctggatactgcgttaaatggcgagcctgttgaaatcacccgtcgtgatggcagcgccgccgtgcttatcagcaaagccgaattcgaagcctggcaaaatgccaaactcgacgcggaatttgatgccatcatgcaacgtcatgaacacactatcagggcactgactgaccgatga

SEQ ID NO: 374781 - DNA, 522 bp, Salmonella enterica
atgcgtgattttgctctgatatttcgccatgcatgggaactggcaagaaaaggcgctgagacgttcggcggctcagctcgcagctactttcgtgagtcgcttttattggcttacgaccagttgaagcgcaatgtaacagcgaaagacctggttaaaattatgacaggtcgatacatgtcaatgagccaaatccgagaagaagtaaatgcgagatttaaaaaacaaacagctaaaaatatcgcccgtagaatttggaacatgtttaggtctccttatgtggaaatagagaagatcaaatgtgaatctactggaaaatatctttatcacttaaagcacgcacaaaagaattttttcgtaagtggggcgattactcgcgcactcaaatcggtaaggccagagaaaaagaaggccataaagccacgtccagcaatgtctagagatgagattaattcttgccgtatggcaaatgcttttcataaagcgctttccaccgggatttatatcccaccaaatttaatttga

SEQ ID NO: 374782 - DNA, 723 bp, Salmonella enterica
atgaacaaaagaacgcagattattcagtttagagcagatgaagaaacatatcgtcgtgctcagaagcgtgtaaaagatggtggtttgcaactgccagatgtgatgcgtgctgctctcaggtctgttgctgacgctgatgtttcctgcctcgcagatttaatcaatggaactacactaggtagcgaagagattaatcaggcttggcttttccagaagtgccatgaactttttgaatatcgtgacgggcagttattccgtaagtcaagaaaagggatgggagagcaaggtaatccagtttttatccgagtgcgcgaaggtgaagaacacgtattgattcaggggagtcactacccactgaaagatattgtctggttgatggtaaatggaagcattgctggagaggttgagtataaaaacccatacagggtaaacgcgaagcactcaattgaaaacctgatgattaattctattaaggagaaagagacaatacttgttaagtatttaaatagatctgaaaggatcgatgttataaaagttaaacaacgtgcgtttatgtttgacactagtagtgatgaaaacgccaaaaatgtaatagaaaaattaattaacagtaaaaaaacaattccattacttctacgtggtgatgatggctggattgcgtccagaacagcaattcatgcttttaaattagtcgataaccagtacgtagtaagcatttcttaa

SEQ ID NO: 374783 - DNA, 270 bp, Salmonella enterica
atgaagagtgaaatagtaaaaaaagttatggcagaaaaacgccgtatgaccataggtcaattaacagacaagcttattagcggagatttacgccgtgaattaggcatggataaaacagaatttgccgagttggttaatgtcatgcgctcaaccattcgcaggattgaagggcttgaggctacgcctcgtatgagattgatatttaataccgccgctgcgttacgtattggcatagatttcccgattatcgaagaaaagacaaagaggtag

SEQ ID NO: 374784 - DNA, 264 bp, Salmonella enterica
atgcgtcgttacatcattacggataaagatattttcgacgctttccagaggtggacaagcccaaaactgaaagaacagaaaatgcataccagtttcattcgtgaggccgtgtgtcgtattcaccctgacaaagtaattctccagtatgacattcgccagaagttaaaaaatatggcttcgcgtggactggtaacggaggttcgtctaagcccgaatgcaacagcctggatgattactaacggtgatttgaatggacaaaattaa

SEQ ID NO: 374785 - DNA, 366 bp, Salmonella enterica
atggacaaaattaagaccagaagaagcgaacgccgtttatcccgtgaccttatcgaagaagcattaaggctggtggctgagcgcagcgaacgtgaaggggtgagcaaggaaacagctaagcgccatgcgtcggccattcgcggggtgattccagcgctgggtgttgttaagagcaaggtaattaaaccgggtgtatgggtggctttatatgctcgcaacgattcaacatcgacggtaatcagcaacatgaagtttaccgccgttatttttgagtgggcgggacaacaggattatgaggatgcagctttttacgctgctatcgcgaatgcgatccgtaccgcactggcagtaaggggggataaatga

SEQ ID NO: 374786 - DNA, 636 bp, Salmonella enterica
atgacaatcgacaaacaggcgctgctgggtcccgataaacactcaaatcagcacaaactttctcgtcttatcgctgaggcaaatagcgctgagattcgtgatatagcggaagccgtcgagcagtacaccgaccagcttattgcggcgttggaagccgcagagaagcggattgctgaacagcgtgagtattacgaaggtgttatctcggatggaagtaagcgcatagcagaactggaggctagccacagcaaactgcgcgacacgatagctaccatccacaacacaatccggatggatggcggctatacaccactggcagcaatccttaacgctgctaaacgcgcatatgaagaatcagcaagtgccgctggcattggcgtgaagcagcaggaagatagcgtcgattctgatgtaggtagcaggaatcagcctggtatggttgttgcggttcatatcggcgcaggtgactttgtgaaagtcaaaggacaggtgtttgaggtcgaggaaaccgactttgacgaccacgacgttacattatggtttgttggtggcaacgcattgaaatgtgccgctggttgtccggttgaggtggtatctgcgccagttgccgctggcatcaaggttaagggggagtga

SEQ ID NO: 374787 - DNA, 801 bp, Salmonella enterica
atgaccactatcaccaataacaaattaccagaatggcgcaaggcgctgaataagtccgtagaaaactatcaatctatgcgggcttggtatgaagaaaacccggataacccatcagccgagcaggatatggacgcggcggcgggtgagattgaaaagttgataaaacaatacggggtgctcatcgtcttaaatttgctggatgagatagacgagctacaggaactccaccgctcctgtctggcgttgcgtggcgaaatagaggacgtacaggagcaactgtatgaggctgaaaaccgtaacaatgctgacaacgaggagctacaggaacgccgcaaggctgataaccaagagccagccggataccacgtcatcaaagagtgcggacgggttggctgtagtgttgcaacgcttgaggaagctgagaaaactcgggatttctggaataaaaaatggattatcaagccgtatttctacgccccaccagtgcaggaaacaggcgtttacaaggatatgctcaatatcatcaacctgctggaaaacaacgaatgggccgagcattgtactggtacagttttaggttcactcctggaatcagaaataacgcgtttggttagtaaagagcagtcagcgccggtagtgccggatgactgggtaatggtgccaaaggaaccaacgcgccaaatgatggctcaaggtcatttcgccatgaaaggtacagaccggggtaaatttaggcgtatttatcaggcgatgataactgctgcgccagctttaaacaaaggtggcattaatgctgagtga

SEQ ID NO: 374788 - DNA, 879 bp, Salmonella enterica
atgctgagtgatttgttgattatggttgaccgtcgcgctaaggcggtcagtttgcgcgaaaaaacaatcatcaacgagcgtcacgctgtcagaatgctagagccggttctttctttaggggtgcgtgctgcaagtgtgccagatacatgggtaaggtatgccgacagatgcattgataatggtctggcggcgtccactgttcgccagcgaattgattgtgttgctgctgtagttgcctgggtgattcatgctgatatcaaattcaaaccagccgcgcccggttcattgggtagaatgctggaggctatgcgtaccgcagcaagagtgattggtaagaggattaagcgccatcgagcactaagcaggccagcccgtataagtgttgatgaatatgccgccgttgttcgtgatatcgaatccctacgcgaaccatacagaacagccacgagactgatgctgtgttttggattaagggcatcagaaacactttcactgtctcgtaattcacttatcgcaagtggtaggttgtttattccagaccgttgcacaaagacgcattctgacctgcttttgccgcttccagttaagtatattccgctaattgatgaatggttaggtgtaataggggagtcagaaattaaatacaatacgttggtaactacgatttctcgcgcgggtataaagtggcgttgccatgacttgcgaaaactattccgcacttctgctgctgttcgtggtgaggattacctcgcaactgaattaatcctcaatcatgcagtcaaagacgtgcctagtgtttatttgcaatcacctccatttgcatcaatgagaaaagtattaaccaactcaatagaagaatatttacaggtcagagggtag

SEQ ID NO: 374789 - DNA, 258 bp, Salmonella enterica
atgtcaaagtcagcgataaaagataatgatgtaatgtatcaaaagaagtatccaagaaattgtctgtttaaattacttcaattgcgcacaaacctgaaagcaaaacctgatatttaccgtgtagaaatgattaaccgtaaaggtgaaaatatattgatgggaggccgtaaaacaacacaggaggcaatagcgctttaccaggatatagcaacgttgagcgcggcagaggtagaaatggctttcagtagcatggtgtaa

SEQ ID NO: 374790 - DNA, 954 bp, Salmonella enterica
atggcttacgggcgtcaattcgagataaccgttaattgcacagatggcgagacgattcacatcactgatgtagatgtggatttttcgtctgtgcgtgacgatgaaaaagaaccgaacgaagctgagttgaccatgtgggggctcacgcctcagacgcagaatgcaatcgctcaggctggctctaccgtcagcgttgctgctggctatatagatgaaggaatgttcactctttttcagggggagctaatcagtgccgtcaccatcaagcctaacgaggtttacggcctgaaaatgaaaatttatgaggcgcttattccattccgcgccagcgtaacatcgcgcacttttcgaaaggggcaaaaccttagagaagctgtgctgctggttgcgtcagatatggggctagggtgtcaggtttcgaaagccgctgctgcattagtgctgcctaagaatatcagtggtgtcgcattatcccgcgatgtgctgaacagcttatgcaagccagttaatgcaacatggtcaattcaataccagtcgatagtcgtcactgccggtgattcagttcttaatggtgctgctattttctcacctgaaacaggcttactcggtgctccgtttttgaaaattcactcaccaaagcgcaccaaaaaaaagaacccatcagaaaaagaccaaatccagaagaagcacgataagagcataactacgtataaatggcccccaaaaggctcgcaggttgattactcaaaaggcgctcgccgccagatgggggttattgaagctattacttgggagtcgcttttacgtggcggcgttgagattggcgaacagatagagcttacgtctccttcaatgggtgaaggatggaacatcattgttaagaaaatatcccacagattcagtacgcgtgaccgtcaggcatggtcaacatcgtgggagggaatcattgcatga

SEQ ID NO: 374791 - DNA, 711 bp, Salmonella enterica
atgaggccgggaagtcaggttactgcaatcatcgagcaggcgcttaattcagcgctttttgctcttgaggctgtgattgtatccgtatacgaagggcgtgcaacggtcaggccaacacctaagcgcttatttggcgacaatccagatcctgttgcttatccaattgttgaaaatgtgcgccttctttctctggtctgggattgcggtaagtccggcatcagcggtcgagttttacccggtgatgagtgcttattaatagcgctgtcccacggcgacggtgacgaaccagaccacaaaaccttctcaaattccgtcgctctgtgcggtttctcagataaagccattcatcagatgccagatagtccaggtattcgtgttttcagcggaagcgccttcattgagtgggatgacggaagcattaaaggcgataccgggaagggcgcaacattcacatttgcgggcgacaaaatgaccgttaacgctccgggcggcatcgatatgaccgcaccaatgaccactatcaacggggatttaacgatttctggctctatcagtcagggggctaaaggcggtggtaacgctgaatttggcggcaacgtaaaagtaacaggaataagcgaagcggctgaccatatcagcagcggcaagtccggtaaatctcataaacacagagaaaacggacagggcaacctttccgatgaaccaacataa

SEQ ID NO: 374792 - DNA, 378 bp, Salmonella enterica
atgaaattgaatgatgacgcggcgcaaattgcgctttcaaacaaaggctttctgatggctggtgattacagcactaccatcagcaaaggcgagattatcaacgtcactgagcgtaccgggctcatcgtagagagagtcgagtgtattccactgattaatgcacctctttatatggttatggcgacatgtcgtgaatctaaagaccagtacatgccgttctactgcgatttgccatttgaacttcctcatcatgcagctatggcgcagatgctgaacgacgcgggagaaggtttcgatcttgatgacctgctggatattgaatcacttgatgcggcggtaacagtagttcacgttgagaagtggatgcatacagaatga

SEQ ID NO: 374793 - DNA, 348 bp, Salmonella enterica
atgctggacattatgcaggatgaagacggggtaattctccgtaacggtgatttcgtactggacggcggcattgatggcattgcgcagcaggcagaaataagggtagggacaaatcgcggtgaatggtggcttgatgaaacgcagggattaccgtggatacccggcatcatggcgtcacgtcttcctgtgtcaattgtttccaatatgattaatgccgaggccagacgtacacagggggtcagcgacgccagaaccacaaccatcaacgatgagaaggggaattacacaattcgctttgcgatctacgttggctcggacagtacagaggtaaccagtggaattagttaa

SEQ ID NO: 374794 - DNA, 1410 bp, Salmonella enterica
gtggaattagttaacaatagtggctggcatggtgtaaggctgcctgagctacggggcgataagtacgaaaaattaaaggcagcattaggtgaggttaacccggacggagattcgcttgtcggacagacgatagcaatagtagcggaagacgacttaaacatcattgaggctattggctgggtgttttccggtttttttatttcaatggcagagggggtgcaattagacgggttgggagagcgttttaatcttcctcgttacgggctaactcgctcactggcttatgttcttcaccttttgcagccggggcaggtaatcaaatcgggagagacgtttactatctcaggtagtgcagggtattgggcttcaaacaacgaaataagagaaaatggcaagacagcaactggttacgtactgagaattcgtaataatgccataacaaccggaaatacctttactatcaatatatcaggtaaaccattttcaactcagtttcaggaaggtgatacatcagaatcgatactcagtcgcctgtatacgcaaattacagcggctgaaacatcgcttacaacatataaatcgtcatatggcacgttactttatgctgctgatggcaggacactgattcagttttcctttgcagatgatgtatttgatattgtcagggctggtataccggcagttgcttactaccagagtgatacagagtttccggctgtattgtttggctatgttgcgactgatgaaattctggtactggcaaacggtgttaaaggctatctcattgaagatgatgagtcttatcgcgtgcgcatacaggcagcagcagcggcggcacgcgttaacatcagcgcatcacgtcccggcattaaaaatgccgtcttagctgtcagtggagtctcttacgcatcagtagaagtaaaccggggtattaataccaacgcagagggaatccccggtaagtcgatacaggtatttgtagctggtggtgatgataatgcaattgcacaggccatttatgatgctgccgccgcagaatgcggttttcatggcgatacgtcaggaattgcaacagatggcgagataacggaaacggtatatttcagccgtcagagtttccagcttgtttacgtcgatgtgtctggcgatttctgggatagcgaaacaactggcagacctacggattatgtcagcgtggcaaaaaacataatcactgcttatttcgcacagcttacgccgggtaaggatgtgtttgctggtcaaatatatgcccgtttgctgtctgcattttcaacactgacggacgtaacggtaaaaatcggcattacatcaccgccagcagataaacatgtttctgtggggagcggcattattgcggtaactgactctacatctgtaacggtggcctga

SEQ ID NO: 374795 - DNA, 756 bp, Salmonella enterica
atggaaccagtaatcaaacgccctgaaaaactggcaaaagaaagacttacgtcaaaagtacgttatcagcggaatattgacttaatcgcagcgttgaaatcaggtaatcgcagcatggttgcagcgattgagtacatgaaaaaagggttttctctggatgattcaacgggagttctgcttgatgcctggggagaacaatacagcatcaaaagagaagggcgcgatgatgatgattaccggaaggtgctgcaacaggccagaggtgaacagagcgtttcgacacaatcaagaccatcagttggtgcatatatgcagcaggtatacgacctcgtctggctaccgttaagccgggttggattaaccacaggtgcgacaggcgctgcttttaatcgtgtgccgctgcgtactgtatttgtgcaatgcggaggtatggctcctgatatcgaattgcctgactctcttgtttccgtgacgtttggcggcgatatctacagtgcggcaacaccgccaaacgttcaactgactaaccatgcgccaatgtttcccggcaatgctttcccttgtgtatgggctggtatcaggtatgagcgaactcaaaagacaatacgggcaacagaatcaaaaggcatccgtatcagggcggttagttcgctcttaacccgcattgacggaacagcaacggtaaatggtggcgagctaattacgccattcaacacactggttacagtcaaacagataaaggtgaaaaatggatag

SEQ ID NO: 374796 - DNA, 231 bp, Salmonella enterica
atggatagctgggctgagtcagacaaaacctataaaggattggggggaactgatatccccaacaaacagaaaccatcgcaggaattacaggccacaggctttgtgccaacttatttcgatgagaatggcaatctggtgtttggtgatggcgtatccgcgcaggtaatgaattttatactcaacgacctgtataaaaaatatcgtaatttattagccagggtgaatgcatga

SEQ ID NO: 374797 - DNA, 240 bp, Salmonella enterica
atgatgaatagttttgcaactgtatcccgcgtctatccttttcgcggttcggaatactccagcaccaaacctccatctatcacaaagcagggtgatggttttaggccaacctacatagaccagactggaggactgattcaaggggataccgttgatttcgccgaactgaattacatttttaacgacctgtacgccaaagctgcgcacattgaccagcttcttacagctaaggggaaataa

SEQ ID NO: 374798 - DNA, 633 bp, Salmonella enterica
atggcattaacaccggaagaactggtagcgatatctgaccttgaaaaagcgacaattaatgattccggcgttgtccctgactggcttatgccagcagaaatgcgcggcagcagtgcgccaataaacagcataccgtatccacaacacaccatagatgtatttggcgggcttcttgctggatcgtggtcattaaagtttcagaatccgttacaacgcgttgtatgcgatttagagatatatcatggtgaaaatgcaccactttcgacaccgcctgatttatctgcgctacaacttaccgtagcaggattcgacaaggttgttattttctgccctgcaaaaacagcgaccgataccgccccggataactacctgaatctggctgtttccgggataacgccaaaatacaagctgggtggaaagcgccgctttctggaacagtcaggaatggtggtcatcccgttaacgatgattttgctgtccacacagccactgactaatcaggaaactaaccgggcgctgtcaattacgctgaaacggaaaaatgaaagccagttgaacaccgcgccagttatcagcggaatggtatacagtaatccattaccgtcagcgcgagatattgcacaggcatcgtga

SEQ ID NO: 374799 - DNA, 270 bp, Salmonella enterica
atgaaagtgacaacgcgcaaaaaaccagcattcagggatttctacgaaaatggcatgttcacacgcatagtggcgaccaaaacggataaagggaagtggcgattgttcggtctgcatcgttcagtcgatgcggcaatcttcgttgaggcggcaaggggaggcatccgggagtgggcagggctaaaccacctgggcgatttctgtgattcgataggaatcacgctttgggaagtacatcataagggagcaaaaaaagaacaggccgcatag

SEQ ID NO: 374800 - DNA, 7401 bp, Salmonella enterica
gtggaggcgaccgatattgcgggcaatacggcgacgcggacgctggatttcaccattgacaccacgctgtcaacgccaaccattgaattagcgccagatcaggataccgggcaaagtaagaatgataatctgaccagtttaactcagccggtttttgttttgggccatatcgataatgatgtccaaagagttgaattacagattgagcataacggtacatttaaaaacattattttaaccgaatcggctgatggatggcgttatcgacctgacgcggcattaaacgatggtagttataaattgaccgtgacggtaactgatacggcgggtaacaaaacgacatccgctcctttaacggtaacgatagatagtacgttgagtaccccggtaattgcgttggctaatggcgaagacagcggcgtggttggcgatcagcttactaaccacgatcatccggtatttgacttgagtcatattgattctgatgccttgcacgttatggtcagggttactcataacggtagctctcatgaggaagcggcggtatttaacaatggtaaatggcgtttcagtccttctgtgagttgggcggatggcttatatcaattagctgttgttgtagaagatcgggcggggaatgtaaaagaatctgcgccattagatgtccgtattgatactacgaccactatcaacaatatcgtgttgcttaatgacactggcgttctcggtgatcaattaacgaataacgctaaaccatcattcagagttgaggttcctgcggatgttgcccagatgcgcgctactcttgatggcggcacaacctggattccgatacggcgaaatgcggatggacagtggatttttgcaagcacaaataatctgactgatgggcaacatacgcttcgtatcgaggctacagatacagcaggtaacgttgcgagcaaagatttagtctttaatatcgatactcacttacagattccgacaattgctttgggggccggacaggatactggagcgaatacttccgaccatattacgaatatttcacggcccacttttgttattggcaatgttgatgccgatgttattaaggtaatggtaactattggtaccaatacttataacgctactaaagtggggggggcatgggagttcagaccggataatgcgattcctgatggttcttataatgtgagcgttactattgaggataaagcagggaatatagcgacatctcaaccgttatctataatggtagatacgagagccgaaattaatagcgtaacgctattaacagatagcggtgatagctcttcagataatataaccaacgtaaacaagccgcagtttgaaattgtggctgctaatgatactgtacaggtacgcgttaaaatcgataatacgggtaattggattgatttaacgcagagtgttgaaggacactgggaatttaatgtaggaactgcattacctgacggtcaacattcactattagtggaagttgtcgatgttgccggtaacgttgcacaacaaacgcttaattttacggttgataccacgctgcgtgagccaaatattgtgcttgaccctacgcaggatactggcgatgacagtaatgacaatattactaatattaataagccgacatttattattggcaatgtggataatgatgtgtcacatatcgttattcatcttgatggtcgggattatatcatcgaaaataatggtgctaaattaacatttacaccagataagccgctgacagatggtcatcatacgcttactgttacagtgacagatattgcgggtaatacaaaaacatcatctgaactgcaggttgaaatagatacccaggtacaaattgacagggtttcattaacaaccgatagtggtgttaatgatagcgatagaatcactaatgttgctcgtccatcgtttaatattgtaacacctgatgatgtgaccaaagtattggtttctttcgacggtgttatctggagcccggcaagtaagaatgcagccggacagtgggactttacggcgggtagcgctctattagaaggtcattatgtactccatgtgcaggcaacggatcgggcaggaaatacggctaattccagtcttgcatttacggtggatacacatgttgatggccttaacattaccatgctggatgatacagggaatgacgcggcagaccgtataaccaatattacatcgccgcgttttgaaatctcagccagagaatcgctacaggttgtaacggtgacgttaaatgggaacgtcaccactctcaacaaagggatgggtaataagtggatatacactcccgaaataccattacttgatggacattataaactagaggtcactgctgaagatattgctggcaatactattaaccaggagatatcgttcactatagatacgactgtacctgtgcctgatgttgatttgttggatgccgatgactccggtgaaagcgctgtagataatattaccaatgtcactaaaccacgtttcattattagtgatattcctaccgatattgacactgttacgataaaaattaacggtgtctcttatcctattactctggatggcagtaacaccgggacattccaggttcctgtggcgctaaaagatggtgtctacgaagcggttgtcgtcttcagagatcttgcaggtaatatatccgagacgaaactaccatttaccattgatacggcaacaagtgttagtgttcgaatggatcccacatcagatacgggaagttctaatagtgataatctcactaacagaaaaagtcctaaattcggcggtactgcggaaccggatgcaaaacttgttattaccattatcgatgatacatcaggtcatgaggtgttgaaaaaactggtcacggttggtgttgatggtaactggagtatgacgccagatgccctggcagatggtatctacacaattaaagttgtctcaacagacgttgcaggaaatacagcggaggcgcaagatagatttactatcgatacggtaacgcccgatccaacaattcagcttacggattcatcaattgatgatatgcatgaagctaccagcctgcgacctgagttcaaggggatcgctgaagcattctcaacgattatgatccagtgggatggcaaagttatcggctcagccaatgcgaattcgaatggcgaatggagttggactcccccatcaatattaacaccaggttcttatgtcattagtatcgttgccaaagataaagcgggtaatgaatcgtcacaagttgactttccagtcgtaatacctgttattgatgtaacccctcctacgattaagctaagtgatgatagtgatagcggggcattgggggactttattactaacgataaaacgccgactcttattgggagcacattacccaatactattgtcagcatttatatcgacggtaagaaagttggcgaggcaacatcggataccgcaggtcgatatgccttccagatgcaggaacagcctgacgggacgtacgttgtggaagttggtatattaaatccacgcgtcaatgaagaaattcgctcagcagccgttagcctcgttattgatactcaggtcgctgaccttgaatggcatatatctgggatacatgaagacaaatatattaatactgtaacgccggagattagtggcataagcgaaccaaacagtaaaattacggtttttgttaatggggttgaaaaggctgctgcttatactactgcaggcgggcattggggcgttatattacctactttagggaatgatggtaattacgtattaacgttcaaagttgaagacattgcaggaaatgttaaagaatttggtcctcaggaaataacattggatacggtaattgaaccgttaacagtgacactgcgagaagttgatgattcgggtaaactgggagactggatcaccaataaatcacatgtaaatatagatggtactgcggaggcaggaagtaccttaactattaaaactcagggaggagtcgttgttactacttttgaagtaggaagtgatggacattggagtgcagagttagatctgagtaacggtaataatatctttgttgttgagtcagtagataaagcgggcaatagtcaacaaaaagaacttttagtagaatatgacacgcagatcgaaatcagtgctatttctttaagccgagatagtaatagtggtgataaatatgatctcattaccaacgataaatcgccagagctagtcgcaatgaccgaacctggagcaacagtacaggtttatattaatgatgtattgcaagctacggtagaagctaattctgcaggtaatgttagttataccatgccagcgaatagcgccgatggtaactatcatgtgcaatttgttgctaccgatatagccggcaaccgaactgaatctgctgttgcgacagtgacgatcgattctgaaattgctgtgtttactattgatgaaggttcattaccgactatatcaaatagtcgggcattatcagtcgctgggcaaggtgaggcaggcgctcaggtaagcatctttgtcgataataagctggtcaatgtggtcatggttgaggctgatggttcctggcgtgctccgatattgctgcaagatgatggtacgtttaagattcatttcagcattactgacattgctggaaacacccaggcgagcaaaaatttcagtgtcgatgtcgattcatcaaccgaatttccaacaataacccttgaagattcgagtaactcaggtctggttgacgatctgattactaatcataatacgccatcctttgttggtactgcggaagcgggtgctacaatccatttttatgttgatgaaaaaattgtggcaaatatcctcgttcaagatgatggaagatggtcatatcaatttgataattctctgaaagatggtgaatactccattcgtgttgttgcggaagataccgctggtaacagggcggaatcacctcgcttaatcgttacgatagataccagtacatacattgaacctcctacgctgacagcgggatctgataatggtatgtatattaacgacggcgtaacaagtcaaaccagacctcagtttagtatcaacggtgagtttaaccagagtgtccaaatttacattgatggcaagctagtcgatacggtcactgtgacagacagaaaccaggtttatcaacctgtggctccattgggtgacggttctcataatatttattatgtcattaccgataaggcaggtaacactgcaacatctaaaacactagatttttcaatagatacatcgaataaaacccctgtggtgatagagtccattgatggtcatacactagcggagatgaccggcagcgatggtaaaatatatataacagatactactcataatataatttttcgcggaagtgcggagcctgatagtttaatggatttaactatcaatgggctaaacgtaggccaagttttggttagtaagacaggagaatggcagatgccagtcaaccctgtttatctctctcaaggtcttctggagataaaaataaaatctacggaccgtggaggtaatgtaaacgagaaaagtttctctatctgggtggacacgatgattgaggactttaccagtgaacttgatgacaataaatcatcgtcgcaaaatgactggtggagtaataatacccttatcactatgagaggtctgggggaggctggcgcgacggtatcactagtgctggcaggtgtcacattggcaacgacagtcgttgcggctaatggtcaatgggcattattgaccgatcagcttccggaaggaaaatacgatatcactttgagtattgaggacaacgccggaaacaggaaggaagagatccgtgaaatattcatcgatcgcgctgcaccggtagcacctgctataacatattcggacattgtcgatgatctcgtcattatgaaagggacgggcgaagcaaaatcaaaattaacgataactgatagcgagggtaatatatatacattaaccgttcctgataacgggaactggagtatggctattccctatccatcagaagggaaatttactatatcgagtacagatcgaattggtaacaccagtgatgttgtctctgtcgatttaataagagagataccgactatttcgttagcggtagattcgaatagtggttctaaaaatgacaatattacgcaagataaacaacctacctttattatcggaaatttagaaagcgatatcgttaacgttcaaatagatattaacgggatagcatataatgctgaaaaaagagcggatggcgtctggttctttacgccagatatagctttagctgatggtacctatacgatatcggtaactgcgaatgacgcggcgggtaatcagaaaaactcgttaccgattactatcacgatcgacagtacgctgaaggtgccggagattgcgctggcggcaggtgaggataccggcgcgccagacagcgataacgtgacgaatcacacccagccgaagtttaccctgcagcatattgacgcggatgtgaccggagtgaccgtcagcgtggcgcataacggaaccaccgacacctatccggtcacgaagggggatgatggctggagcttcagtccgtcagcagcctggagtgatggtaactacacgctgagtgtgacggtggtggacggtgcggggaacacgcagcagtcatcatcgctgacggtgacggttgattctactataacagcgacagcgcctgttgaggcaggcgatgttagtgagttcgccatggcaaccgatgtagctcaaccggaatctgaaatggtcagcattgaaagtgaaaaaaatcatagcccagctatgttttcaatgatgtctgcggttggagaagtggctgcgcaggaggatgcctataacatcgtattattaaataccgagtttggtgatgtaactgaacgttctattagtcagacaccatcttttgcaatatcagtacctgataatattgtgaatgttagtgttatgttcgaaggagaagagattgatttgccgattaataatcagaaggcaatatttgaggtgccagtacctttgaatgatggtgagtatactatagatgtgaaattcatcgataaagatgctgattatctgattaaggaaaaaacattctcagttgatcattcttcggcagatatagttaattccatgggtgaaagaggcaacaccgaggatgaagttaacgtctcagccccagaaagtgctgtaacacaccataataatggtgctgttgagatattcactattagtgaagtaagtctccctgtagataatcaagaagaacacgcataa

SEQ ID NO: 374801 - DNA, 2067 bp, Salmonella enterica
atggatacaaagctagaaccatattatttaagtgcagaaaatgcattgtctatagtttcaaaaaaattcaatataaaaatagacattaaagaggaagatataaatattcgatttaaaaaatatgatagaaataataccgatgactcaatacaaatgaagaattttttcttgtcattaggactttctttacaggatatattatttagtagtggcgaagatctattaaatgaacctatgcccattttactactgacccctgaaatgaaatggatggtatgtatcagcggtgggcaaaaaattaaattagtaaatgcccgaggggaactgtgttatgtagagatacctgatgagtatctaaaaaaactatctgcatttagtatacttcccttaaataaagttgttgatagtataagagtgaataatattattaaaaactctttatcaatgaacaaggttttttatacaaaatactttttttcatctttgtttatggcaatttttgcgctgacaattccagtttttagtaatttgttttatgacaagcttattccaagtgcttctgtttcgtctttatttggtgtcgctattattgtagctgtatttatcgtttttgagtttattctacgtacgtcaaaagatatttaccaatctataacggccagacaagatgacgtcgatattgatatctcgtttctcgaggcggtgctttatggtaaaaagaaaaacggtaaatcaatgtcatcagcatttgttctgtggaatgagtttcagaaggttaaacctattttattgaattctgtttttcaacgtatagccgatatcccaatttttttgatatttatcgctgttatttatgtgaatttaggatgggtagtggttgttcccattattgtttttataatctctattattttgtccattgttaaccatcattataccaatgagttgatgaataaacaaaaagaaggccaaaagaacagaaatgttttcatatcggaagtgtttttatcaattaaaatgatccatacattaaacaatcagggcttactatttgattgggttaatacatcaaacgaacagtcatatcttaatcttaagataagaaagctaaatcttatctatcaatcaatattaggaagtatgtcatctattactcaaataacaataatgataatagctttttttatggtaattaaaggtgatattaccactggtgcaattgtatcttcagttatcgtttctggacgtatctcggggatcacctccaacttttcatctacattaatctctatattgtcagcagaaaaaacgggtaaggacttgctttctttctttgatgaagatcaggaagaaaagacaccagcgttacagtcaatttcaaagtgtgagggtgagatttctattcgtggtgttagctaccaatatgatgcgcaatcttcagttattattaaccgtttatctatagacattccttccggacaacgagttgcaattataggtgattgtggcgcagggaaaagttcattattggggctgttatctggctacctttcacctacagatggtgccattttgtacgatgggtataatctagggcacctctcccagaattttttctcacaacatttaagtgtcgttacaacccatgatgttttgtttactgggactgttgaaagtaattttgcattaaaaccacaaaatgacaggggacgggtattgaaagctcttcatataacgaattgtggtttcattttacagcatcctatggggttaaagtttcctgtaaactttatggctaaaaacctttcgtctggccagcaacagcaattattattagctcgtagtttaagtagtgatgctagtgtgtttttgtgggatgagccaacatcaaatttggatgagaacacagaaaaacaaatttttgataacctggatgagtttattcaagggaacacactcattatgattactcaccgtcgttatcttataaaatactttgatagagtattggtgatgaaagggggaaaagtgattcgggattgcactcctgaaaaattaatgggttaa

SEQ ID NO: 374802 - DNA, 891 bp, Salmonella enterica
atgtctaaacaaaatgagcattttgtaaaacaagtttcaacaggtatttttgacgataagatgacaaaccttgaaatatcgttacctttttgtttttttttatacactaaggatagacctttttatatatctttcagtggtgacatattaaaaatcaataaagggcaggcgatttttataaaaaagtctgttcctttctctgtattgttgaattgggggaaaatggaaaatggactcgtacgtaatgatattgtgtcgttaaaaatacctcagcaagcaataatagagtataatcgacactatatttataaagatcaaaatgaaccaagggcttgggcatccaatgattatatcataatcaacttttcacatgagcaaactaaggattacacattaattaatgcattaattgaaagtttcccagtcacagcaaccggagaaatattatatgatcatgtcgatgaagcaaagtacatgctaatattatctttaatcaagcaaaaaaatgcggcattagaagatatgattttatcttactcttccttaacaacttcggagaaagtagccagcttaataatgagcgattatagcaaaaattggcaaagtaaagacctggcaatgcaaatgaacatgagtgtatctacttttaagaaaaaaatgtataaggataccggttctgttagttcttacataacaaaaataaaaatgattgaagcattacggcagttaagacgtactaaccgtccaataaattctatagctatttcccttggctatacatcatcttcttactttaccagtgtatttaaaaagcacttcaagatttttccttcggaggtaaggaagaatgatggtaacccgacagaaggtagtactgaaaattatccttga

SEQ ID NO: 374803 - DNA, 669 bp, Salmonella enterica
atgaaagacaaggtgaataaaaatatccattccgctaccagcagtcatatttccacgataggtatgaccgcgaattgttctggatacacaagatccaataaaatagtggttattggcccctgtgaagcggaagtaatcggcattatagcattattacaacacgatggctttcaggtatgtcaaggaaaaggggttaagttggatgctggcgatttacttatagtcactttgagtaccgttccgctactaggttggtggagacatctggaatatcttcatattttaaaacgtaaagggaaatatcagatgttggctattattccaactgatttgaaagaaatcatgttacgccagagtatctgcccaataattgaggggggagaaacactggcccaactacataatgctttactcgtagcagcagaaacatggaaaaaaggctccctcccaagaattaaccggagaaaaaatactccagaccgcaagttaacggcagggcaagcccgtgcaatatataatcttcttgaaggggaatatatcgacagtaaaactcaatatagccaacgttatcttgcccttgaacgtcttggcttttctggaacagcgcaattttcattatttacagcaggaattggtaacgtaattcaacgtcataattttattttttaa

SEQ ID NO: 374804 - DNA, 267 bp, Salmonella enterica
atgctggcgccgcctgaattgaaaaaagtgcatccgctgggcaagtcgtcggttatcgaagaacacggtatgattattgcggagtcgggcgtcatcctggaatatttgcaggaaacttacgacggtatcgggcgctttaagcctgcgaatgcgcagagaaaacaacattatcgattctggctacattacgctgagggggcgctaatgccattgctactgatgaagctgctctttacctcgttttgggtaagccgctggtgccattag

SEQ ID NO: 374805 - DNA, 306 bp, Salmonella enterica
gtgccattaggcctgcgaacgttgggcggcgtcatcggcaagggcgtgcaaaaagcgtacatcaatccgcaactagaaatccaagcgcgttttattgccgggcatctggcaaatcacccctggttcgccggggagcagttaagtatggcggatattcagatgagtttcccgctgtttgcgctgcttgcccaaggcgggatcgctaatctcgaccatatcggcgcatggaaagcgcgggtagaaatgcgtcctgcccggcagcgagcgattcagcagggcggtccgtttgctatccccggtgaataa

SEQ ID NO: 374806 - DNA, 459 bp, Salmonella enterica
atgatgtgtaagttaatcacagcgttgccggatggcgtcgcggacgccttatccggcaaaacgcgtttacttttcatctgtgtcttgtttttcttcgctttcactgcccatgctcaggtggtggacacctggcgcttcgaaaacatgcaacagcaggaaaaagccctgcgcattgccagccagctacgctgcacgcagtgtcagaatcaaaatttactggaatccaatgcgccggtcgcggtcagtatgcgccatcaggtctataccatggtggcggaaggtaaagatgaagcggaaattaccgcctggatgacccggcgttacggcgattttgttcgctatgatccgccgctgaccgcgcaaacgcttctgctatgggcgctgccgtgtctgatgttgttgctggtgggtattattctctggcgagccggcatttgtcagcgtacagagaaggagtaa

SEQ ID NO: 374807 - DNA, 621 bp, Salmonella enterica
atgagtttgccagcgaacgtcacgacgccattacgcccgctacccgtaaagcgtctggcggctgcgtcggtgttgatggtggctgcctgcgtcggtggctatatgttgacgccgaaatggcaggctgtgcgtagcgagcatcagcgtctggccgatccgctacgtgactttacgaacccgcaaacgccagaggcgcagctttccagactgcaagaaaaaatccgcgccaatccgcaggatagcgagcaatgggcgcggctgggcgagtattatctctatcgcaatgcgtatgacaatgcgctgttggcatatcgtcaggcgttgcgtctgcgaggagataacgcgcaacttttcgccgcgctggcaacggtgctgtattaccagtccgggcaacatatgacgcctgcgactcgtgaaatgattaacaaagcgttagcgctggatgcggcagaagtgaccgcgcagatgctgctggcggcggatgcgtttatgcaggcggattatgcgcgagccgtgtcgctgtggcaaaccttactggatgcaaactcgccgcgagtgaaccgcgcgcaactggtagaggccattaatttggcaaaattgttacaaaatttgcagaaataa

SEQ ID NO: 374808 - DNA, 1440 bp, Salmonella enterica
atgattcgaacctcttcacgcctccttctttgctgcctgcttggcagcgccacagcgctttctggctgtgcgcttattcgcgaagataccgccgcccatcagcagcttcagccggaaaatagtcaactggccaatgatattcatctggcaagctccggctggccgcaggcgcagtggtggcgacaattcaacgatccgcagctcaatgcgcttattcagcagacgctatccggctctcatacccttgccgaagctaagctgcgtgaaaagaaatcgcaatcacaggcggaattgctggaagcaggatcacagctacaggtcgccgcgctgggtatgcttaatcgccagcgggcatcggcgaatggctttctcggcccctatgcgctggacgcgccgaagctgggtatggatggcccgtattatacggaagccaccattggtctgttcgccgggattgatctcgatttttggggcgtacatcgttccgccgtcgctgcggctatcggcgcgcaaaacgccgcgcttgccgaaaccgctgccgtggagttgtcgcttacaaccggcgttgcgcagctttactacagtatgcaggccagctatcagatgctcgatctgttacagcaaactcgtgatgttgttgactacgcgatacaggcgcatcagagcaaagtggcgcacgggctggaagcgaaagtgccctaccacggcgcgagggcgcagatgctggcggtcgataaacagatcgccgcagtaaaagggcaaataaaagaaacgcgcgagtcgctacgcgcgctgatgggagtggaggcgatgccggacatcaaatccgcttcgctgccgcaagtcaataccggtataccttcaacgctctcttatgaactgctcgccagacgcccggatctgcaagcgatgcgctggtatgttcaggcgtcgctgaaccaggttgacgccgcccgcgccctgttctatcccagctttgatatcaaagccttctttggcctcgattcgatccatctggatagtttgtttaaaaacaccagtaaacagatcaactttattccgggcttacgcctgccgcttttcgacggcggacgtcttaatgccaacctggcaagcaccagggccgccagcaatatattgattgaacgttataaccagtctgtactcaacgccgtgcgcgatgtggcgataaatggcgcccgtctgcaaacgcttaatgatgagcgcgacatgcaggtacagcgggtagacgccacacgttatacccaggcctccgccgaggcggcgttaaaacagggactgggaagcagactacaggccaccgaagccagactccctgtgttaagtgaacaagtttcgctgctgatgttggatacccagcgcattattcagagtatccagcttatcaaatcactggggggcggctatcaggccgcatga

SEQ ID NO: 374809 - DNA, 2025 bp, Salmonella enterica
atgaacgcgcttaattacctgccgctatcggtcgttaaattgctggctttttttcatgaggagcttagtgaacagcgccctggccgactcacacaggtaggtcagttgtggatcggttgtctactggtcgtactgatctctatgacctttgagatcccgtttctggctatctctctggcagtgttgttttatggcgtacagtcgaacgcgttttacaccaaattcgtggcaatcctgtttgtggtcgcgacggtgctggaaatcggcagtctgtttctgatctacaaatggtcctatagctatccgctaatgcgcatgattatcgccagcgcggtagtgctggtttgcatgtttatgatgcgtacccaccgtctggggctgctctttttcgctgtggctatcgtcgccgtatacgggcaaaccttccccggaatgctcgactatccggaggtagtggttcgtctcacgctgtggtgtatcgttgttggactctacccaacgctgctgatggtactgatcggcgtgctgtggtttcccagccgcgcggtaactcaaatgcggcacgcgttgtgtgcccggctagacgacgccgttagccatttgttgagcgacgtcgcgccgcaagcggaaaaatacattgagcggaacgtgctggcgctacaaaagctaaatgtattttgcctggccgatgatgccgactggcaggcgcgtagcacgtggtggcaaaactgcgtttccaccgtcacttatctgtacactacgctcaaccgttattctgccgacgccgcgtcgcaatatccggcgctggtgcaaaagatacgaaatgagatcgcttcgctgcaacaggcggtcgcccagggcgaaccctggcagagtacatggtcgctcagcgcgcaagagcgcgtcgccgcccgggcgtgcgggctggaaactatctgcgaccaactgcgccagcttggagagatgtcgcccgatacgccgcctgcgcctgccgccaggccccccgccatgacgccggatgccttcagtaacccggtctacatacgctacgcgctgaaaacgctgctggcctgcatgatttgctacgtcttctattccggcgtcgactgggaaggcattcacacctgtatgctgacatgtattatcgtggccaatccaagcatcggttcgtcatatcagaaaatgtcgctacgctttggcggcgcgctttgcggcgcgctactggcgctgctggtcgccattttcgccatgccctggctggataacattgccgaactgctgtgcctgctagcgcctgtcttcctgctcggcgcctggatagccacaggatcggaacgatcgtcctatatcggcacacaaatgattgtcacctttgccctggcgacgctcgaaaacgtctttggcccggtttacgatctggtagaaattcgcgatcgcgcgatggggattttaatcggcactgcagtttccgccgtcatttatacgtttatctggccggaaagcgaagcggacactctgccgcaaaaactggctggcgcgttaggcatcctgggcaagctattgcgtatcccgcgccagcctgaccctacgtcgcaacggacataccttcagctacgaattggttgccatgcggcattcaatgcctgtgaagagatgggcgaacgcgtcgcgctggaataccaacttagcgccaaagaacgcgcgcgtctgctcgccgacagccaggccgtcatcgatctgggacgtgaaatactctatcgctgggatacgacctggaatagcgctctcccttcggatcacgacgcgcagcaaacgcacgctgagcgcattgcgcaagcattagaacattatgctgccggccttgcgagccgtaccagccgcgcgcctgcgctcgatttgacggtgtcgcccacattacctgaacaggaacaaggtatcgtgcgcctgatgtcttgcttaccagactggacggccccggaacacacgccagccgaaactccgcagcaaggaactaccccattatga

SEQ ID NO: 374810 - DNA, 1032 bp, Salmonella enterica
atggaaagcttgccgaaaaaaattcctcataacaaagttcccgccctggttctggttctgctcgcgctggccgtcatggtgtttgtcatctggcgggtagacagcgcgccctcgacaagcgatgcctatgcatccgccgacactattgatgtggttccagaggtgagcggccgtatcgtcgagctggcggtggtggataaccagcaggtgaaaaaaggcgatctcttgttccgtatcgatccccgtccctacgaagccagcctcgctaaagcggaagcctcgctcgccgcgctggataaacagattatgctgacccaacgtagcgttgacgcgcaaaaatatgccgccagttccgttgaagcgacggtcgccaaagcgcgtgcggcggcgaaacaggccagtgataccctacgccgtaccgagccgctgctgtcggaaggatttgtctcggtggaagatgtcaatcgcgccagaactgcgcagcgcgctgccgaagcggatctgaatgcggttttattacaggcgcaacaagctgccagcgcggtgagcggcgttgatgcgctggtcgcgcagcgcgttgcggtacaggcggatatcgctctgactaaactgcatctcgaaatggcgacggtacgtgctccctttgatggccgcgtggtgtccttaaaaacctcgattggtcagtttgcttccgcgatgaaacccattttcacgcttattgatactgaccattggtacattattgccaacttccgcgaaacagagttgaaggccattcaagccggcacgcccgccgccatccgcctgatgagcgacagcagtaaaacattccaggggaaagtagactccatcggctttggcgtactgccggacgatggcggtatggtgattggcggcctgccgcgcgtatcgcgttccatcaactgggtacgcgtggcccagcgctttccggtgaaaatcatggtcgaaaaacccgatgcatcgctatttcgcattggggcatcggcggttgccacccttgagccgcaataa

SEQ ID NO: 374811 - DNA, 249 bp, Salmonella enterica
atgcagctaaaaaaacgtagcttgctcttttcagccgtattacttacggggtgctcgttgcctccggctattcccattattggcgcctattatcccgactggcttttctgcattattgctggcgtcattctcacgctcgtcacacggcggatcctactacgtaaatatcaaacgccgccgttggcgggcgtcatatataccgccctttttgctctctactccatgctgttctggctggtatttttctaa

SEQ ID NO: 374812 - DNA, 1986 bp, Salmonella enterica
atgaataacgagaagttattccgtttaagcaggacgtttattgctattaccaccgcatctggtctttttattcataccgctttcgcggctgaatcagcaaaagatgccacacaatacactcagcaaattaatcaacagtacataaaaaacctaccgtttagcgatcgtcaggattttgccgatgcgcagcgtggctttattgcgccgctgccagatcacggcattcttaacaataccgatggtaagccctattaccgcgctgatgattataaatttgatatcaacgcgtcagccccgcaaaccatcaaccccagcctgtggcgccagtcgcaactcaatggcatttccggcctgtttaaagttaccgatcgtatgtatcaggtacgcggccaggacatttccaacatcacttttattgaagggaaaacgggcctgattgttatcgacccgctggtcacggcaggcgcggcgaaagccagcctcgatctttactatcagaaccgtccgcatagaccgatcgtcgcggtcatttacacccatagccacaccgatcattacggcggcgttaaaggcattgtttccgaagaagaggtgaagtccggcaaggtgcaaatcatcgcgcctgaaggttttatggaagaagcgataagtgaaaacgtgctgcttggcaacatcatgagccgtcgtgcgctctactcttatggtctgttactacctcatacgccccagggtaacatcggcaatggtctgggcgttacgctcacgactggcctgccgactattatcgcccctacgaaattgatcaccaaaaccggtgaaaaaatgaccatcgacggtctggagttcgagtttctgatggcgcctggcagcgaagcgccggcagaaatgcacttctacatcccggccctgaaggcgctgtgtacggcagagaacgccacgcacacactacataacttctatactctgcgcggagcaaaaacacgcgataccagcaaatggacggaatatctgaacgaaacgctggatatgtggggcagcaaggccgaagttctgtttatgccgcacacctggccggtgtggggcaatcagcatattaacgactatataggcaaatatcgcgacaccataaaatatattcatgaccagacgctacatctggccaatcaggggtatacgatgaatgaaatcggcgacatgattaagctgccgaagaatctggaaaataactgggccagccgcggctactacggttcagtcagccataacgcccgagctgtctataactattatctcggttattacaatggcaacccggcagacctgcacccttatggtcaggttgaaatgggcaaacgctatgtgaaagcgttaggcggctctgcacacgccatcaacctcgcccgtgacgcctaccgccagggggactatcgctgggcggcggaacttctcaaacaggtaattgccgcgaatcctggcgatcaggcagcgaaaaacttgcaggctgacaccttcgaacaactgggttatcaggccgaatccgccacctggcgcggtttctacctgaccggtgcgaaagaactgcgtgagggcgtacataaattcaaccacggcacaaccaactctccggataccatcaaagggatgacggtagaaatgctgtttgattatatggcagttcgcctggatagcagcaaagcggcagggaaagatatcagtctgaacttcaatctgagcgatggcgataacctgaacctgactctggaaaacagcgtacttaactatcgccagagcctgcagccgaagagcgatgcctcgttctatatgagtcgtaccgatctccacgacgttctgaccggtcaggcgaaaatggccgatctggttaaagcgaaaaaagtgaaagtgattggcaatgcagtgaaattggatgagattattggctgtctggataatttcgacctgtgggtgaatatcgttaccccaaattaa

SEQ ID NO: 374813 - DNA, 759 bp, Salmonella enterica
atgagtttgagcattacgctgacaggcaccggcggcgcgcagggcgtaccggcatacggctgtgactgccctgcctgccgtcgggcgcaaatgcagccccggtttcgccgtcgcccctgtagcggcgtggtcaaattcaacggcgccgtaaccttgatcgatgcgggcctccacgatctgacagatcgctggcccgccggatcgttccggcagtttttgctcacccattatcatatggatcatgtgcagggattgtttccgctacgctggggcatgggagcatcgatcccggtttatggcccaccggacgagcaggggtgcgacgatctgtttaagcaccccggtatacttgatttcacctataccgttgagccgtttgtaacgtttgatttacagggattgcaggtaacgccactgccgctcaaccactcaaaactgacctttggctacctgctggaatcggcacacagtcgcgtggcatggttatctgataccgcaggcttacccgatagcacgctaaaattcctcctcaacaattccctacaggtagtggtgatcgactgtagctatgaaccacgctccgtgccgccgcgtaaccacagcgacttaaacagagttattgccatcaatgagatggttcgctgcccgcgggtcattgttactcatatcagccatcactttgatacatggatgatggcgaacaacctgcctgacggtattgaagcaggttatgacgagatggaaatcgttctggagtaa

SEQ ID NO: 374814 - DNA, 435 bp, Salmonella enterica
atgccagtctgtgaattacgtcgcgcaacggcagaggataccgattccgtttacgcgcttatctgtgagctaaagaaagatgaacttaattatcaaacgcttagcgaaggattcgccgctaacttgcaggccccccattttcgatatcatttagcgctttacaatggagaggtggtcggcatgatcggcctgcatatgcagtttcatcttcatcatgcgaactggatcggcgaaattcaggagctggtggtaatgccgcaggcgcgcgggttgaaggtggggagcaaactgttggcctgggcggaagaggaagcgcgtcgggcgggcgcggagatgacggagctttccaccagcatcaagcgccacgacgctcatcgattctatctacgcgaaggttattcgcagagccacttccgctttaccaaaatgctgtga

SEQ ID NO: 374815 - DNA, 555 bp, Salmonella enterica
atggggaaactgatctggttaatggggccatccggctccggtaaagacagtttgctggcggagcttcgtcagcaggaacatgaacagttgcttatcgctcaccgctacattacgcgtgcggcgaatgcaggtaatgaaaaccatatcgcattgagtcaagaagagtttttcattcgcgcgaaacaaaatctgctggcgctgagctggtacgctaacggcttttattacggactcggcattgaaatagatctctggctacacgctggttttgacgtggtggtcaacggttcgcgagcgcatttgccacaggcgcaggcgcgctacggtacttctctattacctgtctgcctgacggtttcacccgatattttacgccagcgtctgcagacgcgcgggcgagaaaatgacgccgaaatcgctgcccgtctggaacgagcggcgcattatccgccttttaactgccatacagttaataacgacgggagtttgctacagtctgtcgaaagactgctcattctgatggggcgtaaggaggaacattatgccagtctgtga

SEQ ID NO: 374816 - DNA, 1137 bp, Salmonella enterica
atgattatcaataatgtaaagctggtactggaagatgaagtggtgcagggatcgctggaaatgcaggacggcgttatccggaatgtcgccgatagccaaactcgtctccccgccgcgctggatggcgaaggcggctggctgctgccgggattaatcgagctgcataccgacaatctcgacaaatttttcactccgcgcccgaaagtagactggcctgcccattcagcgatgagcagccacgatgcgctgatggtcgccagcggcattaccaccgtgctggacgccgtcgccattggcgatgtgcgcgacggcggcgaccgtctggaaaacctggaaaagatgatcaatgccgtggaagagacgcaaaaacgcggcctcaaccgcgccgaacaccgtttacatctgcgctgcgagctaccacatcacaccaccttgccgctgtttgaaaagctggccgatcgcgatgcggtcactctggtttcgctgatggatcactcgccgggccagcgtcagtacgtcagccttgagaaatatcgcgagtattatcaaggaaaatatcatctgaccgacgatgaaatggatcgttttgaagcggaacagagagcattggccgagcgatggtccaccccgaatcgccagtctatcgccgcgatgtgtcaggcgcgtcatatcaccctggcaagccacgatgacgccacttacgcacatgtgcgcgaatcacacctgatgggcagcgtgatcgccgaatttcctaccaccttcgaagccgcacaagcctcacatcagcataggatgaatgtactgatgggcgcgccgaatatcgtgcgcggcggttcgcactccggcaacgtggcggcgcataagctggctgagctggggctgctggatattctctcttccgactattaccctgccagcctactggatgcggcgtttcgcgtggcggatgatgccaataacacgtttaccctgccgcaggccatttgtctggtaacactcaaccccgcgcgggcgctcaggctggatgaccgtggcgtcatcgcgcaaggaaaacgcgccgacctggtgttggcgcaccataaagacgatcacgtccatatcgatcatgtctggcgtcagggaaaaagggtgttttaa

SEQ ID NO: 374817 - DNA, 681 bp, Salmonella enterica
atgattcgcgttgaaaatgtcagtaaaacctttgtattacatcagcaaaacggcgcgcgtctacctgtgctgcaaaacgctacgctggaagtgaaaaatggcgaatgcgtcgtgctgcacggtcactccggcagcggcaaatcgacgctgctgcgctcgctgttcgccaactacctaccggatgaaggacacatccacattcgtcacggcgatgagtgggtggatctggtacaggcgccggcgcgtaaagtgctggaagtccgccgtaccaccatcggttgggtaagccagtttctgcgcgttattccccgaattccaacgctggaggtggtaatgcagccactgctggatctgggagtcccacgcgaacagtgcgccgccaaagcggccagcctgctcatccgccttaacgtgccggagcgtctgtggcacttggcgccatcgaccttttccggtggcgaacagcagcgcgtgaacatcgcgcgcggattcatcgtcgattacccgattttattgctggatgaacctaccgcctcgctggatgacaacaatagtgccgccgtggtagcgctgattaccgaagccaaagcgcgcggcgcggcgatcgtcggcatttttcatgacaaggccgtgcgcgaccgcgtagcggatcgtttgcatccgatgggaataacagcatga

SEQ ID NO: 374818 - DNA, 759 bp, Salmonella enterica
atgacgcaaccgctgctttcagtcaacaacctgacccatctctacgcgccgggcaaaggcttcagcgatgtctcttttgatctgtggcctggcgaagtgctgggtatcgtcggggagtccggttccggcaagaccacgctgctgaagtcgatctcttcacgtctgacgccgcagtcgggcgagattcgctatcagaaccgttcgctgtatggaatgagtgaagccgaacgccgtcgtctgctgcgtaccgaatggggcgtggtgcatcagcatccgctggacggcctgcgccgccaagtctcggcgggcggcaatatcggtgagcgtctgatggcgacgggagcgcgtcactacggcgaaatccgcgctaccgcccggcgctggctggaggaggttgaaattcccgcctcgcgcatcgacgacctgcccaccaccttctccggcgggatgcagcaacgtttgcagattgcccgtaacctggtcactcaccccagtctggtatttatggacgagcccaccggcgggctggacgtctccgtgcaggccagactgctggacctgctgcgtggtctggtggtggagttggatctggcggtagtgattgtgacccatgatttaggggtagcccgcctgctggcggatcgtctgctggtgatgaaacaggggcaagtggtggaaagtgggttaaccgaccgggtgctcgacgacccgcatcacccgtatacccaactgttggtgtcatcggtattgcagaactga

SEQ ID NO: 374819 - DNA, 849 bp, Salmonella enterica
gtgaccactaatctctctggctacaactttgcctatctggacgagcagactaaacgcatgatccgccgcgcgattttaaaagcggtggcgattcccggctatcaggtgccgtttggcggccgcgaaatgccgatgccttacggctggggtactgggggtattcagctaaccgccagtgtgattggcgaagcggacgtgctgaaagtgatcgaccagggggcggacgacaccaccaacgcggtgtctatccgcaacttcttcaagcgcgtcacgggcgtagctacgacggagcgcaccgaagacgcgacgctgatccagacccgtcatcgaatcccggaaacaccgctggcggaagatcagatcctgatcttccaggtgccgatcccagaaccgctgcgctttatcgaaccccgtgaaacggagacccgcaccatgcacgcgctggaagagtacggcgtgatgcaggtgaagctgtatgaggatatcgcccgcttcggccatatcgccactacctacgcttacccggtaaaggttaacgggcgctacgtcatggacccgtcgccaatcccgaaattcgataacccgaagatggacaggatgcccgcgctgcaactgttcggcgcgggccgagagaaacgcatctacgccgtcccgccgtatacgcgggtggaaagcctcgattttgatgaccatccattccgcgtacagagctgggacgaaccctgcgccatctgcggttcaactcatagctatctcgatgaagtggtactcgatgacaccggcaaacggatgtttgtctgttccgataccgactactgccgccaacagagcgaggccctcaataaatga

SEQ ID NO: 374820 - DNA, 1068 bp, Salmonella enterica
atgtacgtcgctgtcaaagggggcgaaaaagcgatagccaacgcccacgccttacaggagaaccgccgccggggcgacagcgctatcgccgaactcagcgtggcgcaaatcgagcagcagatgggcctcgccgtagatcgcgtgatgactgaaggcggcattgctgaccgcgagctggcggcgctggcgctgaaacaggccagcggcgataacgttgaggctatttttctgctgcgcgcttatcgcaccactctggcgaagctggcggtgagcgagccgatgaataccgcaaacatgcgcctggaacgccgcatctccgcggtctacaaagatattcctggcgggcagttattaggcccaacgtatgattacacccatcgtctgttggattttacgttgctggcgaatggtgaaacgccgccgctacgcaccgccgataacgcgccagaagccgctccgcacgtcttttcactgctggcgaatcagaacctggcgaagcgcgaagaagataacggcgcagagccggatgatatcacccgcacgccgccggtttacccctgttcccgcgcctcgcgtctgcaacagctcatgcgcggcgacgaaggttacctactggcgatggcttactccacccagcgcggctacgggcgcaaccacccgttcgcggcggagatccgcagcggttacgtggcgctggaaacggtagcagaagagctgggatttgcagtaaacgtcggcgaagtgctgatgacagaatgcgaaatggtgaacggctttgtcgcgccggaaaacgacacgccgcattttacccgcggctacggactggtcttcggcatgagcgaacgtaaagcaatggcaatggcgctggtggacagagccctacaggcgcccgactacgatgaagctgtcacaggcccggcgcaagacgaagagttcgtactggcgcatgcggataacgtcgaggcggcggggtttgtttcgcatctcaagctcccccattacgtcgatttccaggccgagctggaactgctcaaacgcctgcaacaggaggccgtccgtgaccactaa

SEQ ID NO: 374821 - DNA, 597 bp, Salmonella enterica
atgacacgatccacggcactacagaccgcctttaacctgcccgtccaggacgcgcaacagagctttcgccgcctgctgaaagcgatgagcgaaccgggcgtgatggttggcttgcatcaactgaaccatggctggcagccgctaaatcttgccacgaccagcgtcctgctgacgctggttgacggcgacaccccggtctggctatcgcctgccgttaataacgatatcgcccgccagaacctgcgcttccacaccaatgcgccgctggttgaacaaccgcagcaggctaccttcgccgtcgccgacgcgcgcatcagcggcgagcagcttaacgcgctttccgccgggtccgccgtcgcgccggaaaccagcgccacgctgatcgtccagcttttcgctctgagcggcggccggatgctacgcctgaccggcgcagggatcgccgaagagcggatgattgccccgcagttgccggactgcctgcttcacgaactgaccgagcgtccgcatcccttcccgctgggagtcgatttactcctcacctgcggcgaacggctgctggccatcccgcgaaccacccacgtggaggtgtgctga

SEQ ID NO: 374822 - DNA, 453 bp, Salmonella enterica
atgcacttcgataccaccacccgccagcgctggatgcgagcgctggcttacagcgatgccgatgcgctaaacacccgtatgcaggcgttaaaactggctccaacctacgaactgattcgcgccccggaaaccggactgatgcagattcaggcgcgaatgggcggcaccggcagccgcttctttgccggcgacactactctgacgcgggcagtcgtgcgcctgaaaagcggcacgctgggctacagctatctgctgggacgcaacaaaccgcacgccgaacagtgtgccgtcatcgacgccctgcttcaggaaccgtcccattttcagactctgatggaaaccttaattgccccgctggaggcggaacgcgaggcgcagatacgcgctcgcgctgccgaagtgaacgccagccgggtcgacttcttcacgctggtacgcggagataacgcatga

SEQ ID NO: 374823 - DNA, 780 bp, Salmonella enterica
atgcaaaccatcaccgtcgccccgccaaagcgtagctggttctcgctgttgagctgggccatcctgctcgccgtgttggtcgtatcgtggaagggcgctgaaatggccccgctcacgctgatcgcggattccggcaatatggcgaccttcgccgccgacttcttcccgccggacttcagccagtggcaggactatctcagcgaaatggccgtgaccctgcaaatcgccgtctggggcaccgccctggccgtcattctgtcgattccttttggcctaatgagcgccgataacatcgtaccgtggtgggtttaccagccggtacgccgcttgatggacgcctgtcgcgccattaatgaaatggtcttcgccatgctgtttgtcgtcgccgtcggtctcggcccgttcgcgggggtgatggcgctgtttatccacaccaccggcgtgctctccaaactgctttccgaagcggtcgaagccattgagcccggcccggttgaaggtattcgcgctaccggcgccaataagctcgaagaaattctttttggcgtactgccgcaagtactgccactactgatctcctactcgttataccgttttgaatctaacgtccgctccgcgacggtggtcggaatggtcggagcaggcggcatcggcgtcactctgtgggaagcgattcgcggctttcagttccagcaaacctgcgccctaatggtgttaatcattgtcaccgtcagcctgctggacttcctctctcaacgtttacgtaaacactttatctaa

SEQ ID NO: 374824 - DNA, 1017 bp, Salmonella enterica
atgaactacagaacggttgctgctctggcgtttaccagcatgtttagcgtcagtgctctgctcagtcccgcacttgccaaagaacaggaaaaggcgctgaactttggcattatctcgaccgaatcgcagcaaaatctgaagccgcagtgggacccgttcctgaaggatatggaaaagacgctgggcgtgaaagtgaacgccttcttcgccccggactacgcgggtattattcagggaatgcgctttaacaaagtcgatatcgcctggtatggcaatctttctgcgatggaagcggtagatcgcgccaacggccaggtgtttgctcagaccgttgcggcggacggatcgccgggttactggagcgtgctgatcgtcaacaaagacagtccgatcaacaacctcagcgatctgatcgccaaacgtaaagatctcaccttcggcaacggcgatcctaactccacctcaggctttctggttcccggctattatgtcttcgccaaaaacaatatttctaccagcgacttcaaacgtaccgttaatgccggacacgaaaccaacgcgctggcggtcgccaacaagcaggtagatgtcgccaccaacaacactgaaaacctcgacaagctaaaaacctctgcgccggacaagctgaaagagctgaaggtcatctggaagtcgccgttgatccctggcgatcctatcgtctggcgcaaaaatctctccgatgccaccaaagacaaggtgtacgacttctttatgaactacggcaaaacgccggaagagaaaaccgtgcttgcgcgtctgggctgggcgccgttccgcccctccagcgacctgcaactgctgccgattcgccagctaacgctgtttaaagaaatgcagagcatcaaggacaacaaaggactgagcgaggaagagaaagccagcaaaacctcggcgctgaaagcgcagcttgacgatctcgaccgcctgaccgccgcgctcggcgcgatgaccagcgtcaccaaagccgtgcagtaa

SEQ ID NO: 374825 - DNA, 789 bp, Salmonella enterica
atgcaaacgattattcgtgtcgagaaactctccaaaacatttcagcaaaatcgggcgcttaatgcggttgatctgaatatcgccgctggtgaaatggtcgctctacttggcccatccggttccggcaaatccacccttttacgtcatttgagcgggcttatcacaggcgataaaacgtcggaaagccgtattgagctactgggccacaccgtccagtgcgaaggccgactggcgcgcgacatccgtaagagccgcgcccataccggctgtatctttcaacaattcaacctggtcaaccgtctgacggtgctggaaaacgtgctgattggcgcgctcggtagtacgccgctctggcgtacctgtgttcgctggttcacccggcaacagaaacagcgggcatatcaggcactgactcgcgtcggtatggcgcactttgcgtatcagcgcgtctctacactctccggtggtcagcagcagcgcgtcgctatcgcccgcgccttaatgcaacaggcgcaagtcatcctcgccgatgaacccatcgcttcgctggacccggagtcggcgcgcatcgtgatggacacgctgcgcgatatcaaccagaccgacggcattaccgtggtcgtcaccctgcaccaggtggattacgccctgcgctactgcgaacgcattgtcgctctgcggcagggaaacgtcttttacgacggcggcagccaacactttgataacgatcgatttgaccatctttaccgcagcattaatcgcgtcgaacagaacgcgcaggctgcttaa

SEQ ID NO: 374826 - DNA, 933 bp, Salmonella enterica
atgagtacgcaagcaatatccctcctcccgcccgacccgcacatgtgcaacggcgatgaaaagcaaacccgtagcccgctgtcgctctattctgaatatcaacggctggacgttgaattaaggccgccgcacaggatggccagcagtcactggcatgggcaggtggaagtcaatgttccgtttgacggcgatgtggagtatttaatcaacaatgaagtcgtacagataaaacaggggcatatcactctgttttgggcctgtacgccgcaccagcttacccgcgccggcaattgccggcagatggcgattttcagtttaccgatgcacttgtttctctcctggccgctggatcgcgaccttatcaaccacgtcacgcatgggatggtggttaaatcgctggcgacccagcagcttagcacttttgaagtgctgcgctggcaaaaggaaacaagcagcccgaatgaacaaattcgtcagttggcgatcgatgaaatcggcctgatgcttaaacgctttagtttttccggctggcaacccattttgctcaataaaacatcacgcacccataagaacagcgtttcacgccatgcgcagttttacgtaagccagatgctgggatttattgccgacaactacgatcaggcgctaaccattaacgacgtcgcggagcatgtcaaactcaatgctaactacgcgatggggatattccagcgggtcatgcaattgacgatgaagcagtacatcacggcgatgcgcatcaatcacgtacgtgccttattgagcgatactgacaaaacgatcctcgatgtcgctctgaccgccggattccgatccagcagccgtttttacagtactttcagcaaatttgtcggcatgtcgccacaacaataccgcaagctaagccagcaacgacgccagacgatgtccggctaa

SEQ ID NO: 374827 - DNA, 177 bp, Salmonella enterica
atgtccacagaattgacgaacacggttcgccacgctgatggccatatcgtcaatcaatacgctataaatcagtcacatcaccagcccgcagacaaacatcacgtacatcagaacagaaattcctgtggtacgagtggtaataacctcaatcgccaggggcaaaaatggcagcgttag

SEQ ID NO: 374828 - DNA, 258 bp, Salmonella enterica
atgttattttattcttatgtaagtgtgactgaattcacaaaaaatcattggttattgattaataaaccgaagtactcaagagaaattaatggcttttttaatgaaatggtcgccccctatatcttgtgccacagtggggcgataaatcgtcaatacttgagcggagcggacatcatgaacgttaagactatcggcatcgattttgtaaaagaggatttctatgtccacagaattgacgaacacggttcgccacgctga

SEQ ID NO: 374829 - DNA, 147 bp, Salmonella enterica
atgaatgatttcgaaagcaaagagtttcgttcttatgtatctccaactgagactcaagattttgatgttgaattcaaaattgaaaatgtacagctggctgagattgaactggataatgaactgttattagcaactcaccgctgctaa

SEQ ID NO: 374830 - DNA, 936 bp, Salmonella enterica
atgagcgtattccggccatatgtcgaaaatgtcgaaaatgttgaaaacaatcattttgaagaaacatttttcaataaaacccaacccgtgcagtatgcaaacttgaacagcgacatgcctgcctataaaaaatggagttttgaattttttaaagctcgctgtagcgagatattatgtcaggtaagtgataacttagaggatccggcaaatatcaccagaaagatttcaatatctgaatatattgatcttatgaaaaatggcgaacattgcccctatatgacaggctggagttatcaaaaaatcttgcctgagttggacgacgatatcttttttccaaaattccatccggatgatttcatcgatcgtttgccaaaaagaatgcaattccgcagacgatgggtgttttttggaaaaaaaggaataaattgcgatcttcacattgactgtttttcaaccagcgcatggttattgatgattgaaggtcaaaaaacattccgtgctatatctccacttcatcgtcatcacattgagatggggtcttcattatttaatgaaggcatcgtatcacatctggataaattaaatgttgagatttttgaatttacccttactcccgggactattctctacgtgccgactggatgggtacatgaaatccgtaatgacacggataatattatggtgacaggtggttttacttccagacagcatgccataagattttataaaaattatcactcctatatctccagagattcaaatgagagtgacattgctttcaatgattatctcgaagcgcttacagaagataaattgaaaatctcggatgaagtcagggattctattatagaggaggtcgcttacaccaaagaaaaaatagagatcttgcttagaaaaaataaagtttatgaagagattattaagaaaactgcttag

SEQ ID NO: 374831 - DNA, 1341 bp, Salmonella enterica
atgaataatttaaatgtcgctattgatgttttcccttataaagaagatatctggtcgatctgtgattacagcggagagcaaatttacagcaaacttgcgcttccgttgttctctttggaaaaggacgaaatcaagcccttaggtgccgaatccttccaacagacagctgactcattccgaataaatatcagaaaagatttattctggagtaatggtgataatgtgaaagctgtggattatgtgcgggcgatcaaacacatctgttatgatgagaataatcgttataataagctccttgcatctgtagcaaaactgggtgtagaaacagaaatccataatgaccatagctttactattcaaacttcatggtatgatccatttattactcaatatttgtctttattaaatttttctcccaaacacgagcatgatgatgacgttttcgccggaccttatgttctagtaaaaaaacaggataacctttatcaactgattgctaataaatattttatgcttgataagaactttcccgctgtggaaaaaatcaattaccttctggttgaaaaagatccgaacggcgaggccttttttgatggtaaagtgcatgtcagttgtaacactgccgtcaacttgaaaaattatcgcatctttacggctaagaaaaattttgtggctgctgaaggtaacttaatgatgatgctctctcccggaataaaatttgataaactgccaaaccacgtcaaagaaattttaacttctaaaattaatcgcaatacaatttcggcacgttacgataatatattaaagccggttgcatcatggatgtctatgtattttgatggttcttattatccgcttagggatgctatcgcctacaaaaaaagtagttttattatcgacatatcttatgaagatttctatccaaatgatgaaattcttgaagatatttctaaacaactctctggttttaatattgaagtccgcaaacatcaggacaaatatggctactggctttctgaatcccatctacgctttgagattcgcaaaattcctcagcgaaatcctgtgcaaatcattcgatctgatttgagtaatatatctacgagtcatgcgaaatttgagaaaataaaaaaactgtattcaatgctcttcactgaagcgctatcatctcagcaaccagaaatattcaaggttattgatttttatttgcgagattattgccttagtctccctttatttatttttcctactggttttttttgtcacagttcaattctggaaaacaccttatatgctccgggacgtaaggttctcataaaggaagcggtgagtgaaaattaa

SEQ ID NO: 374832 - DNA, 504 bp, Salmonella enterica
gtgaaaattaaactaaatgcctcgatcataagaacagaagataaaatcatatttttgggtaaaaaaaattaccagatgaccgatattattggccctgaggcggacaattttttaaccaaatttgaaactggtctggacgagacagaattgcagtcgtggcttaaagatgatagctgttatgcactttataaaaaaatgtccgagttgaatttgctggtactgtcagaaaataaatatggaggaaccgttttagaaaaaacctatgatttcctaaattttcatttaggaacattacactcaccgtttagctttgagaatgatatccacatcgcccttattggatgtggtggaacaggatcaaatatagggctgtgtctggcctcatcggggatcaaaaaattcactttaatcgactatgatagaattcagataagtaatctgaaccgccagtttgcttatgattccgctgatattggcaaaagtaaggcacagtgcttaaaataa

SEQ ID NO: 374833 - DNA, 837 bp, Salmonella enterica
atggcaataactaataaagatattttttccatatatttaaacagggaagtcatagaacaagagtgtgcactatggcggcaatttgttgcctgtaataaaaaacaaacaattcttaatttccttacagaaaaccattcctacgcttcctggccagaaaaagttgtttgctatcagcccgataatcgtgaggattatcaggcagttctgaaatcagtcgctgtggaaatgcaacgtcaaaatgaagatttttcagaaatacattactctgtaatgaacagttatagagaaaatattctggaagcaattgagttgctctcaacaaacagtgctgtgatggattacaccttgaggaatattattgggcgtattgttatcgtcagttgtgactcacttatagcaaccagttccgtgctttttttaggacttatcgttatctcgcctaaagaaaactggactctatttgattatatcgaaaatattattcatgagatgtctcacattgaactctatattaagcaactactcgatccccttgtatcgacaggaatttacctgaaaagtccttttcgtgatcaaccccgtcctgcaaatggggtctttcatgctgcttttgttttaagtcgcattattttttatatgcacaaccttactttctcaggagtatataagctgcctgctgctgtcaatcttaataaggcatctctgttattgaaggagacactggcgcagtttgaccataagaattgccttacggtacaaggcagtagcatggcagaagaaatgagtttggtcttatctcaatttcaaaaagaggattcagtcagtgcaattatttaa

SEQ ID NO: 374834 - DNA, 807 bp, Salmonella enterica
gtgcaattatttaaaaatgagcaagcatttttggaatactgccgtgttaatgatttgacgggtacatgttttcttattcatggatattgctttcagtggccattgtttacgcagggaaatttttattccattgaggaaaatttcggtagcgataagatatttattgaggaaggaataaataaatcgggcagagtggaagttacggtgagtgattatattaagcgcattcagtctggcgttaaaggcatgggtaactggtcatggcagccgcatctttcccacgcaaaatcacttaacaatagtttcactgtacccgaagctattacattaaataatattgagaaatcgttagtaggcgaactggttcttgcaccctggattttgatgtctgcaactgaaacagtcaccaacatgcatcaggatatgctcagcgtgaacggtattgttgggcagttgcagggcgtgaaagaatttacgttagttgcaccgcagtatgcgcttgaagagggtaaattttacagcacatacgagctcgaaacacttggtatcccttttgagtgcgtggtgcttcatccaggtgattttctttactttcctgcgcactggtggcatcaggcaaaaacgattgagtgctcggtgagcttcattcatagtacagtaaatctgtacaatatgaccgcttttttggatgatgccatttctcaaatgccagccttgatacaaagagtgcagtcagcggcgaaaaaacggggctatttcggctacagaattaagtggttgtgtaatggattcaggtcattgggataa

SEQ ID NO: 374835 - DNA, 1221 bp, Salmonella enterica
atgtttagagcagaagtaaaggaacggctggcactgtttgaaaacaagaatttttttcttttcaccgtgagtggtctttttgccacttttggtaatggattaaattatattgcgctttcctggttggcctataacaaaaccgattcagttaaaggtgtagcgataatgatgttttgcatctggatgcccagtatccttttcgctcctttatttggcctgcttgccgatcgttacaatcgtaaagcacaaatcattatctcaaatctggtcagggggatagttatcgttgcatgggtactgatgtgggaaatgaatattgagccagacctgatgattctgtgctctctacttggggtatttatttcattttacatgccttccgcggtgccttttattcaaagtatcgtgtctgaagaggatcttgttagcgcgaatgcaaccattgatatggtttacgaattcggcactattgtgggaatgggattaagtggcttcatactggctgtagtaggtatcaaaggcacgctacttatcggtggtatactttttattatcgctggccttttcaaccttgccatgcgtacggtagtaacgtcagaaaatgcaaataaacaaagtggaagttggtggtacaactatacctcttcgctgagatactttaaaagtaagcctgcactttttatgccttatatgagccagatgataatcatggttcttttgatgactattcctattattttagtcccttatacacgtgaagtgttgcatgcgagcacccgggtatttgcgctttatgaagctctgtattcattgggggttttagcaggtggctttttatcacctgtgctttgtaaaaaaatcagcatcaggaaaacgcttgccttgcttttattggttatggctggcggtttatatatactctctgttaatgatgctgttattttggtattcccgatttattttcttattggttttggtatttccagttgggccctgtcgatatctctttcacaacttcattgtgcgcctgagtatcagggaagacttcaggctacttttaacggcctgtcgggaatatttattcttgccatatatcttcttatggcaaaagaagggaatggcttatcctctcagggagtttacctggctcagtcggttcttgcgctagcgggcattgttattgtgcttttttatcgtaaaggggaacatcgtgaatcgtaa

SEQ ID NO: 374836 - DNA, 1572 bp, Salmonella enterica
gtgaatcgtaaagatcaagtttttctctcaactaatcaattgagttaccataatacaacaaatctgttgtttaacgatgtttctctttcattaaactccactgaaaaggtgggcttagttggattcaacggtgccggtaagtccaccctgctacaactgttgactaagaatctggagccaagttcaggtctggttactcaccccaaatcgttacgttattaccttgtggaacagcgttttccagagcacttattatctttaacgccagaagaggctcttctcgatattttagaaacagatgagcgcataagtgaaagctggcgcgctgaagttattcttgaaaatattggtatagggtttacccagcatgatactccatgttcagaacttagcggtggccagcagacgcgcctgttactgggtagagcgcagctctctactcccaatgttcttttacttgatgagccttcaaaccatcttgatttgccgacgttaatctggcttgaagcatttttagcagactggcgtggaagcttaattctggtttcccatgatacccgcttgctcgatactgtcaccaacagtacttggattatcgctaatggcggcgtgcatcaatatcgactcccctgcacgcaagctttagtgcagcacgaacaaagcgatcttgcctgccagcagcaatatcaggatcaggcaaacgaaattgagcgcatcgaagccagcgcgcgtcagttggcggtgtggggtaaagatcagcatagtaaaagctcggcaagaaaagcgcagtccatgttcaaacgtgtagataaactcaagcttgagcaaaataccttaccagaaccttatccctggaatctttcctttcccggccaaatgctgccggcaaaacgacttctgttttgcaacgaggttgtggtcagggcaccgaggcagactaatatcctgtacacaatagatgagctgttgattcagccaggagaaaaaattgctttaatcggtgctaatggcatgggtaagtcgactctgctgcagcttatctggaagagttatcgggatcgggatcgggccattacactgcatgactcgacggtaatggcctattacgatcagctacaaaatggtgtgaatagcgagctggatattatgaatgcattatccagtttttgcagtacgtcgcgcgtgaatgccaataatgagcagttgaagcaggcgttacttaaagccggattcccctgggaacgtctgcagagtaaagtcaaaacattgagtgggggagaaagagcaagattattatttgcaggtatatccctcatcaacagtcatctgcttttgctggatgagcccactaaccatctggatatatcaggtaaaaaggcccttgaacgtcagttagaagagtttaacggcactgtgcttctggtatcgcacgatcgtagtcttattgaaaaggtctgcaaacgttttttggtaataagcgatggaaagctgcactctttcaacgactatcgccaggcttatagcgcctcacaaatgacagttgaaggtcatctgctgagtaacgcgtcatga

SEQ ID NO: 374837 - DNA, 627 bp, Salmonella enterica
atgatccgtacactgcccccttcactactgaactctggcgcgctaattctgtcgctccttctgttttatactggcttgatgtcgggcgacaaaataacctggctgatggaagtgacgccggtgatcattgtggcgccactgttgttagtcaccgccagacgctatccgttgacgccgctgctctacacgttgattttctttcatgccatcattttgatggttggcgggatgtatacctacgccaaagtgcccatcggttttgaggtccaggagtggctggagctaagccgcaatccatatgacaaactgggacacttctttcaggggctggtgccggcactagccgcgcgtgagatcctcgcacgcgggcaaatcgtccgtggacgaaaaatgctggcttttctggtctgctgcgtggcgctggcgattagcgcaacttatgagctgatcgagtggtgggcggccctggcaatgggccaaggtgcagacgattttctgggcacacagggcgatccgtgggatacgcagtcagatatgttctgcgccctgctcggcgcgttaaccacggtcattttactggcgcgcgcgcattccagacaattagagcactaccagttaattgactga

SEQ ID NO: 374838 - DNA, 1647 bp, Salmonella enterica
atgtcgaaaaaagagtttatctatcaggcgcctttcccgatgggagaggacaaaaccgagtattacctgctcacgtccgattatgtcagcgtcggtagtttcgaaggcgaatcaattctgaaagtcgagccgcaggcgctaacgctgctggcgcagcaagccttccacgatgcatctttcatgctccgccctgaacaccagcagcaagtcgcctctattctccatgaccccgaagccagcgaaaacgataaatacgtggcgctgcaatttttaagaaactccgatatcgccgccaaaggcgttctgccgacctgtcaggataccggcacggcgattatcatgggtaaaaaaggccaacgcgtctggaccggcggcggcgatgaagcggcgctctccaaaggcgtgtttaacacctatattgaagataacctgcgctactcgcagaacgcgccgctggatatgtacaaagaggtcaataccggcagcaacctgccagcgcaaatcgatctttatgccgtcgatggcgacgagtacaagtttctctgcgtggcaaaaggcggcggttcagcgaacaaaacgtatctctatcaggaaaccaaagcgctactcaccccaggcaagctgaaaaactttctcgttgagaaaatgcgcacgttgggcaccgcggcctgcccaccataccacatcgcatttgtgattggcggcacttcggcggaaaccacgctgaaaaccgttaaactcgccagcacccactattacgacacgctgccgacagaaggtaacgaacacggccaggcattccgcgatctccagttggaacaggagctgctggaagaagcgcaaaaactgggcctcggcgcgcagttcggcgggaaatatttcgcccacgatattcgcgtgattcgtctgccgcgtcacggcgcttcctgtccggtaggaatgggcgtttcctgctcggcagaccgtaacataaaagcgaaaatcaaccgtgaaggcatctggattgaaaaactggaacataatccgggccagtatattccgtcagcgctgcgtcaggcgggcgaaggcgacgcggtaaaagtcgatcttaaccgcccgatgaaagagatcctcgctcagctatcacagtatccggtctcgactcgcctgtcgctgacgggcaccattatcgtgggtcgcgatatcgcccatgcgaagctaaaagagcgtatcgaatccggcgaaggactgccgcagtacattaaagatcatccgatctattacgcgggtccggcgaaaacgccagcgggctatccctccggttcactgggcccgaccaccgcaggccgcatggattcttacgtcgatctgctgcaatcccacggcggtagtatgatcatgctggcgaaaggcaaccgtagccagcaggtcacggatgcctgtaaaaaacacggcggcttttatttgggcagtatcggcggcccggcggcggtactggcgcaacagagcattaagcatctggagtgcgttgagtatccggagctcggcatggaagctatctggaaaattgaagtagaagatttcccggcctttatcctggtggatgacaaaggcaacgatttcttccagcagattgtcagcaaacagtgcgctaactgcgagaaataa

SEQ ID NO: 374839 - DNA, 1632 bp, Salmonella enterica
atgaaacactccctgccatgccgggcgttacgcaaacgccccatgaaactcggcacgaccgtcattctgatggtcagcgccgtcttgttctcggtgctcgtcgtggtccatctgatctatttttcgcaaatcagcagtatgacgcgcgacgcgctggcagataaagcgctggcggtggcccgctcgctggcggactctccggtggttcgcgaggggctgaaaaaaccaccggtggaaagcggtattcagacgctcgccgaagcggtgagccagcataatggctttttatttattgtggtaacgaatatgcagggtatccgttattcacatccagaagcgcagcgaatcggtcaaccattcaaaggcgatgatattctgctcgcgctgcagggaaaggagaacgtcgccatcaatcgtggctttctcgccaaagcgctgcgcgttttcacgccggtttatgatgaacatcatcgacagatcggcgttgtggcaatcggcctggaactcagtcacgttacgcagcagatcaacagtagccgcggcagtattatctggtccattttgttcggcgctctggtggggttattaggcacatatgcgctggtcaaggtgctaaaacgtatcctgtttggccttgaaccctatgagatctctaccctttttgaacagcgtcaggcaatgctgcagtcgatcaaagaaggcgttatcgccgtcgatgatagcggcgaagttacgttgattaaccacgcggcgcaggcgctgctcgattaccgaaaaacgcaggatgacgccaaattatccaccctgagccatgcctggtcgcaggtggtagacattcgcgaagtgttgcgtagcggtacgtcgcgccgcgatgaagagatcatcgttaaaggccgtctgttgcttgttaataccgttccggtgcgcagtaacggcgagattatcggcgcaatatccaccttcagggataaaacagaagttcgccaactgatgcagcggctggatgggatggtgaactacgcggatgcgctccgtgaacgatcccacgaattcatgaacaaattacatgtgattctgggattattgcacctgaagagttataagcagcttgaagcgtatattatcaagacggctaataactatcaggaagagatcggtttgctgctcggtaaaataaagtcgccgattattgctggctttttgctcagtaagattaatcgcgcctctgatttaggacacagcctggtgataagcagtgacagtcaattaccggatagtcacaatgaagatcaggtcacggtgctgattacggcgctgggtaatttgattgaaaacgcgctggaagcgctgggccaggaatccggcggtgaaatcagcgtctcgttacactaccgtcatggctggctgcattgcgaagtcagcgacgatggtcccggtatcgaatctgaaaacatcgacgcgatttttgaaaaaggcgtctcgtcaaaaggtgccgggcgcggtgtcggtttagcgttggttaaacaacaggtcgaagcgcttggcggcgtaatttccgtggaatctgaacctgggatcttcacacaattttttgtacagttaccctgggatggggaaaggaccagcctatga

SEQ ID NO: 374840 - DNA, 9585 bp, Salmonella enterica
atgacaatgaaagaaaacacctcctcaacagataataccaaccttaagccagaaactatttctgatataaaatcatacaaagtaagtggttttgacttgatagttacgacctctaatggtaataccacaactttaaaagatggcttaaccaacctggttttggggaatgttgagttacgtgataccacgggaaaaacaattaatcaggatcatattatctcttctataaaaacttatcagcttgggttagatacagtctacctggctgacaagttagtaagcgatgaatccacaccagaaactacaaaggatgagtcagaacaacaggtaaaagatacttttgctgatataaataaagctctggaagaatctttacagcaaaaaattaaagagtatgaggaactcctcaaacagcagactacagatttaaaagaaaatatacagctcgaaaaaaacgaacaattatcacaaaagaaagaaattattgacaaaaaagcaaagcaagaactttctaaaaatttaaagcctgctgaagaagaggtcgtgaataacgtccccgcaccacccgctacaccgccagtcccaccggcgtcatcaagttcttcatcaagcgagcaggcagaaaaggccctggagccattacctacgccagaggttcctctttttattaccggtcaactggatgcgaaggccgattccggcaaaacaggagacggtattaccaatattactacaccaacctttaccggcaatgctacgccaggcgcgacggcaagccttataatagacaagacgcactacccgttaaccgttgataaagatggtaaatggaccttacaactctcttctcctctaccagatggtcagtatgagataaactttactatcaccgatagcggcggcaaaacggtgacatctactaccaccgtcgtaatagatagtgaagtttccgggctcacagcctcacttgatcctgcctcagactccggtgttgttggtgactctataacgaataatcctaaacctgtacttcagggtacctccgaaccgggttccatcattaatgtcattattggcgggatggcgttaaccactgtcactaacgcagacggtcagtggtatttatctccgggttcgaatttgccagatggtgtataccattatcaggtcaccgctaccgatgaggcagggaataccgcaacggtgaataacaccgtgactattgatacgactgcgcctgacgttacatttgcgctatccgccgccacggattccgggcagcaggacgattttttaacgaatattcctcagccagtattgaccggaaaaacggaacccggcgcatacgttattttgaccctcaatggcaacgtttatgaagccaccgccgatcgacaagggcagtgggaacttgaaatcactccggcgctcaacgacggcagctatgaatttaccgttgaaacgaccgatattgccgggaataccgctacgcaaaccggtaaagtgacaattgatacccagcctccgacaattacggcaacattatcgacagaatcggatacaggcagcagcaacactgacggcgttaccaataatccgcatccgctattaactggcaataccaaacctttagcgatcattaccgttacgcttgccggtaaatcgttctctatccaggctgatgaaaatgggctatggacctggaaagtgccagaagacctggtattagatgatggcgagcatgtttatacgctttcggtaacggatgccgccggtaatagtgcttcctcgccattagaaggtaaatttacgcttgataccacccctccgtctgcccccacggtgtaccttgacgccgatagcgattccggcgattcaggcgacagcatcaccaatattactaccccaactctgagcggaaagtcagaacctcatacggaagtgttcgtcactattgatgaccacatttattctcttcaggctgatgaaaatggcgactggcaactcactctggatacgccgctagcagatggcagctatgacgttaccgtggtcgcaaaagataatgcggggaatatgagcgaaaccgcggggaatatgacgctggttattgataccagtatcccggaaatcaccgtaagcctgcgggaaagcgatgatagcggcgtgagtaacagtgacggtattacacacataaatcagccaaccttccacggtacagcaacgccaaatacctccgtggtgttgaccatcaataatgtggaatatcatgccgccgccgatgcagacggtaactggtctttaacgctcccggatgcgcttgcggataaaacatatgaatatacggtaaaagttgaaaatgcggtgggcaccagcgcgacggcatcaggcagcattaccgtggacactacccccccttcatctgaagcaagtttagacgaagcatcggatagcggacgaaataatcaggacaacatcacgaatgttatccgccccattcttaccggtacgacagaacccgaagctgacatagaaattatgtttaacggcgtgagccatacattgaaagctggggctgatggtacctggcactatgcgataccggacgaccttcctgatgcaacatacacttatacggtcaccactacggataaagcgggcaacacctcaagcagcgaacatcagttttctgtagataccgtttcccaactcagcggcgggcttgatctttccagcataatggaaggtacggcggggaataatacaacccagcttgtccgcccgatgctcagcggcatggcggaacctggaagccttgtcacagtagccattaaaaacatgacctatacggcctccgtagatgacacggggaggtggaaactgaccttgcccaaagatgcggaacccggcctgaatgagtataccgtaacctcagaagatctcgccggaaacacggcaacaattacaggtaattttaattatgtcccatcaggcgtagtaccgcctaaagttacagcgcagttggatgctgatagcgacagcggcatcaagggcgataatattacaaatgacaatacgccgaaaattgtcggacaggccacgccggatacggtgatcgtcctgaccatcgccgggcaaagttataccacaacggcggcggctgacggcagttggtccattgatgtaacccacgcactgaacgaagggtttagcgaatatacggtgaccgcaacggataccggtaccgggttatccgccatcaccacgaataatatttttattgatacccttaaccccctatctaccgtgggattaacgagcgattctgataccggcatcaaaggggatatgatcactaaaacgacccggcccgtttttaccggcaaaaccgaaccaggcgctacgatcaccctgcatatagatggtcagatacgacacaccacggcagatcataacggagactggacgttgcagggcccgacctggggtttgccgccgaattatacggccggttatacgattatcgtcacggataaagccggaaaccaaaccaccactaaagggaatattactactgataataaagcgccgacgctgacaggatctgagctggacagcagcagtgatacgggcgataaagacagatactggactaatgaccttacccccactctcacaggtaaagccgaagctggctcaaaggtgaccattcgcattaatgataaaacctataacgtcacagatatcgccagcaacggaacatggaaatttaccctccccacgggactaattcaggataacggtaattatcacaccattcgtttttctgtcacggcgaccgatgcggccggtaataccgccactacgtctgacgccatctatatctgtaagcgaaaactgaccatcactagtggactctctgacgagacggatagcgataccaaaggcgataacctgacatcagtaaccaaaccgacgctggagggcaccattgccggaggccacgctaacgataatctgcgcggcactattaccatcggcggtaaaacctatccgttaacgattaccgccgggggaacaaagtggtcgtttacggtgcctgacagcgcgccgctgaattcaggcacacatgattatacgctaactttcaaggataaatttggtacagaaaccacccattccgccacggtgacaatcagtactctggtcggatttctctccccagaagatgatactggctcagttggcgataaccagacgcaaaatacctcaccatcattaagcggcaaagcgagtatcggctccacgttacgtattgagtttaatgcgcaggaatatactattccggttaatgccgatggcacctggacgtttacattaccgggagggccgtttgttgaaggggaatatcactacaaactgactgagattgtcggacactcggtcacgacatttaacggttccttcaccatagaccatacgccgccggaaattaccgggggacttagcgctagcgatgcaacgcctaatgatccttcagtctcccgctggtctaaccccactttcaatggaaaagcagaacccaatagggaagtcatcgtagagattaacggcaaacgttactcaaccacttcagatgataatggtaactggcaaatcttgttgcaggacgtcaatcttcttcctgacacacgttatgattacaccataacgtctaccgatgctgcaggaaatagcggcgtatttcatggcgccattagcaacgttgtcgccgcgcctaatgcacaatttggcggacatgaagattatctcgttggcgccgctggctcaactaacagtattttctataaagacgcctcgccggttatcgtcggacgcggtaatcctggcgatacgatcaccatcagaaagaattcaggcgggtcaggccctttaaccaccgtcgttgacgcggatggcaactggaaaatccatttgcctgcgtcagaattcccggcaaacacgccccagggcggatactacacctggagtcttaccgtaaccaatagttatggtttggaaaccacttacaccgttagaatcacccgcgactctgttcctccgaggctgaccggtgggcttgacaacgccagcgataccggtgttcagggcgataacattactcacaactccacgcctacgtttagcggaagcacggaagccggtctgaaagtcacgattacgcttaatgggcaaaactacaccgtgaccgccaataacgccggtaaatggagctttaccgtgccggaaacgttgcgggacggtaattatgactacagcatatcgactgtcgataaggcgggtaatctttcccctacgattacaggaacgcttaccgtagataactccagcgtagcgctaacaggcgggctggataccactgccgatccgaatattgccaatggctggagtaatcataacgatcaaacgttaaaaggcacggcaacaccaggcgcaacggtgatagtgacaatcaacggcatgacttatacccccatcgttaccgctgatggcaactggacgctggcgctacctgacctgtcaaacaatagctacagctacaccgtgacagcgactaacacagcgggaacatcatcgaccattagcgggcaattcgtcattgataacacgccgccaaccacaacggtaggactcagcgctgctacggacagtggggtattaggcgattttatcactaacaatgaaacgccggtttttacaggcaaaacaaaacctggcgccacgataacgctcacgattggcgggcaaacgcatacggtggaagcggacaaccaggggaactgggaagtcgctgtcaacacgccattaaatactggtacgcataactatactgtttccattactgaccttgcgcaaaacgtcagcacgcctgtcaacggcgagttgaatattcagagtggaaatatggcgggcttagtgactggcggcctggatattgacagcaatactggcgataccggagataccatcaccagtaatacaaaacctaacttttccggtacggcgccaactggcgtcacggttatcgtcacgattggcggcaaaacttataaaaccgttgccgatcagcatggtaactggaaactcgccattaccagcccattacgcgatggcgatcatgattactctatctcactcgaagatatagccggtaatcaatcccccccgataagggggaagatcactatcgacagtgaatcgcacctccagataaatggactgagtgacgatacagactccggcgctaaagcggacaatatcactaacaataccatgcccacactcatgggaaccgctgaggccaatgccacgattacgctcacgattgacggtaatcggtataccaccacagctaacgtagacggaacatggacgataccgttgactcatgccttaacggatggggattatcattacacggtcactgccactgatagcgcaggcaatacgacatcctctacggcgaccatcacgattgacaccactgctcccgattatttaaccggcggactggatatcgccagcgaaaccggggcggtcggcagccatcttacgaatcaggctacgccgacgtttagcggcgccaccgaaagcggcgcgaccgtcacgttaatgattaacggtaaaacgtataccgctattgcaggcgataatggtaaatggagcataaccctgccggagggcggtaaattagcagatggtagctacccatacacgattacagtgacggatgccagcggtaacgtaagcggcgtacaagtgaacggtaatgttaccgttcaaaatacgccgccctcagcaaatgcgggattacacgccggaagcgatagcggggttacgggcgatcagataaccaacaacacccagcccacgctgtcgggcaaaaccgcgcccggcgcatctattgtcgttattttcgcaggcactacttatcctgtggcagtcgatgcgtctggaaactgggcattccgtctccctggtacactaacggatggcagctactcttatcaggttttggcaacggacaacgccggaaacgaaacacgctatgacggcgattttactgttgatacttcccctccggacgctcctgtcgccgctctggcggaaagtgcggacagtggcgtcacaggcgatggtattacgcatataaagaatccgacctttacaggaacagcggaagcgaacgctaccgtgatcttgacgatcaacgggaaagactatacggccaaagccgggagcgacggtgcctggacaataacattacctgtgggtcattcgctgccagacggaacgtatcagtacactgttttagctcaggataccgccgggaacatatcagcgcccaccgccggatcggtggcgattaataccactgcgccaactatccctggcggaggtctcgacgccactaccggcacagataatattaccaacgtaacgacaccgacgtttagtggtaaggctgaccccaacagcatcgttattctacgtatcaatggtaaagcgtatgagatccaggtaggaaatgatggcgcctggaaattcacgttgccagcagacgataccctcaccgatgggacttacgcctataccttacagggcaaaaacgctatcggaaatacatccgcagaacagtcaggttcggtcattattgatactatgccgccaacagctcccactgccgggcttgcgcccggttatgacacgggagtggcgggcgataatatcacgcgcattacaacccccaaattcactggaaaagcggaaccaggaacgactatcacgctttctattaacggcaaaatgtatgaatgtcctacggcgaccgacggtacatgggcctttactttaccttcggccgatgcgctggcaaccggtaactatgcctatacagtgttagccacagacgccgccggaaatgtttccgcaaccactaacggtaatatcacaatcgatctcgcccttcctgccattccaaatggcgggcttgctaccgagtctgatacgggtacggccggtgataatattaccaatgcggatcttcccaccttcagcggtacggcagaacctaatatcaccgttattctgaccctcaacggtaaacgttacgacgtaccggtcaataatgatggcacatggcgttttaccttacctgctggagataaactgaatgacggctcttatgacttcacgctacaaggccagaacacggcaggtacgacatctgacgcctttaaaggatcaataactattgatacgacaccgcccgatgcggctgtcgggaaactaactgccgatacggatacgggtatcgctggcgataatatcaccagcgtgagcaccccgacttttaccggtacgacagatcccggcgcaaccattattttcactattaatagcaaaacgtatgaatttcaggccgacagcagcggtgtatggcgcttcacgttaccgacggaagatgctctgcctgacgatacgtacatttatacggtacaggccaaagacgtcgcaggaaatgcgtctacgccgaccagcggttcgctcaccattgattctacctcacccgcgcctaccgttggcgcgcttaccgaagattcagatactggcgacaaaggagataatgtcactcgtgataaaacgccgacattcactggcacaacagaacctggagcgaccattattctgaccctcaataaggaaacacataccttccaggcggggaatgacggtagatggcgctttaccttaccggctgctaatgcgttagatgatggtatttatcaatataccgtacaggcaaaagacatagcaggaaacacctcttcgttgtctaccggttggctaacgatcgacattacgccgccagtgctttccctggaagataacagcgataccgggacggcagacgatgatatcaccagcatcaatacgccaacctttaccggtacttcagaagccaatgcgacgattacactgaacatcgacagtaaggtgttcacaacagccgcagatagcgccgggaagtggacaattactcttgaccagcccctcaatgatggcacctatgaatatacccttaccgctaaagatgctgccggtaacgaaaatacgctgaacgagcggctgactatcgatacgcaaccgcccgccgagcccacactgggatcaacggctgacggtgttgatagtgccgtcaccctccagggaacggtggaggcgaatcaggatattcaggtgaaggtcacggttaacggtacggaatatcccgctagtgtcgataatgattctggtgactggcatgtatctgttccacaatccattattctgtcgggggagaatcaatacaccctaacggccaccgatcccgccggtaatagtgctgttgccagtggaacatttacgggtacatcaccaacggaaaatccagttaacaagagttccggcgcagatgaaatgatttcgcttagtgaggcgactttgcattcggtaagcgttgaggaagaatattatgccttataa

SEQ ID NO: 374841 - DNA, 447 bp, Salmonella enterica
atgagtgcagaagaaaataatagtgatgaagaactggcgccaatggttgatgggctaagcggagcgctttgtattctgatacttgtttctacagtattcatactctcaagcactgattcaattgtgacatctgatggtggagcattaaagttcagagactcatttactaatcttagtaaaaataccatttactatagtggcgctgtttcactttcatcgtctgatctttatcaaacccgcaagcacttagttgactcagggaaaaagaaaatcacgctctatggcgcagtatctaaatctgtagaaaaccataaagcaaaaaacacgtttaatttattgaagatttatacagacttaaaattaccttctgatatagaagtggagttcaaagaaggggattcgtctgcatgtgaaaaaagtctatcttgtatttactggagtaattaa

SEQ ID NO: 374842 - DNA, 1008 bp, Salmonella enterica
atgtattttctgggtctaattttttatatattaacagcggtatgctacttattatttcctgccattaaaaatatggtcaatcaggccgcttttctggcaccgcaaattacgtatgcatgtggagtattatttatattaccgctgctcctttttttaacgcattgggtattcagactaaaggcaaggaaatattacaccctactagcaacgcaaaccaaactggcagcttcggtggccgtctccttaggcctgattggtacctttatggggttaaccgacatggtttcagccatttcaggttcgctagggggagaaggcgatcttgcggcaaaaatgggggcaatgatttcatccatttcatcggcacttacagcaatgtcatttgcgttcctgacatctatattaggtgttacggtatcagtattacttttggtaagcctaaacttctgggagttttactacgagacggagaataatgctgaaaaaatgtcagggaatataccttcagaaaatgagcttaatgcgttactcaatagaataacgttgctggaagaaattaataccaatatcgcaaacaaactgatttatattccagaaaatacagaactggcagagttattagtggtaaacaacaatgccatggccgagaatttgatacaaataaacaccactattaaaaatattgaaaaaataacaaaagcatttactgagataagtgacagtgcgcttgttagtattaatacatcactaatggatgttaatcaaagcaatatggtagctaatgaaaaaattgtcgctggtaatgagcatttaatggatttaaatgttggtgttaacgcattgctggcattaatgaagaaaaactctgaatttaacgaggaaatggaaaataataaatctgagcagcttaaagtcattattgacaggcaggaaagctatttccatgaacagtataagtttaagaataaaatgagacaggttgtagaggtactgactaatgaaaactaa

SEQ ID NO: 374843 - DNA, 1026 bp, Salmonella enterica
atggcagaactaagattagagcaactcagtaaaatatttggtaaccagactgtggtacagaaacttgatcttactattccacaaggctcatttactgcgatattaggtccaagtggctgtggtaaaacgacaactttgcgtattattgccggcctggaacagcctagcacaggatgcttgtttttaggaagtcgtttgttagcaaataaaataatatctctaccaccagagcaacgtaatatggggatggtatttcaatcctatgctctgtggcctcatatgacagtagaagagaatgttggttaccccctaaggctacgccagatcagcagtaatatttataagaagagagtcatggaagcgctggaagccgtggaattactcgcttattctggacgatctccacatgagcttagtggcgggcagcgccaacgagtagcactggctcgttgtctgatctcaaatccagaagtcatattactggatgaacctctgagcaatctcgatcgatatctacgcacaacgatggagaaaatcttccgggaactccaccatcgtactggtacaacctttgtttatgttacccatgatcaggcagaagctatggcattagccagtcatatcgcagtaatgtataaaggcacattagtgcaatggggtatacctcaacaaatatatgaacacccaaacaatgtatggatagctaaatttatcggtaaaggatgtattctctctttatccatacctggctcggaacaattcctggattgtactatgttacaccaaggttttactcaagataggcgcgttacatatcacaatgtattaattcgaccagaacacgtgcatttaaaaaataaaggattacccgctaaagtggagaactgtatttatcaaggagagcgctacttattagaattacgattggttgatgggcaattattgaccgcctttcatcactcatcagtacaacctcaacagcttgtttgcatacagctaatgcaaggatggcgcctgccgaaataa

SEQ ID NO: 374844 - DNA, 1707 bp, Salmonella enterica
atgttccaatatcaaagtataaaccataatcgatacaaatggtggtcatggttattattctgctttattacattgcttattctgttgcctattttacaattgttcatctttgcaataaccgactggcagcatggtagaaatagtaatctatggcatgtgctaagtaacccattaacatggaccgccctgtataacagcctttatactagtggcctggggacgctgttttccctgttacttggtaatctatttgctttttgcctggttctgacaaatattcgtattaagcagattactttttttttggtaatgttgccaatgatgattccacctcagatcacagcaatgagttggctacaactttttcgccaggttggcatttttttcaacagtattggtctttcgcaaggttttggctggcccaacccattgtattctgccgaaggtatcgcattgctacttggaatccagaatacacctttagtattcctgttgatacaaacgcaactgaaatatttaccacaagaatatattgaagcagcaagattaagcggtgcatcattctggaaaacttttcacgatatctcactaccactttgccgaagcacgatatgggccggggcagcaattgcttttgtttcctcattgggtaacttcggtattccggccatgctcgggattcccatttcgttacttgtgttgccagtgtatatctaccagatactctcaagctttggtcctgcagtactaaatgaagttgcagcactgtcagtcctgacaggcgtgctaacgatcggtattatgatattgcaaaaacatatgcaacggcactacgcattccctctaatcggcataacagataacacgttaatttttttactgagtaataagtggcgtatagtaatagaaatattgctttctatattgattttttctattgtgattgcaccactactggcattaattaccacgtcgctggtgccaacaaccggtgtcatactaaatagtgatacattcacactttcagcctggaaaataatttttgatacacaaagcgctacctggcgtgcgatactaaacagtctattgttgtcagtgtccgcctcacttatattaatgctgctgagcctgccactagcgtggttactagtacgtcatcctacccgctccttactctggctctacaatatccttgatattccctatgccttgcctggtgtagtattggcaatttcctttattcttctgtttgcccatccattacctcttctggatatcagcctcaatggaaccttaacgattatcttcttcgcctatatggcgcgattttttacggtatgtataaagccagtatacagctgtatgttacagctagatgctgcaatggaagaggccgctagtttggctggagcgaatgtctttcaacagttcagccatattgttgtgccattgttaggccccacggccttttccggagcatttcttgtcttcctttccaccattcatgaacttactgtatctgcactgttatgggggccaggaaaagaaacattaggagtagtaatttttaatctttatgaaagcggagatattgtacaagcatcagcaatttccgtcgtagtagtaataatagttgtattggcgatgctattactcaatatatgtagtaaatttttgcctaaaggagttatgccatggcagaactaa

SEQ ID NO: 374845 - DNA, 978 bp, Salmonella enterica
atgaatataaaaaagataataacaacgatattgcttattttcattagtatccccatttttgctaaatctgtattggttctctataccagtcaacctatcgaagatgcgcaggtaactgttaacacctttgaaaaacatcatccagacattgaggttaagtggatccgtgatggcacgactaagctgatgactcgtatacaagctgaattagcagctggcggcgaaacacctgatgttctattaatcgctgatagcctctctatggaatcattgaagcatcaaggtttacttactgcttataaatcaccacaagccaaacattttcagtcctggttatatgataaaaacggttactactatggaactaaaatgattactactggtattgcttatcacagtaatgcgcctgtcaaaccaacctcatggctggatcttattaaaccagagttaaaaaatatgaccactcttcctagtccactatactccggagcagcacaaattcatcaggcaacactgatgaataactccaggctaggctggtcatattacgaaaagctgagaaagaatggagcaatgccacaaagcggtaacggagctgtactgagcgctattgtatcaggtgacaaagcttatggttttctggtggactatatggccattcgagcaaaggctaaaggcgctccaattgagttcgtattcccaaaagagggggtcagtatagtaactgagccagtagcaataatgaaagcctctaaaaaccctcaaggagcaaaaaaatttatcgatttcttactctcaaaagagggacaaaatatggttttacagcaaggatatatacctgcagatgcagcactaccagtgccagaaggctttccaccacgcaacagtattaagttaatgccatttaatagagcaaaagctctgacaaataccgaagttaataaaaagtgtttcgcagaactgtttgggagtcattaa

SEQ ID NO: 374846 - DNA, 123 bp, Salmonella enterica
atgaaaaagacccgttataccgaagaacagattgcgtttgccctgaaacaggccgaaaccggcacccgcgtcggggaagtctgcagaaagatgggtatttctgaggccactttttacaactga

SEQ ID NO: 374847 - DNA, 198 bp, Salmonella enterica
atgcctctcgcagaaaatgtaccgcctggcgcttctgagccggcctcagaacttttgattcagtacctcctgcagcatctccttgtccagactcagatcagccaccagtttcttcagccgctgattttcatcctccagctgccgcagacgccgcagcccggtcacgcctggaccggcaaatttttctttcagttgtaa

SEQ ID NO: 374848 - DNA, 579 bp, Salmonella enterica
atgcagagcagaactgtctaccactggcagagtcggcgtgacgatcgggcaataacactgcgcatcagggaaattgcggaaacacgaatacgctacggctgtccgcgcattcacgtcctactgcgacgagaaggctggctaattaactataagaaaatacaccggatttattgtctggaaggcctgaattcgcgcaggaaacgtccccgcaggtatatcagtgcggcacaccgtcagcagcgtccggccctgacgtacatcgatcagtgctggagtatggatttcgtatcggatagtctgtttaatggacggcgcttccgggcgctggctgtagtagataattttagtcggaaatgcctggcgatccatgccggaaaatcattgaagggcgaggatgtggtccgcgtaatggaagcgctgcgggtgctggataagcgtctgccggtacgtattcagacagataacggcagcgagtttatcccgaaaactctggataaatgggtgtatgaacatggtgttacgatggacttctcccgccccggaaaaccgaccgataacccgtttattgaatcgttttga

SEQ ID NO: 374849 - DNA, 1497 bp, Salmonella enterica
atgttttcttttaaaaaatgtgtgcttacattgtcaataagtttagcgttcatctcatcaggcttctcctgtacaacgctactggtaggcaacgaagcgtcatcagacggctcgatgatcgtcgcccgtagcgcagacagtgatgcaatgaaagcacagcattttgtaatccatcccgctatgcataatcagaccgggatgtatagcaccaaagcgcataatggcgcgaatgattttacctggccattaccaaaagagtcgttgcgttatacgacagtgccgaactggaaaacgcagctacacggcgctaccggttttaacgaagcgggcgtgggcgtaagcggtacggagtctatttttgcctcgcccaaagctctcgccttcgatccctacgttgaagataaaggcattaccgaagacgatatcccggatatcttgctttcgcagaccaaaaccgcacgtgaggcgattgcgctgctggggcacattattgaaaccgttggcgccggagaaggttttggcgtcgcagtggtggatgataatgaaatctggtatctggaaaccgctacaggtcatcaatggatggcgcagcgcctcccagccgatcagtattttgccaccggtaatcaagggcgcctacagaattacgatccaaacgatgcaaacatgatgggttcaaaatctttggtggcgtttgccactgaaaaaggactttataatccacaaaaagacggtaagtttaatttctccaaagcctacacacgtgacgatgagcgagatcgtacttataacgatccgcgcgtatggaccattcagcaaaaatttaatccttcagtaaaacaagatatgaccgccggaaggctgttccctgttttcatgacgcctgagaagaaaatgacgcttgatgacgtcaaagccgttttacgcagccattacgaggggacaaaacacgatccttactctaacggtctgaatggcaaagagccctggcgccccgtcagcgtttttcgcacctatgaagcgcatgtgatgcaggtccgtccgtggctaccgaaagaaattggtgaagtcagctacattggtttaggcatggccgatttaaccgctttcgtcccctattacagcggtttaaaggcgtatccggcaaactatactatgggtacggataaagccgacagtcagtctatttactggaagtaccggaaattacaaacattaacaatgacggactaccctaagctcgctcccatcgtgaagaaagcctacgccgaatgggaggccaaaatagcgaaagagcagcaagaagtcgaagcggaatatctgaatatggctaaaaccaataaagatgcggcggataaaatgttgaacgattttaatttacggatcatggctgatgcagaaaagctgacggaagcgttaacaaatcaacttttcactcttcgtacccaggatattcaatccgatatcttctttgccaatgcggcgaaaaaggactga

SEQ ID NO: 374850 - DNA, 1263 bp, Salmonella enterica
atggcattaaccgataccgctatccgcaagatcaaacccgccgataaatccttcaagctcaccgacagttcaggactgtacctgctgatcaaacccaacggctcaaaactctggtacatgaagtaccgcatcgacgggaaagagaaaaagctcgccttcggcccttaccctgacgtttctctgtttaaggcgcgacagttacgtgatgccgcgcgtgcgaaagtacgtgaaggagtcgatccctccgctgacaaaaaaatcgcgcgacagaaaaagaaaaacggtcatacgttccgtcagatcgccatgaactggcacggtgagcacaaacgctggtctgcgcattatgcgaacaccatccagcgcaggctggaaatgtatgtattcccggatatcggcgacagccttatcgatcagatcaccacggaggcgctgttattcacattgcgtaaagtggaaaacaggggctttctggagatcaccgcgcggctgaaaaactacgtcactgagatcatgcgctatgcggtgaaaaaacagttaatcaaatcaaacccggcgctggatctggatggcgaatttaccccgccggaaaccagccattacccggccctgccgctggataagttgcctgaactattatcccgcacagacagttactgcggcaggctgctgacccgatacgcccttaagctgtcgctgctgttcttcgtgcgatccagtgaactacgctttgcccgctggagtgaaatcgactggcagcagaaattatgggtgatcccggaagaacgggagcagattgagaacgtcaaattttctcaccgtggcacaaaaatgaaaacacagcatatcgttccgctgtccgatcaggctgtcgcgatcttaaagcagatcgaagcgctttccggccatctggcgtttattttccccggcgaatacgatcaggataagtgtatgagcgacaacactattaataaggcgttgcgcgtgatgggctacgatactaaaaaagagatctgcggccacggcttccgggcgatggcatgcagcgcgctgagtgagtcggggctgtggagcaaagaagccattgaaaaacaaatgagccatcaggaaagaaacagcgttcgcgccgcttatatccataaggctgaatatctggaagagcggatcgcgatgatgcagtggtgggcggattatcttgatgcaaatgacagcgggtatatttcaccttatcagtttgccagtcggctgaaaaaagcctcgtaa

SEQ ID NO: 374851 - DNA, 468 bp, Salmonella enterica
atggctacgatccccactcagacacacccgttacttgctgtacccttcaatgccgccacggacttcaccgtccttgccagccattgtgaaaatttcgccgaaaccctgactgaaagtaaagatatagcgttaaaaatggcgctctgcggcaggatcaatgcctgtctgacactgcttcagcccacgctgctggaacccgtccctccccatcttgttgaaagtctgaccgtcgatacccttcctgttagcatcccccgcttcgaacctgaatgtaccgaaatttgtagctactgccttgccctgacgcagacgctggcagaacagggattttcctctgaaacaggaaaatttctcagttggctgctgtttgatctggtcagctatttcgctgcggaaatgaaagccccgcgctggctgcgtactgccgacggtgtgaagtttattgacgacgtggaggtaaagatatga

SEQ ID NO: 374852 - DNA, 228 bp, Salmonella enterica
atgatgcagcccgactggcatcctgctgatattatcgcggcattgaaaaaacagggaacatcactgtccgccgtttcccgccagtcaggactggcatcttccacgctggcaaacgcgctgataaggcactggcccaaaggcgagaagctgatcgccaaagcgctgggcgttgcgcccgagcaaatctggccgtcccgctaccgtaaaccggaataccgccagagctaa

SEQ ID NO: 374853 - DNA, 882 bp, Salmonella enterica
atggggaaattaggtagtgaaatgaaggcgctggcaaaacgctgtggcggcagccataaaacggtgaacgatcgcattcatattgtgcagcgtttcgatcatcacttacgggcgctgaacatccagatccagaaggtggcgcagattaaggttcgccacattgaaagctacattcatgaaagactggcgcaggggatcggtaaacgcacgctacagaatgaaatggcctcgctgcgtgccgtactgcaacaggtcggacgtaagcaggtggcagagcatgagcggctgactaatacatcgttgggactttctggcgcatcccgcagcggtacgcggcaggccatcacgccggatcactactgccatgtgctggaaacggcccgcgctaaagatccggggctggcggcagcactggagcttgcacggttgatgggattgcgctcgcaggaggcggtgcaaagtacgcagtcactgaaaacgtggaaacaggccattgaacgtggcgatacgcgtctgacagtagttttcggcaccaaaggaggacggcctcgcgaaacggtgattctggatgctggcgcagtccgaagagcgctggagaatgcgctggctattgcagaaagctgtaacaacaggctgatcgacaagcccgatctgaaaagcgcgattgattactggcacaatcaggtaaaacgaattggtctgactggcgcatattccccacattcgctgcgttatgcgtgggcgcaggatgcgatacatcattatctggcgcaggggttcagcaggaaagaggcgctggcaatggtggcgatggatctggggcatggtgacggacgtgggcgatatgtggcgcaggtttatggattacagcgagaagtatga

SEQ ID NO: 374854 - DNA, 1086 bp, Salmonella enterica
atgcacgtcgtttacggagaaactattaacgatgtaataatgaagatcctagaaaaagtgcttactgatggtgtcagcatatcgactaggaacggtgatgctataactatctacgatgttagtatgatcttgcgaaacccaagatcaagacatttaagtttagttggtcgaaaaaataacatattctccacttttgctgaagccatgtgggttctcgctggagataaccgcattaaaccatatctaactttttttctcccaagagcacctgaatattcagatgatggggtcatttggcgagcagcttatggcgaaagactctacgctcatgggcaactcgaaaatgtgatacaacaattcaaaaaagatggaatttttaccagacgagcagttattagcctatacatgcctgaccgagacactaatgacagtcttaggcacatatacaacttagagaatagcgtcgatataccctgtaataatttaatacacttctttattactccagacaaaaaattaaacgttaaaatcattcaaagaagtggagatctgatatttggtgtaagcaatataaatatatttgaatttagtttacttcaagacattgtactatctgtattacagaaggaagttgatagtcaaattacgatgggatatttgcatcaatcagtaacaaaccttcacatatatgaatgtagaataaatcaagccaacgagatacttaaaaacaaagaaaaacaaataacaaatttaataaatgacgatgatatatcattcccaccttcactaattggcataaaatcattattcaatgatattgtttcatttcttgatataataataacaaccgcccctcagaaaataagcacaatagacaaggagagcgagaaactaaaaaacatatttgtaaaacatgcaataaacactgaaagaaacttgctctggggatacgcagaagcagcgttgtcatatatatatcaaaaaagatttaatcagccaatatcgttgacagctgcattaagtaatgatttcaatttaagcgtaagttcaaattattttaataaaaatagtaaggaaagaatatga

SEQ ID NO: 374855 - DNA, 558 bp, Salmonella enterica
atgaaaattgcattcatgggggtatctggcagtggaaaagattttctcgccaattatctaatatccgatcatggttttattagattatcatttagcgatcaactaaaaaaattggctaattatatctatccatggatgaaaaaagattatgcgcctgaagaaaaaatgctaccactaaatgttagcttacctactggcgaattaatttgtcactcaccaagagatatatggctaagtctaaatagtttaaggggcattgaagaaaagatatttattagaatgttatcagaagaactaaaaattttagaagataacagcaaaataaataaaaaaataataattactgatataagatctaatgcagaattcatgtggtgcaaaaacaatcaattcattataatccatatagaaagggaaattaataattataaagaatatgatattgataagcatgtaattgagaacaaaataaaatcagactatcatttcagtaataatgaaaacggaatagatagctttaaacgtttctttgaagaggtattgctcaatggattgtaa

SEQ ID NO: 374856 - DNA, 552 bp, Salmonella enterica
atggattgtaaaaatgatcagcttttttgtaatgtaagagaaataaaaatcaaaactgctaagcctattttaaatgaaagtgtcattagggagtggttttatcatcagagagagagaacatcgatatattacaagaaagaaatacttaatcttccaccttattggacaaatgacaaaattttgagaaattataagtttgtaaacactaaaagaacgtgggacagagaaacaaaatggctattaaataatgtaacaaataataacagcgtaagttatgaaaataaaatcctcaattcattcttattcagggtaataaacaaaggtgacacattgaatgccatcggtgcaccatttgatttttcaaaaatgaccatcattgatattgacaaaacaattagagataaagttgagaatatatcatcaaaaaaaccagactatgttttttttaatgctgcttatattttgggtagaccaaaggttaactttggaagattcttagaggaaaaaaagaatgatatcgaaaaaaatatagtcattttcaggaattggtga

SEQ ID NO: 374857 - DNA, 246 bp, Salmonella enterica
atgaatagcgaagagtgcctattttggtttactattaaccagaataatatcgcagaaagatataatgaacgatgggacatggatgagatctttcacttcctacctaaagaagaaagagtttatagtttgatggatatggaaaacagcggcgcatgtgagatagataaaagatgtaggactaagtttggtaacaaaagaccaaaacaaaaatatcattacaaaaataataacttaagattactttga

SEQ ID NO: 374858 - DNA, 492 bp, Salmonella enterica
atggctaaagaaattaaaaaaaatgtttttgttagtcatcatcacaaagatgatgctagtgttgatggcgtttctcgtttagctgcagcaaaaggttatcagctacgtaatagttctgtcagaatgaaacctgaaaaccagagacgtgcagatgaaaaaaagattagcgatagaacgatagcacgcctacttagaatgaaaatgagatgggctggtcaagttatagtggttattgggaaagaaacacatacaaggccttgggtaaactgggaaattcaagcagctcatcaacttggaaaaccaatcataggtgtgtatgagaatggtttaaaaggagaagtaaaactacccgaaaatctcgaaaaatatgcaactactatcgttgcctggagaagcgatgccattatcaacgcattagaaggaaaaacgagctttgaaaaacctgatggaacagaacggggtaaaggacaaggaggtaatgtcgtatgctaa

SEQ ID NO: 374859 - DNA, 666 bp, Salmonella enterica
atgctaattgaacctaactctcatctttatgcttatataataacgcgagattttggttttgcccctaacccatttcatggttattgtactttagcaacatgcaaacctggaattagaaaatctgctaaagtgggtgattggatattaggagttggaggcgttaatttaaaaaaagttaaacataaatgtatcttgttaatgaaagttactgaaaaaattagctttaatgattattggagagataccagattctctatcaaaaagcctgctagaaatggtagccatgtacagatgttgggagataatatctaccatcaagatgacaataatcaatggattcaagaagactctcatcatagcaatgctgatggctcatttaatatgaccaatctaaaacgtgatactactgccgaccaagtgttgatttcagatcatttctattatttcggtgataaagcaattgaagtagacttagactcgattgggtatcatggaggtataggctataaaaagatcctcttagaacaatctatacccgctaatgatcttataaaaaaaatagaacttgaatttcgcagtgacaaaaatttagttatatctgacccatgtcaattttctgattactataaacgtgttgatcagggaacgggagagatctatttataa

SEQ ID NO: 374860 - DNA, 570 bp, Salmonella enterica
gtgatagagatatttctatctgccagcgtacctttgcccaatcgtgatcgagcatttttcgatactgctgatgttcttgctattcgggaagcgataaaagcgttagttgaagtagtgttgccgattggacgaattacgtgtggtggtcatcctgcaataactcctctcttggcgttattttcacgtgaggccagcctggatcgtaatcggttggcaatttaccaaagtaaactatttgaggggcgcttgcctccagaattggaaaatttcgtcaacgtacacatggtgcctgcggttaaaaatgacagagaggccagtttgacagccatgaggcgtgcaatgatcgaaagtcaaaatttcaacgcagctgtgatcatcggcggcatggagggcatctatgaggagcataaactatttacggaatcccatcccaacgctgctgtgctgcctctctcaacgacaggtgccgccgcaagaatcatttatcaacaggggcaatatgatccgttatttgcgcgtgatagaacatattctagtttgtttcgtcgaaaactgctgtctatcagttaa

SEQ ID NO: 374861 - DNA, 1188 bp, Salmonella enterica
atgagcgatacttcaaatataagatctccataccagcttattatgcttggtgcggccaatgggcatgataatggcctacgtcataatatagattcggcgcttcagaaactggggatccctacttgctcgatcaagtacttctacgaattcaacgcagctgaccgcagcttaaagttgccgacgatggccatatttttcggctctccagaaaatactgccgatacagcacttgttacagaattgattgacgattcgaatgttatcgctccgatcgtctcagatttgtctcaagtacatgaggaaattccgccgcagctaagacacataaacgctattgtgttgggctccaacgatgaaggaatcgaccgtctagtcacgttagttctcgagactttccggttgttacgacgtgagcgacgtttgttcatcagctacaagcgggctggctctcagcccctagccgatcgattgtacgatgctctagatgctcgcggttttgacgtttttattgacgtgaggtcggtacctccggccgcagatttccaatctcaactttggcacaggatgtcggattccgatgtcgtggttctgatcgacactcctggattcagagaaggccgctggacttccgaagaactggctcgcgctaatgcgaccaatgttcaaatcttgcatcttctatggccggggcaaaaggaagatccagcatcatctttcagtcacttcatgaagcttaagcgtagcgactttgttggatgtcttcctatgcggggtcgttgggcaacaaagggactggtgaaaagaatatgtgacgaggtcgagcgactgcgcgcaccggcaatcgctgcccgccaccgatatttggttgataacttttgcgacgcagcccgcgatgaggggtttaatccaatcgttcagattgaaggctggatttctcttgaatccaagtcagaaaggggactcgctatagtgccagcagtgggtatacctacttctgatcgtatcaatgaagttttcgaagccatcactcataatgctgttgaaacgaaggagatatggatgatttatgacaacagaggcgtactgaaaacttggctctcacatctagattggcttgattcctatttaccgatcagggctatacagatgtcgaaggttccccaacttctgaaggagttcattgcgtga

SEQ ID NO: 374862 - DNA, 603 bp, Salmonella enterica
atgccacgtagaacatttttttcctttcactatgggcctgatgtctggcgcgcttggaatgtccgtaacagttgggttgttagggaagccaatgaggaagaccggggtttctttgatagcagcgtgtttgaggcatcgaaaagagagagtgacaatgcactaaaaacttttctccgcaagggattagacaacacttctgttacctgtgtccttgctggaacccaaacatgggaacgtcggtgggtacgctatgaaattgcccgtagcgtcatcaaaggaaatggattacttaccgtttacattcacggggtccaaaacaaagacaaggagacatctataaagggggctgatccattagcacagatgggcctttatagaaccgagcatggcatctatctcgccgaatggaaaggcggaaagtgggtagcttatgcagattatactcttgcaatcccggagggggatctatggttcactgcgccaaaaacaaacaacgtagtcccactgtcaactcactgcctgagctacgatttcattggccaagatggcagaaaaaatattggcgggtggattgaaactgctgcggaaatggctggtcgatga

SEQ ID NO: 374863 - DNA, 441 bp, Salmonella enterica
atgacaagaaaagtattttttagtttccagtatgaagacgtacaacgtgcgatgaatgtacgaaacagcaacgtgatcgcttctgacaccaaggtgggtttcatcgacaaagctgatttcgaagaagttgagcgtaagggagattctgccattaagaaatggataaacgatcagctttacggtacgagcgtcactgtagttcttattggagccacaacagacaagagcaaatgggtaaagtacgagattgagcaaagcattgagcgcggcaatggcatcttgaccattgatatcagtaaaatcgcagatctgaaagggaacactaccgactgctgttcgcttcgtgttcctggtgcccttcactatttatggaacaaaggaaatggtcgagagaacttagggaagtgggttgaggccgttgctgaagttgctggtaagtaa

SEQ ID NO: 374864 - DNA, 1434 bp, Salmonella enterica
atgaaaagagaacttctgcgcctcatcgacagtctgtctaaagagctagacgagggcaatcttgcagtttttgcaggtgctggtttatcccgatcagcgggctttgtagattggaagtcactgttgaaaccaatcgctgacgacttagatcttgatgttgaaagagaatgggacttggtgacccttgctcagtaccatgctaatgccaatgcggcaaaccgctcgaaattgaatcagatgcttgtctctgaattttcatctggtttagcaccaactgagaatcatgaaattctagccagactaccaatccagacctattggactacaaactacgacaagctcatagagagctcgcttgaacgaaatggtaaaattcctgacgtcaagtacaccaataagcaattagcaactacccgtcccaagcgagatgctgtcgtttacaaaatgcatggagatgttgatcacgcatcagaggctgtgctgatccgggatgattatgaacgctatcacataaagatgcagccgttcattactgccctcagcggtgacctgatagctaaaacttttcttttcttggggttcagcttcactgatccgaaccttgagtacattttgagtcgagttagaattcaatttgcgcaggaccagcgtcagcactattgcatcctgcgtaaggctagcagacaggaaggtgaagaactggccgatttcgaatatcgtgaacgcaaagaagaactcttcaggcatgaattgctacgggttgggatcaaggttgtaagtgttgatgagttttctgaaatcaccgatatcctgagagaaattgaacgccgccacaaacgtaaaaccatttttatatccggtgccgctcatgactacactccctggagcgcgtcagaggcggaacagtttgtttacagactaagcaaagctatcagtaaacagcagtatcgtgttatctcaggattcggtctggggatcggcagtgctgtcatcactggtgtactcgaagaaaccattatgaatggtggtcgtctcgacagtgatcaattagtccttcgcccttttccccagagtcagtcaggtgaacgtgctttacctgagctctggaccgagtaccgccgtaacatgcttgctcacgcaggtgttgctctctttctatttggtaacaagttggataagacaggggctgtagtgccatccaatggcatgcgtgaagagtttgatattgcaatagctaacggtctttttgttattccggttggtattaccggttcgatctcagccgaactgtggcaagaggtaattaatacctatgacgaatcgaagtaccagcaaggcaagaagatcactcctctacttcataaactgggttcccaagatactgacttggctcatgcccatgacgtcatactctctctcctatccctcatctaa

SEQ ID NO: 374865 - DNA, 498 bp, Salmonella enterica
atgccgattcttcagtcagaccttcttaacgcaggcctacgccgctctgcgcagaggcaattaaccaaacgccttggtcagcccacagcctttctaagccacagccataaggatgccccgcttgcgctaggactacaggaattgctgaataatcaagggtgggatgtctacatcgactggcaagatcagacaatgcctgagaaaccgaactctgagacagcctccaatatcaaagcagccattgttcgcgccgattggtttttctttctcgcaacacggcattcaatggcatcgcgctggtgcccatgggaaatcggttttgcggatggtaaaaagatctatgaccgcatcgctattgtccccacccaagacaatctgggacatttctatggtaacgaatacctgaatctctataacaaaatcgatgtatctactggtacttctgaccttgcattttttgatacccgtggcaatggcaagtgggttcgctacctttaa

SEQ ID NO: 374866 - DNA, 735 bp, Salmonella enterica
atgtctttaaatgattcaaaaatccgcaacttaaaaccctcttttaaacccgtaaaactgtctgattcgcacggtctctacctgctggccaatcccggcggttcgcgtatctggtatctcaagtatcgcttcaacggcaaagagtcccgcgtcagtctgggcgcgtatccgctggtttcgcttgctggagcaaggcaacagcgcgacggcgtccgtaaactactggcgcagaatatcaaccccgcccaacagcgcatggctgataaagccgcagcttcaccggaaaagtgttttaaagcagtggctctggcatggcacaaaaccaacaaaaaatggtcgtctgactctgccacgcgtattcttgccagcatgaaaaatcatatcttcccggcgattgctcatctgcccgtcaccacgctgaaaacgcagcatttcacagcgttactgagagttatcgagagaaaggctttctggaagtcgcgtcccgaacccggcagcagctttgcaacattatgtgttacgccgttcagcagggacttaccgaaaacaacccggcgttgcatctggaaggcatcaccgcgccgccggttaaaaatcactatcccgccctgcctctggagcggttacctgaactgcttgaacgtattggcgattaaccgcttcgacatcggatatagccactccttcgtattttccattcttaaccatcccattttcaggtgcgtcggcaattaa

SEQ ID NO: 374867 - DNA, 324 bp, Salmonella enterica
atgggccacgctaagattagcaactctctgggaaccattaacacggacctgctggatattgagttccttgatattcacgccagcataatgggcaaaaaaccacaggagatataccagcgtcacgagcgggatttcatggatcctaagtacgtagatttctcgtcacgcgggatattccacttacaggttggcggtggagaaaacactggtgtggtaagcgcagttaataacaatagcaactggatgcgcgcgaagctggcggcctatagtgataatccgataaaatttgaagagtgctccattaagatagttctctttctgtga

SEQ ID NO: 374868 - DNA, 1455 bp, Salmonella enterica
atggaacataaaggcacaaacctgacgcccgagcaggcgctggatcgcctggaggagctgtacgagcagtcggttaacgcgctccgtgaagccatcgcctcctatattgataacggtacgctacccgatccccatgcaagacttaatggactctttgtttatccttcgctatctgtaagctgggatggcgcgactccgaacctacctaaaacacgcgcttttggacgctttactcatcccggctgttataccactaccgttacgcggcctgcgctatttcgcgcttatctcctgggacagcttaacctcgtttatcaggattatggcgcgcatattgcggttgaagcctcacaccatgagattccgtatccttacgtgatagacggctcagcgctgacactggatcgttctatgagcgccgacctaacgcgccattttcccacaacagaactggcgcagattggcgatgagacggcagatggtctgttccaccccggcgagttctacccgttatcgcactttgacgcacgtcgcgttgatttctcgttggcccggttacgacactataccggtacgccagtcgaacattttcagcctttcgtgctgtttaccaactatacccgctatgtcgatgagtttgtgcgttggggatgcagccaaatccttgatcccaacagcccttatatcgcgctttcctgtgctggtggaatttggatcacggcggaaactgaagcgccggaagaggccatctccgatctggcttggaaaaaacatcagatgcctgcctggcatctggtcactgcagatggtcagggtattacgctggtgaatatcggtgtcggaccttcaaatgctaaaacgatttgcgatcatttggccgtgttgcgccccgatgtctggctgatgattggacactgtggaggattacgagaaagccaggcgattggtgattatgtgctggctcatgcctacttacgcgatgatcacgtgctggatgccgttctgcctcctgatattccgatcccaagtattgcggaagtacagcgtgcgctatatgacgctaccaaagcggttagcaggatgcccggcgaagaggtgaaacaacgactgcgtacgggaacagtcgtcacaacggatgatcgtaactgggagcttcgctattccgcttctgcgctgcgattcaacctcagccgtgctgtcgcgattgatatggaaagctcgacgattgcggcccagggctatcgcttccgcgtgccgtacggcactttgctttgtgtctctgataaacctttacacggtgaaataaaactgccagggcaggcaaaccggttttatgagggagctatttcagaacatttgcaaattggtattcgtgctattgatttgctacgcgcagaaggtgatcaactacactcacgtaaattacgcacctttaatgaaccaccgtttcgctaa

SEQ ID NO: 374869 - DNA, 708 bp, Salmonella enterica
atgtcaccgactgatattaaagcaaaaaatgcaaacccccttgagaaggaatacaggctgactgatggctttggtatgttccttcgtgttactcctaaaggttcgaaatactggcagatggcctaccgcttcgaagggaagcaaaaactcttctctattggcgtttaccctgctgtttctctttctgacgcaagacaacgccgtgatgaggccagaaggcttcttgctcagggcattgaccctaatgcaaagaaacaggcagaggttaaagaactaaaggccaagcgggataagacacgcaccttcgctatggtggctaaagcttggtttgccacgaaaacaaaatggtcaaaggattatggtgattccgtatggaagcgccttgaaacctatgtcttcccggctactggcgataaagatgttgccgagctggatacgggtgatctgctggttcctgtgaaaagggttgaggcacttggttatcttgaagttgccatgcgcattcaacaatacattacagcgatcctgcgtcatgccgtacagcaaaaactgatacgccataaccccgactatgatatggaaggtgctgttcagaaaccacagactcacatccagctatgcatcatccatatggtgcgtaacagcctgaaatgcgtgtcctggaaggactacaaagccgtcactagcgggctaaaagcagtttattag

SEQ ID NO: 374870 - DNA, 339 bp, Salmonella enterica
atggcgctggatgcgttcgcgggcgaatgggacgataaatatccgcaaatcagcaaaagctggcgtgcgcactgggaaaaccttaatacattcttcggctacccgccggatatccgtaaggctatcgacaccacgaacgcgatagaatcgctgaacagcgtgagccggcatgccatcaaaaagcgtaaggtgttcccgacagatgactcggtgcgaaaggttgtgtatctggcgagcaaggatgcgtcgaaaaaatggagtatgccgatccagaactggcggctggcaatgagtcgttttattatcgagttcggtgaccgcctgagcgctcacctttaa

SEQ ID NO: 374871 - DNA, 2928 bp, Salmonella enterica
atgagtacatctgattatagtaaaactccgacgatcacgacatatgataaccgtcatttggccgtacgtacccttgagtggtgtcgccatccggacacgccgcagacgacggagatccgccccacctactgtcagtatgatgcacgtggttttttatcacagagcgcagatccccgactggcggctgccggactgaataattttacttgtgattacgacctggggggcagagtgctgcgtacctgcagcgctgatgccgggacgtccctggcgctgagtgatgctgccggacgcactgtactgggaatgagtggtctggtggtgacggcgtcaggcagcacagatatgagcagagcggtgactacccgacggcaatacgaggaccgcagtctgccgggacgtctgctcagcgtggttgagcaggccagcggcaagacgggtcgggtgacggagcggctgatctggtcggaaagtagcgcgaaggcaagcgcgaacaacctggtagggacgtgcatcaggcactacgacccgtcaggatgcgtcgagattggcagtatagcgctaagcgggttggcgctctcggtaacgcggtggctgatgacggatgatgaggtgcaggctgactggcagggggatgaccgcagggggtgggatgcacaactggacgacgtaccctatgctactttgagccagggcgatgcggccggaagagtagttggtatcaccgacgcagtgggcaacaagcagcggatggtgctggacatagcaggaatgtcaacaggccgcaggctgacggtgaacggagaggagaaggtcatagtcaggtcgactacccgaagcgccgttggacaggtgttgcaggaggagcatggcaacggggtggtggtaaaccgggagtacgagccacagacgcagtggctgaaaaggataaaaacagaacgcccggcagggcatccgcagggggcaggagtgcttcaggacctgcgttatgaatatgacccggtaggcaacgtgaaatgtgttcgcaatgacgcagaagaaacccgattctggcgcaaccagcaagtggagccggagaaccgatacggttatgacagtctctaccagttggttagcgccagcgggcgggaaaaggttaatataggccaacagaaccgttccttcttccccgccgacagtatctcctgtacccgttatctacgcacctatacctacgacagcggcaacaacctgactcggatacgacacagcgcgtcgggaagtggcaactgtcacaccacatatatcaccgtcagcgacagcagtaaccgggccgtattacgttctctagcagcgacgccggcagaggtggaaatgcattttggcccaagtggggaacaacttcagcttcagccaggccaggcgctggcatggacagagcgtggggagttgttacaggtgacgccggtggaacgtgaaggagcgcaggacgattgggaatactatcgatacgatgcgagaagccagcgagtggtgaagggaagtcggcggcagacagggagtgggacgctgacccaacgggtagtatacctgccggggctagagctgcgaacgaaaagcagtggagaaagcctgcagacagtggtatcggataacgtgcggttattgcactgggagagtggaaaaccggaggggcttagtaatgatgggctgcgttacagctacgagaatctgacaggaagcagtgggctggaggtggatgaggatggctgcatcattagtgtggaggaatactacccatacgggggaacgtctgtctggagcgggagtagcgaaacggaagcagactataaaacggtgcgctattcaggcaaagagcaggatgcgacagggctgtattattatggttatcggtattatcagacgtgggcgggaaggtggactagcgcagatcctgcagggacggcggacggcctgaatatgtaccgcatgtgtcggaataatccggtgacgttcagggatagcaacggtttgctgacggaaaaggaaatccagattctgatgttccagaccaggcaacatatgagtcagaccggcaaggatcttgagtcggtaatgcacaatatcctgggattaaacggtgatgacgcggcagtgatccgtagccgactgggaaatacgttccccgagcctagggcaagtacatccggtataaatgaaatcacggcttttgaggaacaaatagaggccatgagtatgccagggggtagtccccttcatatcgatcttcccagcctcatgccagagaattttcaatacccgctgtacccggactgttgtgtagaattgccgccgttgacttcttcggatacatccgatgatgacatgtacggagtggaaagcccagagatgtcgcttccagagattactccggaattgatgacgtctcattttccgaatatgtccgaagctgacaggcaagccttagaatatattgcgaaccctgaaaacttttcccatacattatatgctgatggcacggttgtatctttcagttataaacgattccccggtcgttttacaaataattataaaccagatacatgggcatttctatgtaactttaaatcacaagaaattgataagggagtttatccttattttgccagccatgtcgcgcaatatcaatatttactggcagcagtctcaggtggatgggtaggacagatgccatcaactttgatcaggaaaaatgtcattaatgaggatacaatagcgaacactgctgggttaaagggcgagcagttaatgtcggcttttcttaataatacgccaaatgggaaatctaccgctaagattttggaggcttttaatcttaacgctacgtcagttaaaatcaaaaacacttatggagatgtcaatttttatgtaaatttaaagcgtaaataa

SEQ ID NO: 374872 - DNA, 519 bp, Salmonella enterica
atgaataccgaagcaattgaatcgatggttcgggacgtgttaagccgcatgaatagcctgcaggggcaaacctctgtgtcggccgccgtgggaacgtcaacgcacacggcgaaagtcagcgattatccgctggcaaataaacatccggaatgggtaaaaaccgccaccaataaaacgctggatgatttcacgctggaaaacgtactgagcgacaacgtcaccgcccaggatatgcgaattacgccagaaacactgcgtattcaggcggctatcgctaaagatgccgggcgcgatcgcctcgcgatgaacttcgaacgtgcggcagagttaaccgccgtacccgacgatcgcatcctcgaaatctacaacgccctgcgtccctatcgctccacaaaagaagagctgatggccatcgcggacgatctggaatcacgctatcaggcaaagatatgcgctgctttcgttcgtgaagccgcgacgctgtatgtcgaacgcaaaaaactcaaaggcgacgattaa

SEQ ID NO: 374873 - DNA, 1833 bp, Salmonella enterica
atgcaatatatagctggcatagacatcggtaactcctcaacggaagtcgcactggcagcgttgagtgattcaggcgagctgataataaaaagcagcgcgctagccgaaaccaccggaatcaaaggcacattgcggaatgtgttcggcattcaggaggcgcttgcgcttgccgcaaaaaacgcaggcatcaatgtcagcgatatttcgcttattcgcatcaatgaagctaccccggttatcggcgatgtagcgatggagaccataacggaaaccatcatcaccgaatcaacgatgatcggccataaccccaagaccccaggcggcgtgggtttgggcattggcgtaacgattacgccgcaagaactgctcacctgcccggcagataaaccttacattctggtggtgtcttccgcttttgactttgctgacgtcgccaccatgatcaatgccgctgtacgcgccggttatcagctaaccggcgctattttacagcaagatgatggcgtgctggtcagtaaccggctggaaaaaccgctgcctgtcgtagatgaagtacggtatatcgaccgaattccactgggaatgttggcggcaatagaagttgccgttcctggaaaagtgatcgaaacgctgtctaatccttacggcattgccaccgtctttaatcttaattcggaagaaaccaaaaatattgtgccgatggcacgcgcgctcattggcaaccgctcggcggtggtggtgaaaacgccttcaggggatgtgaaagcccgcgcgatacccgctggcaatattgagctactttcacagggacgcactctgcgcattgacgtcgccgctggcgccgatgccattatgaaagctgtgagcaactgtccccagcttgataatgtcacaggcgaagctggcaccaacatcggcggaatgctggagcatgtccgtcaaacgatggcggaactgaccaacaaacccagcgctgaaatctttatccaggatttattggctgttgatacctccgtaccggtgagcgtgacgggcggactggccggagagttttccctggagcaagcagtaggcatagcctcaatggtgaaatcggaccgtctccagatggccatgattgcacgtgagattgagcaaaaactcagcattgacgtccaggtcggcggcgcagaagcggaagccgctattttgggcgcactaaccacgcccggcacaacgcgcccactggctattctggatttaggcgcaggctcaacagatgcttccatcattaatcccaaaggtgaaattatcgccacgcatctcgctggtgcgggcgatatggtcacgatgattattgcgcgtgagctaggacttaacgatcgctaccttgcggaagagatcaaaaaatacccgttagcaaaagtggaaagtctttttcaccttcgccatgaggatggcagcgttcagttcttccccgctccgcttcctcctgaagtattcgctcgtgtctgcgtcgtcaaacccgatgaactggtgccgcttccgggagatatagcgctggaaaaagtgcgcgctattcgccgcagcgcaaaagagcgcgtatttgttaccaacgcattgcgggcgctacgccaggtcagcccaacgggcaatatccgcgacattccgtttgttgtcctggtcggtggttcggcgcttgatttcgaagtaccgcagctcgttaccgacgcgctggcgcattatcgtctggtggccggacgcggcaatattcgtgggacagaaggcccaagaaacgctgtcgccacagggctgattctctcctggcataaggcatttgctcatggaaagtaa

SEQ ID NO: 374874 - DNA, 378 bp, Salmonella enterica
atggaaagtaatcacaatttacccgctatcgttatcaccactctgagatgccatatatccgactggcaacacgtattgctgggtattgaggaagaaggcataccctgggtcgtgcaggaacaagaggctggcgaggtgatctatcaggcatggcttgccgccagccgctcccccttgctcgtcggcatcgcttgcgatcgggaaaaactgatagtgcattacaaaaatcttcccccatcagcgccgctttttacgctgacgtatcaccaaaacaactgcgctcagcgatgcaccggcaataacgctgcgcgactggttaaaggcattcctttcagggaatgtgactcatcatcgacaggagaaaagcagtatgaataa

SEQ ID NO: 374875 - DNA, 444 bp, Salmonella enterica
gtgaagcaatcactgggattacttgaagttagtggtctggcattagccatcagttgcgcggatgtcatggcgaaagccgcttccatcacgctggtgggcctcgaaaaaactcacggctcaggctggacggtgatcaaaatcaccggtgatgtggcctccattcaggcggccatcatcaccggcgcaagttttgccgaccaacggcatggtctgattgctcataaagtgatcgccaggccaggagacggtattttagccgttatccccgaatccgctcccgccattgcgcaggcagcgccgattaaggaacctcaactgccggaagtacagcaagatttatcgcctcttattagctgcaatttatgcctggaccctgcctgcaagcgccaaaagggcgaaccccgcacgcaatgtctgcattcaggaaaacgaggtgacgcgtaa

SEQ ID NO: 374876 - DNA, 633 bp, Salmonella enterica
atggataaaacgcttcttgaatccacggttcataaagtgctggatgagctgcgcaatcgccccattccgctcggtgtttcaaatcggcatatccatctctgcgccgcagattacgcgcgacttttccccgaacaggccatccgcgaaaaaaaaacgctgctacaaccgggacaatacgcggcggaacagaccatcacgctggctggccctaaaggtcagttaaaaaaggttcgactgctgggcccgctgcgaaacgtaagccaggttgaaatatcccggaccgacgccaggacattaggtatcgccgcgccgctacgtatgtctggtgatttgcagggaacgccgggcattcgtctgataagcccgttcgccgaactggagttagcgtccggcgtcatcgtcgctcaacgccacattcatatgtccccgcttgatgcgctgatcttccgcgtggcgcatggcgataccgtttctgtcgccattgaaggcagcgaacgcaggcttattttcgacaatgtcgcgattcgcgtctcgccggatatgcgtctggagatgcatatcgacacggatgaagctaatgccgctggtgccgacgatcctcatactttcgcttctttggtagcccgacgatga

SEQ ID NO: 374877 - DNA, 492 bp, Salmonella enterica
atgaacgaagacaaagtacaacgcattgttgaagaggtcgtctttcgtctgcagcgacgggcgcaaagcaaaattacgcttagcacagcccagctccgggacgccgattcacgcacgctgttttcccggtatggcaatctgcgcattttgctggcggaactgcctctgctcaggaggatcgctgaacaaaacgacagcgatattaccgctatgaagatccactgcgcacttgcgctgggggtcaacgtacaaatatcgctgcggcgtactttgttagcatccttaccggtgaaaagactggcgcgtctgccgttgagcttttgtgatgaaaaaggccaagccatcattctgcactcgggtcaactcctgagttattccgacattgtccggctaacgtgccagattctggtacttcgtcgccgatgcatcgttaccgcactggcctacgaagcggccagcgtccgaaacattcaactgattaggcaggagtaa

SEQ ID NO: 374878 - DNA, 1008 bp, Salmonella enterica
atggcgatttacacccgaactggcgatgcaggcaccacggctttatttagcggacaacgcgtcagtaaaacgcatccacgcgtcgaagcgtatggcacgctggatgaacttaatgccgcattaagcttatgcgcttgcgccacgcaccatccacagcatcgtcgctttatcgaatctatccagcagcagatcttctggtttagcgccgaactggccagtgaaagtaaacagcctaatccaggtcagcgttatatcagcaccgaagaaattgccgtactggaagcggcgatagatgcggcaatgtcacgcgttgccgttgtacacagctttattttaccgggtcgctgcgaagcggcgagccgactgcactttgcgcgaacgcttgcgcgtagagctgaaagacgcctggtggaactgagcgcggacattgccgtcagacaggtactgatgcgttatatcaaccgtctgtccgactgtctgtacgcactggcgcgtgcagaagatcatgacgctcaccagcgccacattattaacgaagtgaccagacgttatctcgcctcaacttatccctcaaccattaaggaatcttctatgtccctttcgtttcaggagctccatcagctaattcgctccgccgtggcgcgggcagaagagcttcatgttccggttgttatcagtattgtcgatggtaacggcacgccaaccgtgacctggcggatgcccgacgcgttgctggtcagcagcgaactggcgcccaaaaaagcctggaccgccgtggccatgaaatccgccacccatgaactcgcctccgccgtccagcctggcgctgcgctttatggtctggacacccatatgcaggggaaaatcgtcacctttggcggcggattcgccttgtggcgtaacggtgtactgattggcggccttggtatcagcggcggaagcgttgaacaggacatggatattgcacaagccgccattgcggcgattgacgtgagaacatatcaatga

SEQ ID NO: 374879 - DNA, 1386 bp, Salmonella enterica
atgaatacatctgaacttgagatgctgatccgcaatattttaagcgaacagctaacgccggaaaaaacgcaaacgaaaggaaacggcatttttcagactgttgatgaggcgattcgcgccgcgcatcaggctttcttacgctaccaacaatgcccgctaaaaacgcgcagcgccattattcacgctatgcgcgaggagttggcgccgcatctggcttcgctggcggaagaaagcgcagccgaaacgggaatgggcaataaagaagataaactcctcaaaaacaaagccgcgctggataacacaccgggtattgaagatctcaccacaacggcgctcaccggcgacggcgggatggtgctgtttgaatattcgccgtttggcgttatcggctccgttgcgcccagcactaacccgacagaaacgattattaacaacagcatcagtatgctggcggcgggaaacagcgtttattttagccctcatcccggcgcaaaatcagtgtcgctcaagctgatcgggatgatcgaagagatcgcttttcgctgctgcggcatacgtaatctgctcgtcaccgtggcagaacctacctttgaagcgacacagcagatgatgtcgcatcctgatatcgccgtgctggcgattacgggcggcccgggtattgtcgcgatgggcatgaaaagcggcaaaaaagtgattggcgctggcgcagggaatccgccctgcatcgtcgatgaaaccgccgatctggttaaagcggcggaggatatcattaacggcgccgcctttgattacaatctgccctgtattgccgagaaaagcctgattgttgtcgagagcgttgcagaacgcctgattcagcagatgcaagcgtttggcgcgctgcttctcagcccgtcggacacggataaattacgtaccgtctgtctacaggatggtcatgcgaataaaaaactggtgggtaagagcccggcgacgctactggaagcatcaggcatcgcaacaccagcaaaaacgcctcgcctgctcatcgcggcggtgaatgccaacgatccgtgggtcacgtgtgaacaactgatgcccatgctgcccattgtgaaagtcagcgattttgatagcgcgctggcgttggcgctaaaagtcgaagcgggccttcaccataccgcgattatgcattcagaaaatgtgtcacgtctgaatctggcggcgcgtaccttacagacctccatattcgttaaaaatggcccgtcatatgcgggtatcggcgtcggcggagaaggttttaccactttcactatcgccacgccgaccggagaaggtacgacgtcagcacgcacattcgcccgttcgcggcgttgcgtactcactaacggcttttctatccgctaa

SEQ ID NO: 374880 - DNA, 1113 bp, Salmonella enterica
atgaataccttttcactacaaaccaggctgtatagcggtcagggcagtctgaaggcgcttaagcgttttacgaataaacatatctggattatctgtgatgcttttctggcgcgatcgccgctgcttgatacgctacgtaatgccttgccagcaaataatcgtctcagcgtttttagcgacattacgccggatcctactatcggtacggtcgtacagggtattacgcaaatgcagtccctgaatcctgatgttgtgattggttttggcggcggttccgcgctggatgccgcaaaagctatcgtctggttcagccgagaatttggcatcgaaattgaaacctgcgtggctatccctaccaccagcggaacgggatctgaagtcacgtgcgcctgtgttattagcgatcctgataaaggaattaaatatccattatttaataactcgctttatccggatatggctattctcgatccgatgctggtggtcagtgtacccgccactattacggcgaatacgggcgtggatgtattgacccacgcgctggaagcctatgtttcgctacgcgccaacgacttcacagatgccctggcggaaaaagcgacgcaaatcgtctttcagtatcttcccgtggcggtaaacaaaggcgattgtctggcaacacgcggcaaaatgcacaatgcgtcaacgttagccggtatggcgttcagccaggccggacttggtttaaaccatgcgattgcccaccagttaggcgggcagtttcatctgccgcacgggcttgccaacgctttattgcttccctccgttatccgctttaatgcacgcgacccacgcgctgcgaagcgatacgccagactcgccaaagtctgccgtttatgcccggaaagcgctaacgaaaccacttgtctcaatgccttaacgcagcgcattgaacagctcaaaaagcagtgcgccatcccaacgcttgctgaagcgctgaaagaccaaaaacaggcttatacaccgcgtattcctgctatggcggaagcggcgttggcggatatcacattgcaaaccaacccgcgaaccactgatgccagcgctataagagagctactggaggcgctgttatga

SEQ ID NO: 374881 - DNA, 1356 bp, Salmonella enterica
atgaatactgcttcaaccgtcaacctcgccgattgcgacgcgcaaactatccgcgatcgcgtgcgcgccgctggcgtgacaggcgctggcggcgcaggatttcctactcacgtaaaattacaggcgcaggtcgacacatttttggttaacgccgccgaatgcgaacctatgctcaaagtcgatcagcaactgatggccttacaagcttcacggctgattcgtggcgtgcagtacgccatgagagcaaccggcgcgcgtgagggcatcatcgcgcttaaagaaaaatatcagacggcaatcaaagcgttgacgccgttactgacgccagccatccgattgcatatgctgccggatgtctaccctgccggtgatgaagtattaacgatatggctggcaacaggtcgtcgcgtcccgccagccgcgctgcctgtcagcgttggcgtggtggtgaacaatgtacagacggtactgaatatcgccagggcagttgagcagcagtatccggttacccgtcgaacgttaacggtcaatggcgcagtagcaagacctctgacattaacggttccgctggggatgccgttacgcgaggtgttggcgattgcgggcggcgcaacggtggacaatcctggttttattaatggcggtccgatgatgggaagtctcatcccttctctggatgcgcccgttacgaagacgactggcggcctgctggtattacccaaaacgcatcctttgatcgcgcgtcggatgcaagacgatcgcacaattctcgcgatcgccaggacggtttgcgagcaatgtcggttatgtacggagctctgcccaagacacttaatcggtcatgagctatcgccgcatctgctggtacgcgccgttaattatcaccaggccgcgacgccccagctcttactcagcgcgctgacctgctcggaatgtaacgtttgtgaaagcgtcgcctgcccggtgggcatctccccggttcgcatcaatcggatgcttaagcgcgaactcagggcgcagcatcagcgctacgaaggaccgctccacccggcggatgagatggcgaagtaccgtctgattcccatcaaacggctgatcgccaaactgggtttaaacgactggtatcacgacgcgccattcaccccgttcgaaccgcagcctgactgggtcatattactgctgcgccagcatatcggcgccagcgcgatcccctgcgtacaaaaaggcgatcgcgtagtgagaggacaatgtatcgctgacatcccgcaagacgcattaggcgcgcccattcacgccagtattgatggcatcgttcacgaaatcaccgatgaggccatcacggtcgtaagaggttaa

SEQ ID NO: 374882 - DNA, 441 bp, Salmonella enterica
atgaaacgcatcatgctcattggcccttcgcggtgcggtaaaacctcattaatgcagtgctggcgtggagagacgctccattatcaaaaaacgcagacgattatctggtcccccgccgccatcgacacgccaggggaatatctggaaaaccgctgtctctacagcgccctgctgaccagcgcctgcgacgcggaggttatcgcactggtacttaacgctgacgccgcgtggtcgcctttttcaccggggtttaccgcaccgatgaaccgccccacgatcgggatcgtcaccaaatctgatttagccagtccaccgctgatttcctgtgtccgcacctggctggaacaggctggcgcgcaacaggtttttatcaccagctcggtaacaaaatccggatttgatgaaatggctgcttttttgaatgctaaggaatctttatga

SEQ ID NO: 374883 - DNA, 531 bp, Salmonella enterica
atgttatttggaaagcatcagaaaaaaggtcttgaattaatcagaaaaacgttcaaagaaaatatcagcaatctttgtaaagaactgcgactacttgataacgaagaaaaagcattcttagtttcaattttgacaatcaaacttcgtgccccgcatacttcggatgctaatctgataaatagtaatggcacttttgatatatactccaaacaattattaattaacaataaaattccatttccggaaaggagtttaattgatgatatttatttttatctaatgacgattttttctttgccctggaagcaggagaagtgtatgagaaggcctcgattcggttccagggttcacgctgttgatattcatcaacctgtatttgaacaggtttcctgtataaatctctacgatcagcatttcccagcatcaccagacgctggaaaacatatcgacggacttagtcaagaagcggttgaaatcttaaaaaagcaagacacttctaaatatgattttatttttttggaaaagatataa

SEQ ID NO: 374884 - DNA, 1503 bp, Salmonella enterica
atgaaaaaattttatcattttcgtgattatcagagagcaaagcttgaaagccatgcgttctataagcttattgattccgatattatcccgttaaaaaacaaactaatgtttgcccctgtgatggctcattttgtgatgaacttcagggatatgaataaatgggtcataagatttgcaacaacagattctaaattcaaatctgttattaatgcaggaactactgaagacgaaacacattcaagattatttcttgaggactggagaaaactctatcttgatgataagttaaactggaaggccagcgacattatatactggttatttattagtcctgaaatggaatgtttcagaaaatatggcgtcgagtttatgcgtctttgcgttgatgataacaatgacccaatattgcgatattctcactctgaatccggagaaacctgcggtaacgtatttttttctaaaataagtcctatagcagatgaagtcgcccatgaactgggggttcaattacgctattttggttcattccatcttggccttgagaatgggcatgtctggaagtcagaaggcgtctttgaaaatgaagttctgctcccggaatattatgataaagtcagaaatttatctcagagaatgtttgatatttttacaggaatacatgatgcattctatcactatacattaaagtatattgttaaacatgaagttcataatttcagcaatcctgtcaaaacggaagggaaaattctgaccaccccctctgaaataaacattactcagacacaaaaaaataacgaagaaattatacattatgtggacagttatctcagggaaattgatgagcatcctttctttgactgggtaaaatcctctacaataaatgctgaattaaagataaaatgctttatacctctgtggattgtagatatcatgatgtacagagatatcaataattacatttttacctatatgtgccctggctcaatgggagagcttcttattaacgattatgcccggcatctggcctgccatagtgcattattttataatgactggaaggctctgaaacttgatgatatgttacgctggagtgcaagtgatacgcttgagtttatatttctgaatactgatatggactctcaccggaaaaatcttgttaatttttcactgcacggaatgaaaaataaagatccacttatcagattctggtttatgatgatacttgaattaagtggaaaatcatttttttctgttattggccaggtagcaatgcaggcagaaagtgaatgcaatatttcacttccttacctgacaggaaagcattcatcagcagaagagcagaaatcatattgtgcgctatatgaatacttcattaatcaggatatatctaaagaacaagtaaaaactataaaatatctttcagatattgttatgcggtcattattagaaaaccttgatatctcttataaatacgctttaaataatatttttgcggcgcgttaa

SEQ ID NO: 374885 - DNA, 606 bp, Salmonella enterica
atgctactggaaaaatgccgtgaagtgctgcacaccgttcgcgagctgaaaaagcaggcaattaaactgcatgaaggctgggagaacgaaccggtcatcagtgtggatgatacctttcccttttctcttctggccccgcttattgacgctttttatcaacgccacagcgtgacgcgcctgaaatttgttaatggcgttctcggcggctcatgggagacgttgacgcagggaggggcggatatcatcgttagcgccatacgcgcgccgccgccagacaccggctttggctttgcaagcctgggcgctcttgaactggtgtttgctgtcgcccctcatcatcctctggttcatgaagaggaaccgcttagccgccagacgattaaacgctttcgcgcgattgtggttggcgatagcgcccattcatcccgaacgacaggatctgaactgctcgacgctcaggaagcgattacggtttttgattttaaaaccaagctggagtgcaaattagcggcctgggatgcggctatttaccgcgttatctggcgcagcgattttggaaagcggcgcgcttatagagaagaacgtggtggcgcaaatcgcctatga

SEQ ID NO: 374886 - DNA, 150 bp, Salmonella enterica
atgaaaccactgctggacgttctggttattcttgatgcgttagaattagaaaaagagggcagcttcgcggcggcatcggcaaaattattcaaaacgccgtccgccctcagttataccgttcataagctggaaaacgatcttaatatctaa

SEQ ID NO: 374887 - DNA, 1101 bp, Salmonella enterica
atgaaaatagtacatgtacagttgcttccgttgttaagtggtgtccaaagagttactcttaatgaagtggagaatgatattgataatgaacatattatcatatgctcttctgaagggccattgacacaaaaattaaaagaactacatattccatatttttgcgttagggaattatgtcgagaaatctcaattattaatgatttaaaagctattaagaaaatttatcaaatattaaaaatgactaatgctgatgtagtgcatacccactcatcaaaaactggagtgataggaagaatcgccgctaagattgcaggaataaaaagagttattcatacagttcatgggttttcttttccttcggccaaatctagaaggacttatcttttatattatttcttagagtatattgtaaaatattttacggatgctttaattgtattaaacgagcaagatagaaggattgcttgtcagaaactacattacgcacctaagaatgtttatttgattccaaacggagtggatgtcagtaaatttactccagatgaattatgccttaaatataatgataatgcgaaattgttaaaggtaattatggtcgggcgtttatgggagcaaaaagatccatccactttattaaaagctgtaattgaattattggagaggaatgttaatattgagctttcctttgtgggggatggtgagctccgttcagtactaatgttacaggctgagaaatatataaataaaataaagtttcttgggtggagagatgacatagaaaatattctccctgagtatgatgtttttgttttaccatctttatgggaaggaatgccactggcaattcttgaagccatgagtagtggcttagcatgtgtagtgacgaatataccaggtaataatgatctaataaaagataagtataatggctatttatttgactgcggagatgcaaagacattgtcagatctcttagagtattattataataacaaaaatgttcttattgaacattctaatctaaacagacaaatagtgcttgataagtatactcttcaaaagcgaaattctttaataaagaatgtatatgttgcaaattaa

SEQ ID NO: 374888 - DNA, 540 bp, Salmonella enterica
atggtttatattgggaggatccataaatctaaaaacctgaaagatagtattagatttgtaaaaaaactaaatgagttaggtgtttgtgctaattttgacatgtatgggccagatgaaggcgaactagctgatataacatctgcaatcgaatcatttggtttatcttcaaagataaagtataaaggtgttctgaaatataatgaagttgatgacgttttaaaaaattacgacgtttatttgcagctaagtttatatgaaggtatggctatgtcagtagtaacagcacttcaagctggccttatagcattagtttccgctgtaggtgaaattccaaactatatagaagatggggttaatggagtgctttttgatatttcttgcttggatgatgatatttatatagaaaaaatcgctagtgatttccagcggttaatcaatgaaaataaattgataaaaatgcatgagatcggtaaagtaacattcgctaataaaccattatacgcagaagactatattaataaaattataaagcacacataa

SEQ ID NO: 374889 - DNA, 600 bp, Salmonella enterica
atggatgactacagcgccagtgatatgcgctgcagcgaccgttctgaaagccagctaaaagcacagtttcatctgacagacgtttccaccagggcgaacccttacactctgacaaaagtcacctcgttcaaccagccacaaccaatatttcacggctcccgtggagagggagaaatcatccggcagcagtgcgccgctattctctttgacgagctccgggcgttatccggcctctttgcgatgtccggcccttacaagccgctaataaagcagatgattccccatatacagaaagcaaacggcgcaccgttcagatatatgttgctggacagggcgttgaaggatcatatcttgtcggatagcacaccaaacagctctcgtttacggttagcggggttgttgaaaaatatattgaccaggaatataagcattacccgacaaaggataaagatgaattgcgaaaatcgattctttgaagggaattccccgctgacagataaggggaaaataaactggcggctaaaaaatatagatgtattgaaagaaaaatatgatatccctaaaccatcatcttctggctattttactgttattttttag

SEQ ID NO: 374890 - DNA, 339 bp, Salmonella enterica
atgcttattggctatgtgagcgtatcaacaaatgaccagaacaccgatctacaacgtaatacgctgaactgcgcggaatgtgagctgatttttgaagataaaatcagcggcacgaaacccgacaggcttgggctgaaaaagctgttcaggacattatctgcaggtgataccctggtggtctggacgctggaaaaactggggcgcagcatgcggcatcttgtcgtactggttgaagaactgcgtgagcgtggtattaattttcgcagcctgagtgattttattgatacgagtaggggggatgggtctattgctgtccctacgcggtcaatgcaatcctaa

SEQ ID NO: 374891 - DNA, 948 bp, Salmonella enterica
atgtatggtcgcgagtaccgccacaagcgctatcgtataacgctatttttagcgagcttttgttttcccctcgtctatagcaagctgagttatacgaaaccggatatgcagccattagggccgaatatcgccgataaaggttccgaatactacaatttcagggtcaatgacttccaatctgccgatggcgcaagacattatcgagtgtggacagctatcccctataaacccgccccgccgttgggctatccggtcctatatatgctggatggtaacgcggtgatggacaggctgtcggaggcgttactcaaacagttggcagatcattcgccgccggtgattgtggcgattggttatcagacaaacctgccgtttgatcttaatggcagagcttatgactatacgccggtgctgggaactgtcagcgaagacaatgaaaataatccgcgctttcatcgtaagaccggcggcgggccagcgttccgccagcgactagagacgcatatcgcgccgcaggtggagcaaggaatagccatcaaccccgaacggcgcggagtgtgggggcactcttatggtggcctgttcgttttggactcctggctgtcgtcatcgttcttctatatgtactacagtgccagcccgtcgctcaacagagataattttgcccttttgaagcgcatcatggcagtgaccccgccgccgttctgtcataaaaaactcattatcatggaaggttctgcgtcgagtggagatagcaggcaaagccagatggccaggctcctgcaaaaagttcagaagaccgtaataacgcttgagaacaacggcgttaacgctgccttacaggactatccgggccagggccatgggcccatgtttaacgtctcttttcgcaatgcgttgctggatatcagtcgcgagcaggcaggccaaaagtcacgctgcaattaa

SEQ ID NO: 374892 - DNA, 312 bp, Salmonella enterica
atgcctggatgtataagtgcctgttcgtgcatttccagcccgactcctgccgagcctaaggaaccccctgggcctaaatggatagagttaaaaggttattgtgttacatgtactggtcaggaggatattcgcccccctaaagaggatgaaccaaagaaaaaaatgtcagctaaagatttagttatggcaagacaacttttgaaagcgctgggaataacacaaaatccctggcaagacacggcagtaaaatccactaactgtgggttgccatttttcccggtagattctggagaacgagaaaccgatgtttga

SEQ ID NO: 374893 - DNA, 1056 bp, Salmonella enterica
atggaacgttcacccgatagtctggctggtatggctgcatctgcttttggtacggggacttatgccgctatgcggcaagcaacctctctccaaagttttctggagtttctcattaacttttttacctgtggaggggtgcagcggagaaataaaagacaatatcaggagttgatagagactatggctgagacattgaggaattcaatgcctgatagaagaacttctccgttgccagaaaatattatattagataatgttggtggattttgtgtcgaattttatcttcctggcgctaataacgacaccggaaatgttattgtacgtgtttgtaaagacggcaatactgagacgagagaagttccgatggaaacttttgaaaaagtctgtcgtgttttactattcagatgtgagtattctctccctcaggattctattatcttaactgcccagggcggaatgtatcttaaagatgcgcttcttaccggagcaaatctgacggcagaaaatttatgtggtgcagacctaagcggcgcaaatttagagggggcagtgctgtttatggcggattgcgaaggtgcaaattttaaggacgcaaatctgtcgggggcatcattaggcagtagtaatttgcagaatgcctgtctggaggatgctattatgtgcggcgctaccctggatcaggccaatcttactggcgccaatttacaacgcgcaagtctgttagcctgtagcatgatagacagtaatctctgcggagcgaatatggaacgtgccaatttttcaggcgcgattcttactggtgccaatatgtgtgatacgagattaaaaggtactaatatgatggccactaatatggaaggtgccatcttaacccgggcaaacctgcaaaaggctaatttaacctcggcgaaccttgaaggagctgacttgtctcaggctgatttaaaaaataccaatattaaagattgtacgctaacccattcacgtaccgaagaaaccagaatgtctgcaagtacacaaatgctctttaacgaattttatagtgatgatttttag

SEQ ID NO: 374894 - DNA, 180 bp, Salmonella enterica
atgttcacacctggcgatttcgtacagcctcgaataggcggtccgaaactgaaagtgattgaagtcaacgaggatcaaattgtcgctgtacgggtcgacgatgaacagggcgaaaaattgaccctcaaagcggctgatgtcaccccttattccgaagggggcgattttggcctgtgctga

SEQ ID NO: 374895 - DNA, 1173 bp, Salmonella enterica
atgagcgcaaatgcggagatccaacccccgcagcaatcggctaagaagaaaggcaaacgcaaaacagcgctgctacttcttaccttgctctttattattattgccgtggcctatggaatttattggtttttagtattgcgtcatattgaagagacagatgatgcttacgtggcagggaaccaggttcaaatcatggcgcaggtgtcaggcagcgtgacgaaagtctgggctgataataccgactttgtaaaagagggcgatgttctggtcacgctcgatcagaccgacgccagacaggcgtttgaaagagccaaaacggcgctggcctccagcgtgcgccagacgcaccagttgatgattaacagcaagcagttgcaggcgaatatcgacgtgcaaaaaaccgccctggcgcaagcgcaaagcgactttaaccgccgtgtgccgctgggtaacgccaatcttattggccgcgaagaactgcaacacgcgcgcgatgccgtcgccagcgcgcaggcaaagctggatgccgccattcaacagtacaatgccaatcaggcgatgatactcaacagtaaactggaagatcagcctgcggttcagcaagcggcgaccgaagtgcgtaacgcctggctggcgctggagcgtacccgcatcgtcagtccaatgaccggttatgtctcccgccgcgccgtccagcctggcgcgcagattagccctaccacgcctctgatggccgtcgtgcctgcaaccgatctgtgggtggacgccaactttaaagagacgcaattagcgaatatgcgcattgggcagccagtcacgattatcaccgatatttatggcgacgacgtaaaatacaccggtaaagtcgtcggtctggatatgggaacagggagcgccttctccctgctgcctgcgcaaaatgcgacgggtaactggattaaagtggttcaacgcctgccggtacgcgtcgaactggacgcccggcagttagagcaacatccgctgcgtattggtttatcgacgctggtgacggtggataccgctaaccgcgacggtcaggtactggccagccaggtacgaacgaagccggttgccgaaagtaacgcacgcgaaattaatctcgcgccggtcaataaactgatcgacgacatcgtgcaggctaacgcgggttaa

SEQ ID NO: 374896 - DNA, 459 bp, Salmonella enterica
atgataccaggtacgatttcgacttcttatttagacccgacagtgaatactgaagcgacgagtaacagcgttgtttcgttgaacgccagggcggttacgttgaataatgcgaataacgcacatttaagcaacggcagtgacgttgatctctatgacgcgttctatcagacgcttttgtcgcttcctgagttagtttcttctgaagcgcttaaagataccatttatcaagagatgaatgcgttcaaagaccccaaaaatggcgagcctgcatttgtctccttcgagcagcaaacggctatgctacaaaatattattggaaaagttgagccggatacccatttatatgaggctttaaatggggtattggttggcacgatgaatgcgcagtcacaaatgacctcctggatgcaggaggttattttatcgggcggggaaaacaacgagtcaattgactggtaa

SEQ ID NO: 374897 - DNA, 480 bp, Salmonella enterica
atgacgatcgcgtatatcgcgcttggcagtaaccaggcctctccgctggagcaggtcaatgccgccctgaaggctatcgccggcattcccgatagccgtatcgtcgcggtctcttcgttttaccgcacgccgccgcttggcccacagaatcagccagactatttaaatgccgccgtcgcactggatacggcgcttaccgcagaagacttgctgaatcatacccagcgtattgaactacagcagggccgcatacgtaaagccgaacgctggggaccgcgaacgctggatctcgatattatgctgttcggtgatgaagtcattaacacccaacgtctgacggtgccgcactacgatatgaaaaaccgtggctttatgctgtggccgctgtttgaaatcgctcccgatctgatttttccagacggactccccctaagacaacaactcatgcttctggctgtagaaaaacctgtcgcctggtaa

SEQ ID NO: 374898 - DNA, 852 bp, Salmonella enterica
gtgttaattattgaaaccctgccgctgctgcgccagcatatccgccgtttgcgtctggaaggcaaacgtattgcgctggtgccaacgatgggtaacttgcatgatggacatatgaaactcgttgatgaagctcaagaccgcgccgatgtggtagtggccagtatcttcgtcaacccgatgcagtttgatcgccctgacgacctggcgcgctatccgcgcacgttgcaggaagactgcgaaaagctcaataagcgcaaagtcgatattatatttaccccgtccccggaccagatctatccgcagggtacggaaggacaaacttatgttgaggttcccggtctttccaccatgctggaaggcgccagccgtccgggccatttccgcggcgtttccacgattgtcagcaaattgttcaatctggtacaaccagacatcgcctgctttggcgagaaggatttccagcaacttcagcttatccgcaaaatggttgccgatatgggctacgacattgagatcgtcggcgtgcctatcgttcgcgctaaagatggcttagcgcttagctcgcgtaacggttacctgacggcggaacaacgtaagatagcgccgggtttatataaagtgatgagtgacttaggcgaaaaattacaggccggggagcgcgaccttgaagagatgattgccatcgcaggccaggagttaaatgaaaaaggctttcgccctgatgatatccagatccgcgatgccgacacgctattcgaactaacggacgccagtaaacgcgcggtgatcctgatgtccgcatggctgggacaagcgcggcttatcgacaataaaattatagaactatcctga

SEQ ID NO: 374899 - DNA, 1611 bp, Salmonella enterica
atgttacgccgtgatttcttaaaatattcagtggcgttgggggttgcatcagcgctgccgctatggagccgcgccgcttttgccgccgaacgccccgcgttacctattcctgagctgttaacggcagatgcgagcaaccgtatgcagttaattgttaaagccggtcagtcgaccttcgccggtaaaaacgcgacgacctggggctacaatgggaatttgctggggccggcggtacagcttcacaaaggaaaaagcgtaactgttgatatctataaccaactggccgaagacacgacgcttcactggcatggtctggagattccgggcgttgtcgacggcggcccgcaggggattattcccgctggcggaacccgcacggtgacgtttacgccggagcaacgcgccgcgacctgctggatccatccgcataaacatggcaaaaccgggcgccaagtggcgatgggacttgccggactggtgctgatcgaagatgacgagattcgcaaattgcgcctgccgaaacagtggggcatcgacgatgtgccggtgattattcaggataagcgcttctccgccgatggtcagattgattatcaactggatatcatgaccgccgccgtcggctggtttggcgatacgcttttgaccaatggcgctatctacccgcagcattccgcgccaaaaggctggttacgcctgcgcttgctgaatggttgtaacgcgcgttcgctgaatatcgccgccagcgatcgtcgcccgctttatgtgatcgccagcgatggcggcctgctggcggagccggtgaaagtcaccgagttgccgttattaatgggcgagcgttttgaagtgctggtggatatcagtgacgggaaagcctttgatctggtgacgctgccggtcagccagatgggaatggcgatcgctccgtttgataaaccgcatccggtgatgcgtatccagccgctgcggattaccgcctccggtacgctgccggatacgttgacgacgatgccggcgttgccgtcgctggaagggctgacggtgcgcaacctgaaactgtcgatggacccgcgccttgatatgatggggatgcaaatgctgatgaaaaaatatggcgctcaggcgatgagcggcatggatcatgacagcatgaacgcgcatatgcagggcggcaatatggggcatggcgagagggatcacagcaacatgaaccatggtgggatgaatcatagttcgatgggtaatatgaatcacggcggaaaattcgacttccataatgccaactttatcaacgggcaggtattcgatatgaacaaacccatgttcgcggcgcaaaaaggtcgccatgaacgttgggttatttccggcgtgggcgatatgatgctgcatcctttccatattcacggcacgcagttccgtattttgtcagagaatggtaaagcgccggcggcccacagaacgggctggaaggatacggtacgcgttgaaggtggtatcagcgaagtgctggtcaagttcgatcacgacgcgccaaaggaacatgcctatatggcgcactgtcatctgttagaacatgaagatacgggaatgatgttaggatttacggtctaa

SEQ ID NO: 374900 - DNA, 606 bp, Salmonella enterica
atgatgttatcaatgagagaaaaaataaaaaagggcatgttgtttactgacttaacagaaggacttcccgaagagcgactacgtggtaaagagcttatgtatgattataatcatacgcgtccttcagaagagaacaaacgtagagaattaattgctcagatgtttggtaaaattgggagaaatgcgtggatagagccgccgatctctttttcttatggcaagaatatttatattggtgacaacttttacgccaattttaatttaactattgtcgatgactatacggttacgataggaaataatgtgatggttgcgcctaacgtcacgatttccgttaccgggcatccagtccatttttctctgcgcatgcagggcgaaatgttctcttttcccgtgacgattggcaataatgtatggattggcagccaggtcgtgattaatcccggcataacgattggtgggaattcggtgattggcaccggtagcgtcgtaacaaaatatattccgccaaatgttgttgccgttagcgttccctgtcgtgtactgcgtaaaattacgcagcgggataaagcatattattatcgcgacttaaaaatcggaccctga

SEQ ID NO: 374901 - DNA, 1257 bp, Salmonella enterica
atgtattacctgaagaatacaaatttctggatgttcggctttttcttttttttctattttttcattatgggcgcttattttcccttttttccgatctggttacatgatattaatcatatcagtaaaggggataccggaattatttttgcctgtatttctctcttttcgctgcttttccagcctgttttcgggctgatgtccgataaactcggtttgcgtaaaaatttactgtggattattactggcatgctggtgatgtttgccccgttctttatttatgtttttgggccgctgttacagtttaatattctactgggttccattgtcggtgggatttatctcggatttatctacaatgctggcgccccggcgattgaagcctatatcgaaaaagcgagtcgacgaagtcattttgaatttggccgtgcgcgtatgttcggttgtggaggctgggcgctttgcgcctccattgttggcgtgatgtttaccattaataatgagtttgttttctggctggggtcagggtgtgcggtgatcctcgcgctgttgctctttttctctcgtaccgattctggctcatcagccgtagtcgcggatgcggtaggggccaattcatcgccgtttagcctgaagctggcgctggaactgtttaaacagcctaaactatggttcctgtcgctatatgtggtgggcgtctcttgtacctatgatgtttttgaccagcaatttgccaacttctttacctcgttctttgcgtcaggagaacagggaacacgcgtattcggctatgtcacgacaatgggggagttgcttaatgcctgtattatgttttttgccccgcttatcgtaaatcgcattggcggtaaaaatgctctattgatagcgggaataattatgtctgtgcgcattatcggttcctcttttgcgactacggcgggggaagtggttattcttaagaccttgcatatgttcgagatccctttcctgattgtgggatgtttcaaatatatcaccagccagtttgaggtgcgtttctccgccactatctacctggtctgcttctgcttctttaaacaactggcaatgatttttatgtccgtactggccgggaatatgtatgaaaaaattggtttccagggcgcttatctggtgctggggctgattgcactggtctttacgcttatttcagccgcaacgttaagcggagcagggccgctggcagtgatgcgagtctcacaaccgaagagcgcaagctga

SEQ ID NO: 374902 - DNA, 3078 bp, Salmonella enterica
atgacaccagaacgtgattcactggccgccgtgttagcccgccgggattgggaaaaccctgcggtgacacagcttaacaggctggccgcgcatccgccgttttgtagctggcgcaaggcagacgatgcgcagcgtaaccaatatgcggcgcagatacgcagtctgaacggcgtctggaaatttgcctggttctcctcgccgcaagcagtgccggagaactggcgtcttgaagatcttacggaggctggcaccattaacgtgccgtcgaactggcagatgtacggttatgacgcgccgatctattccaacattacctatcccttcccggttaatcctccctgtgttccggcagaaaaccccactggatgttattcgctcacattttgcatggatgatgactggctgactgaaggccaaacgcgcatcatttttgacggcgtaaactctgcgtttcatctgtggtgtaacggtcgctgggtcggctatggtcaggacagccggctaccgtctgaatttgacctgagtgaatatttacaggtgggtgaaaatcgcctggcggtactggtgctgcgctggagcgacggtagctatcttgaagaccaggatatgtggcggatgagcggcattttccgcgatgtttccctgctgcataagccgacgacgcagattacggatttccacctccatactcatctgaatgacgactttacccaggcggtgcttgaggcggaagttcgactggctggcggcgtgaacgacgttttgcagctcgtgcttcatctctggcagggagaaacgctggcgggagaggcccgcgccacgccgggaagtgaaattattgacgagcgcggcggctacgatgaccgcgccacgctacgcctcaatatcaatcgtccggcgctgtggagcgcggaaacgcctaatctgtatcgggcggtgatccaattgcgtaccgccgatggcgagctgattgaagcggaagcgtgtgacgttggcttccgccaggtccgcatcgataaggggctgttactgctaaatggtaaaccgctgctgatccgtgggaccaatcggcatgagcatcaccctgagcgcggccaggtgatggattacgatactatggtgcaggatattttgctgatgaagcagaataactttaatgccgtacgctgctcgcattaccccaatcatccgcagtggtacgccctatgtgaccgctatggtctgtacgtggtggatgaagccaacattgaaacccacggtatgacgccgatgaatcgcctgagcgatgacccggactggctacccgccatgagtcagcgtgtgacgcgcatggtgcagcgcgatcgcaaccatccgagcattatcatctggtcgttgggcaatgaatccgggtatggggctaaccatgacgcgctttaccgctggctgaaagcggaagatccttctcgcccggtgcagtatgagggcggcggcgcggacaccgccgcgacggatattatctgcccgatgtatgcgcgcgttgatcaggatcagcccttcccggctgtgccaaaatggtcaatcaagaagtggctctcgctgcccggcgagcagcgtccgctcattctctgcgaatatgcgcatgcgatgggcaacagctttggcggctttgccaaatactggcaggcgtttcgtcagtatccgcgcctgcaggggggctttgtctgggactgggtagatcagtcgttgattaaatatgacgcggacggcaaaccgtggtctgcctacggcggggattttggcgatacgcccaacgatcgtcagttctgcatgaacgggatggtctttgccgatcgcacgccgcatccggcgctgtatgaagcgaaacacgtgcagcaatttttccagtttcgtttgctgccgggcgaagaacgccgcattgaagtacagagcgaatatctgttccgccacagtgataacgagatcctgcgctggatgctggcgcaggagggcaatcagttggccagtggtgaagttgtgctggatatcgccccgcaggggagacaaattatcctgctacctgcattcccgcagccggaaaccgcagggcagctttggctgacggtacgcgttgagcaaccgctggcgacaagctggtcggaggccgggcatatcagcgcctggcaacagtggccgttggaagaaaagctctgcgtatcgaaacccactcacgccagcgttgcgcccgtcctgacggtgcgtgacggcgaattctgcgtcacgcaaggtaatttgcgttggcagttctgccgtcagcagggctggcttacacagttctggcgggatgatgaagcgcaattgctgaccccgcttatcgatcaattcacccgtgcgccgcttgataacgatattggcgtcagtgaagcgacacgcattgaccccaatgcctgggtggagcgttggaaggcggcaggacattactgcgcggagccagcgctgttgctgtgtgatgcagacgagctggcggatgcggtgctgataaccaccgcgcatgcctggcaatatcagggggcaacgctgtttatcagccgcaaaacctaccggattgatgatcatggcgaaatgcagatcgacatcggggtggaggttgccagtggaatgccgtacccggcgcggattggcttgagctgtcaacttgcgcaggtgaatgaaagggtggagtggctggggctggggccgcatgagaattatccggatcgcctgagcagcgcttgttttgatcgctggaacctcccgctggacgcgatgtatacgccgtatgtctttccgactgaaaatggcctgcgttgcggtactcgccagttgcgttatggcgcacaccagtggagcggcgattttcagttcaatattagccgttacagccagcggcaactgatggaaaccagccaccgccatttattgcaggcagaatcaggcgtctggctcaatatcgatggttatcatatgggagtgggcggggatgattcatggagcccgtcggtatcgccggaatttcaactgagcgcccggcattaccactaccagatcgcatggaaataa

SEQ ID NO: 374903 - DNA, 1074 bp, Salmonella enterica
gtgaaaccagtcacgctctacgacgttgcaaatcatgccggtgtttcctatcagacggtttctcgtgtggttaatcaggccagccacgtttcggcgaaaacgcgcgagaaagtggaagccgcgatggcggagcttaattacattcccaaccatgcagctcaacagttggcgggtaaacgcgtcccgttgattggcgtcgcgaccgctaatctggcactacacgcgccgtcgcagattgtcgccgccattaaatcccgtgcggatcaggcgggagccagcgtggtgattgcgatggtggagcgcaatggcgtagaagcgtgtaaaatcgcagttcacaatctactggcgcggcgtgttaccgggattattattaactttcctctggaagaagacgcggcgctggaggtggtctccgcagcgggtaacgtaccggtactttttctggacgtttctgaacagacccctgtcaacagtattgttttttcccacgatgagggcgcgaagctgggcgttgagcatctggtggcgcatgggcatcagcgcatcgcgttgctggctggccctgcgtcatccgtctctgcgcgcctgcggcttgcggactggcgtaagcaccttcaacatcgccagattacccccgtcgctgtacttgagggcgactggagcgcgatgtccggtttccagcaaacgcaacagatgctgaacagcgggattatcccaacggcgatgttgatcgctaacgaccaaatggcgttgggtgtcatgcgcgccattaccgaattcggcctgagagtggcgacggatatttcccttattggctatgacgatacggaagacagttcctgctacattcccccattgactacaatcagacaggatttcgcccaactgggccgggggagcgtcgatcgtattttacagattgccgcaggcgactcggtttcgcagagtcaactgttgcccgtcacgttgattgaacgcaaaaccgtatgcgcgccgcaaaccgatcgcgcctcgcctcaagcgttggcggaagcgttaatgcagttggcgcggcaggtttcacgcttgtcgtaa

SEQ ID NO: 374904 - DNA, 774 bp, Salmonella enterica
atgaaaaaggttatgttaagcgctctgttactgtcgctccccctgctgggctacgcgcaggaacggttcccctccccggaagcggccgccagcgccttcgccgcggcggtagccggaaagaacgaaacacagcttaccgcgctactgggcgatgactggcggcaatttctgccgccagaaggcgccgatccagaggccgtggcccgcttcaatcgtgactggcgcgaaggtcaccgcattgtacaaaaagataatacggcgcacctgaatgtcggacgagaagactggcagctcccggtaccgatggtgaaagaggctggcggctggcgctttgatatggcggcagcccaggatgagatcctcacccgcgctattgggcgaaatgaactttctaccttacaggccatgcacacttacgttgatgcgcaacaggactattacctgcaaaatcaccgttgggcgcacaggataatcagtagcgaaggtaaaaaagatggcctgtactggccgatgaaagcaggcgaggcccccagtccgttaggtccaaactttagccccgcagcgccagacgagggttatcacggctaccatttccgcattattaggagtttgagggccaatggaacgaaaacgtacgctaagaagataacatattgttttataaagaatccgtactcagccgttcgaaaacttgcactaatagtaaaatcgaagcagcccaacggcgttgggaagtctactttggtaaatacctcagtaataaaatctgcataa

SEQ ID NO: 374905 - DNA, 252 bp, Salmonella enterica
atgaaaaaaagaaatttcagcgcagagcttaaacgcgaatccgctcaactggttgttgaccagaactacacggtggcagatgccgccaaagctatggatgtcggcctttccacaatgacaagatgggtcaaacaactgcgtgatgagcgtcagggcaaaacaccaaaagcctctcccattactccggaacaaattgaaatacgtgagctgagaaaaaactacaacgtattgaaatggataacgaaatactaa

SEQ ID NO: 374906 - DNA, 1092 bp, Salmonella enterica
atgagttcagctacacataatacttccgcaaaacctgtgacagatgtttatctcccggcaggcctgggattactggcggtcaggattatccagggatttatttactgggggggtgggagccgacgttttatttatgcaccggataaacttaacccagatgcaccacactggatggcctataagtttcagacggcaatgcccggcgcgctaatggggctggagcatgtaatttcatttatgctccaccatttctggctgctgtatgtcggcgtaatacttttcagcgccgctgaactgttcgccggactgtttctaatgataggtctgttcacccgtatttcggcgctgttgtcgatgcttttttccgtattgctgatgctgatgtttggctggcagggggcaacctgtattgatgaatggacaatggctgcctgtaatctggcgatgggaaccacactgtttctttgcgggtcacacagctatgccctggacaacgtgatcctaaagagaaaacctcatttggctgacagtcgaattttccggtggtgctgtggttcgctgtctgtaccgctaaccccggccggttataaaaaactggcgctatggctattagctttcgtggtagtttttgatgtagggacttacagttactatcgtggctcagtggtcacgccataccatcatggccctgttagtcctaccacacatcatatccgcctgactgaagggaaattgttccctgatggccggattcatgttcatgcttacctggacgcagggacgcctgaggcaccggaacatatcatggaggcatggctgaaagatgctgatggtacagatcttgttcactgggacaccaccatgctgtcggcattgccgactgatagtttccggaacgattatgcctacaataaattcactcctggccactacggcatacaggctattgtcggttcagccgccacgctcacccttccagccggagtcataaaaagaggtagcgatagactgccaaacggcccggtaacgctggtactgatagatatggaaggacatacgttcagcacgcctcttgaacgggtttccgaatga

SEQ ID NO: 374907 - DNA, 531 bp, Salmonella enterica
atgaaaaaaagcatcagcacatttatattcgccggtttttttgtggctggagtcgcgtcggctgcttcaatgaagattccgatgaatgaagtgttgccttctggaagcggaaaggcgctcggggagattaccgtaacagaaacaccttatggtttactgtttcagccacatctgtctggccttgctcccgggatacatggtttccatgtgcatactaacccaagctgtttgccggagcttgaaaatggtaaagaagtccctgcgttgaaggcgggcgggcatctcgatccgggaaaaacaggcaagcacatggggccttataatgataaaggacacctgggcgatttacctggactggtggtaaatgcagatggaaccgcgacctacgaactgttggctccccgcctgaaatctctgtcggaactgaagggacactctctgatgatccatgctggcggggataattactctgacactccggctaaactgggtggcggtggggcacgttttgcctgtggtgtagtggaataa

SEQ ID NO: 374908 - DNA, 2511 bp, Salmonella enterica
gtgaaattaaaattttttggttttatctccagtgctctgtattaccacaccgcagtatttgcggcggattataatcgcaatataatagactatcaccagatattgaccaatggcgactctgttacaaacagtacggttgtgtcatccggtcggcttactctctatagtggtgcaaaaagtaatggtataaatattgaatctgatggcattatggaggtaaataaaaatgcgacggataagtcatccattatccatacaggtggaattcagtatgtcgatggtttttcattaaatacaaccatttacggcgagcaaaaaatatcaggatcggtagaaggcacccttattaaagggggatatcagtctgtttatggttcagcgcaggcaataaatacaacattaagtaatggtggtgttcaatatgtggccggcattgctaaagatacgataattgagtccggacagcaatatattcagtcaggaggcaaaggcagtgataccactattaataatggaggtattcagaatgtggagggcggttctgtcacaaacacaaccattaatgatggaggtacccaaaatgtgactggcggttctgtcacaaacacaattattaatgatggaggtacccagaatgtggatggcggtactgctacagacacgaccattaattacgggggtattcagaatgtaaatggcggtattgtcacgaacacgaccatcaatgaggtaggagagatgtacgcgtggggtggttcagtatcgaataccatcgttaatggagggtatctggatgttgcaggttcatcaaccattataaaaaataccgttgtgaataatggcgggtatgtcaatgtattagatggaaaggtaaaaaatgtggaagtgtcaggccagaacgccagtctctatattggctctgccggatacaacgtaaagcccgttatttcaggagccatcaccgcttcggacagaggacatatttttttaggctacggcgcagactcatccggtgcagacatcacgctgaatagcgacgccttcctgcagttaaacaatgccggcatgtgtaccacggattgcctgtacacactgaacagcctggctctgtcaggaggccgtgtgtttcattccaacggaggctggaatacactgaacttatccagcctgtccggtaatggcgatttttatatgtatacggaggtggctagtggtaaaggggatcttctgaacgtaaccgggaatgcgacaggtgcattccggttgtttgttcaggactccggagtcagtccgacctcagatgacagcctgttgttggtcaaaacaggaggtggtgatgctgttttcaccctcggaaataaaggggggatcgttgaactgggtacatgggaatacagactgaaagaaaataatagcggaagctggttactcagcccggaactgaaaccggcaccgcagccagacccggcgccacagccagacccggcaccacagccagacccggcaccacagccagacccggcaccacagccagacccggcaccacagccagacccggcgccacagccagaattaccggctgagaatataaagcggcgtatttcggcatcaactgcagcggttttaaatatggcagcagtacagccgctggtatttgatgctgaactggaaaatgtacgggagcgtctgcaagccagaaaaatggccgggcgtgacgactcattatggatgacgcagtacaatacccggaataacgtctccacctctgcgggagctgagtttaagcaaacgcttggcggtctgatcatgggcattgatcgtctttcacagtatgaaaagagttcgggtacgctgggggcatttttcagctattcacactcgaatatcgacttttcgcgcggtggcgaaggtcacgtggacagctattccttcggcgcttacgctggattacagcacgaaagcggtttttatctggatagcatcgcgaaggctaatcttttcgacaatcacgttaaggggcgaatgaacagcggaggcgctgcggatggcgattatcgtacctggggtattggggcccacctggaaagcgggatacgattaagcaacaataaatggagcgcgacaccatatatggcatttaccggttttacgggcagcgcccagaaatatgccctttctaacggtatgcaggctgacgtggatactacgcatatgctaagagcagaggcaggcttgggtatggattatcgcctgatactgagcaatgggggtgaactacagccatggctgaaaatttctgtacgacaggagttggctgataataatcaggtaactatcaataacagggaccgttttaataatgatctttccggcatgagaggtgtatttcagactggggtacacgcaaaaattacggataatctgacagggcatctgagcgccgcttacggggatggggccggggtacagttcccctggcgggtgacggcaggcatgtcatggtcgttctga

SEQ ID NO: 374909 - DNA, 699 bp, Salmonella enterica
atgcggcagagaaaaatgtgccgggcggcaacacttctgcgcttgacaaaactcagcgttattgaaattgcccatcgagtccattttagtggcactcaaaactttggcagggcatttaagcatgcatttaatatgaccccgacagagtacagaaatttaccttcatgggatttatctttactcgtaccagctattaatattgataactgttggaacgttgatagctgtatagttgagcgttctggaatatatgttagtggtgacgaatgtttttatcaacaaaaaatcttgcgtactccaacattagaatcgaaaagaaaccgattaaaaaaaatacggcattattctgaattatataaaactaatattgttattgcgtcaaattttttaccaccgaaaaatcggtattcagcgattcgtgatgtcattgatattactatgttatcgggtgtcgaagtagagaaaaacactgcaaaaaacgataccttttacgtagaaggcggacgatatattaaatttgtatttaatggaaagtggagtgattactcaaaattcagccactatatttatatgaatattttaccaaaaacaaaactacatcggcggagtggcgcagatatagaactctttcattatacaaccaatttctatgatgacgacccaaagtttatatgtgattattttattccagtagattaa

SEQ ID NO: 374910 - DNA, 135 bp, Salmonella enterica
atgcctgatgacgccttgcttatcaggcctatgctcatgggtgatgttataggccgcatcgggcaaaatgaattcgagtctgtcagcaatttcaccctgccttcggcagggttttttatgatctcattagcatag

SEQ ID NO: 374911 - DNA, 201 bp, Salmonella enterica
atggcgacaatgctggatgtttcccgccatgcgggcgtatcgaaggccaccgtctcacgagtgctgaatggaatggggcaggtgaaagaaagtacgcgccagaaagtgtttatggcgatgcaggcgcagaactatcgccccaacttcctggttcgctcgctggcgaatcgcaccggcgacagcatcggttcggtcgtctaa

SEQ ID NO: 374912 - DNA, 147 bp, Salmonella enterica
atgttatccacagaaagttgggataactgtgtaaaaccatcactactggttccatttacagccttgacgtgcgacgaaaatcgaaaattcagacaaatagtgggtaagttattggcacaatctgtggataaaaccgacgatggttga

SEQ ID NO: 374913 - DNA, 1290 bp, Salmonella enterica
atggaaaccactcagaccagcactattgcttcgattgactctcgaagcgcatggcgcaaaacggacaccatgtggatgctgggcctttacggcacagccatcggcgcaggcgttctgttcctgccaatcaacgcaggcgtcggcggaatgattccgctcatcatcatggcgattctcgctttcccgatgacctttttcgcgcaccgtggtttaacccgcttcgtgctgtccggtaaaaatccgggcgaagacattactgaagtcgttgaggaacactttggtatcggcgctggtaaactgattaccctgctctacttcttcgcgatttaccccatcctgctggtttacagcgtagctatcactaataccgtggaaagcttcctgacccaccagttagcgattaatccgccgccgcgtgcgattctttccctgatcctgattgtcggcatgatgaccatcgtacgcttcggcgagcagatgatcgttaaggcgatgagtatcctggtattcccgttcgttgccgcgctgatgctgctggccttgtacctgatcccgcagtggagcggcgcagccctggaaacgctgtcttttgattctgcggcatccaccggcaacggtctgtggatgaccctgtggctggcgattccggtgatggtgttctccttcaaccactccccgatcatctcctccttcgccgttgcgaagcgtgaagagtacggcgaagcggctgagaaaaaatgctccaaaattctggcattcgctcacatcatgatggtgctgaccgtaatgttcttcgtcttcagttgcgtactgagcctgacgccggccgatctggcggcggcaaaagagcagaacatctctattctgtcttacctggcgaaccactttaacgcaccgattatcgcctggatggcgccgatcattgcgatgattgctatcaccaaatccttcctcggccactacctgggcgcgcgtgaaggctttaacgggatggtgattaaatcgctgcgtggtaaaggtaaatccatcgaaatcaacaaactgaacaaaattaccgcgctgttcatgctggttaccacctggattgtggcgacgctgaaccccagcatcctgggcatgattgaaaccatgggcggcccgatcatcgcgatgattctgttcctgatgccgatgtatgccatccagaaagtaccggcaatgcgtaagtatagcggtcatatcagcaacatcttcgttgtggtaataggcctgattgccatctccgctattttctactcgctgttcagttaa

SEQ ID NO: 374914 - DNA, 213 bp, Salmonella enterica
atggaaaggcttcaggatgaggcaaagtggaaagcgcaggatgcgttaaaggacacctccaggacggagaacgagagccgattaggatggtcggcgggtctggatgaccagggacgcttcgggatgaagctatcacatcggggcgatgtgcgtaggatgcaaacgttcaggatgagcaggccgcagggtcacaggaaaagttgtcacggatga

SEQ ID NO: 374915 - DNA, 1359 bp, Salmonella enterica
atgagttcattaagtcacgcggcgagcagtgcggagaaacgcacgaacgcccgctactggatagtggtgatgctgtttatcgtcacatccttcaactacggcgaccgcgccacattgtccattgccggctcagaaatggccaaagatatcggtcttgacccggtaggcatgggctacgttttctctgcgttttcatgggcctatgtcatcgggcagatcccgggcggctggctgctggaccgctttggttccaaacgcgtctatttctggtctattttcatttggtcagtcttcaccctgttgcagggttttgtcgatatctttagcggtttcggcattgttgtcgccctctttacgcttcgtttcctggtcggtctggcggaatcgccttccttcccgggcaacagtcgcatcgttgcggcctggttcccggcgcaggagaggggaacggcggtggccatctttaactccgcgcaatacttcgccacggttattttcgcgccgattatgggctggctgacgcacgaagtgggctggtcgcatgttttcttctttatgggcgggttagggatcatcatcagctttatctggatgaaagttatccatgaaccgaataaccatccgggcgtaaataagaaagagctggagtacatcgcagaaggcggcgcgctgatcaatatggatcagaaagacacgaaagcgaaagtaccgtttagcgttaaatggggccagatcaaacagctgctgggctctcgtatgatgattggcgtttacatcggccagtactgcattaacgcattgacctatttctttattacctggttcccggtctatttggtccaggcgcgcggcatgtcgattcttaaagcgggctttgtcgcctcggttcctgcggtctgcggctttatcggcggcgtgttgggcggcatcatttccgactggctgatgcgttgtactggctccctgaatatcgcgcgcaagacgccgattgtgctggggatgttgctgtcaatggttatggtgttctgtaactatgtgaacgtggaatggatgattatcggctttatggcgttggctttcttcggtaaaggtatcggcgcgttgggctgggcagtaatggcggataccgcgccgaaagagatcagcggtctttccggcggcttgtttaatatgttcggcaatatttccggtattgtgacgccaatcgcgattggttacatcgttggcaccaccggttctttcaacggcgctttgatctatgtcggcgttcatgccctggtggctatcatcagctatctggtgctggtaggcgatattaagcgtattgaactgaaacctgtcgcaggacaattatcatga

SEQ ID NO: 374916 - DNA, 942 bp, Salmonella enterica
atgttccttttcatatgcatgactaacttacaattgctcattgcgcggtcaattatagaaaaagagcagttgaagagtgttgatattttatttattggcgatgtgcataacgtaaaaaatcagtactatttaaaaaaaatccaaccgttatgtcggcactcaagcatagtctctcaggtttcaaaatttgcggcatttaaaacgattcatagaacacggtatgctaaaaaaatcatggaatcatatgccaaggaatatcataccgttttctttgcgaattttcatgtcccgcttatacaccatattttatcgtgtatctctttttctgaaataaatacttttgatgatggtacaaataatatcaatcagaaaagcataatgtatgaaaataagaatataagcgccacatcgaagttaatacgaaagctgatggggcgtaaatatcataaagatgaaatattaaagttagacgcaaaacattatactctatttcctgatagaaccaacataattgaaaagaccgaaggaattatattggtacaccataacggtcttcctgatacgaataatggttttaaaaaagtattattgggaactgtatatactgatgcgttaaaaaataaagaagatgagtgtgtttttcttcagcatcttcagcggtttattaaaaaagaagcggttgatatatatattcctcaccctcgatatgactctcatcagtttaatggtgtattgaatgttaactctgaaatgatagccgaggacattattttagaatatctggagcaagggatgtcattagagatatatggatttaatagcacagttcaatataacctaaataatatctcaactatcaaaaactataaaataaccagcccttttctaaaagatagctttaatcatggactggggttcgattttaatcaggtctcagtataa

SEQ ID NO: 374917 - DNA, 126 bp, Salmonella enterica
atgcacgatttacgtgcaatcctcaagacaggaatggtgaaagagcattacagcggcgacgaatcgggtcgtcgccgcatagtgtttacggtttttccggcgggagaatcaggttcagaacgatag

SEQ ID NO: 374918 - DNA, 5439 bp, Salmonella enterica
atgcgaatatacttaagactcaccgcgtatttccagttagttatacaagtaatttttttatttgtaaactcgtttattttttctttcccagcacatgcagccacaaatcctgacaccaatcaaaaaaaaccaacgacagagataaccgcgcaaagtacggcaaaaaaagaggaggatgaagcagggaaaaatcttgctgcgatactttccagtacaggatcaatgttaagccaggataataaaactgatgcgctaatcaactcagctattaataacggttccgcctatgtcacgggccaaattcagcaatggctgcaacagtttggtacggcgaaggtgaatttaggcctggataaagatctgtcgctgaataacgccagcctggatcttttgcttcctctctacgacgataaaaaacaaaatctgctcttcactcaatgggggggaagacgtgatgatgaccgtaatattatcaacgtgggtatgggttatcgttatttcgccgaccgttggatgtggggtattaatacattttatgatcgacagatatctgataacgctcatgaacggttaggaatagggggcgaactgggctggaattattttaaactcagcgccaatggttacaaacgcctgtctggatggaaagattcctctgaatatgaagattaccaggagcgcgtcgccaacgggtatgacattcgcgctgaaggttacttgcccgcctggccacagttaggcgcccaacttgtgtgggaacaatactatggcgatgacgtcgcgttatttgacgatagtgaagacgatcgtcagcgtaatccctatgccgtaaccgctggggttaattacacgcctttcccgcttgtttccatcggccttaaccagaaaatgggtaaaggcaaccacaatgacacccaaattgatttagccgtaaactggatgcttgggtcatcgctaaaatcacagttagacagcgacgccgtgaaagcacgtcgtaccttactcggtagccgcctcgatttaatcaatcgcaataataatattgtgctggaatatcgtaagcaggatctgatctcactgaaagtgcagaataaagtgactggcacagaatccgagacccttcctgtcagcgtcaacgtgaagagcaaatatccgcttgatcacattagctgggaagacgacaacctggtgaaaaacggcggcaaaattagcgaaaacaatggatcatggtcagtcacgttgccgcattatcagcaaaatagcggtgagaaaaatctatatgtcgtctctgctaccgcctgggacaatcagggcaataaatctaatgccagccatatgactgtagaagtcagcggtttcgatcttcaccagataacgagcgccactacgactaccagcgctacgctgccagccgacggcgtcagtactacgcaggtcactgtaacggtaacgtcgggtaacggcgaaaaaattaccggccttgccaacgaccttagcgcacaactgatgcgcagcaattcttcaaaggggctggccgccgataccattcaagaaaagatcagtgctttcaaagagcagagccccggcgtttacgtcagcacatttaccagcggcaccctcgccggcgtcgtaacggtacagccttattacaatcagaccagtaaacttagcagtacgaccattacgcttacaccagtaagcgatacagctcgctttgccacgttaagcgcatcaaaaacagcggcgctggcgaacgcgcgggatgttattacgcttaccgcgcatgtcgtcgatgctgcaaataattcgcttcagggcgtagccgttcactgggcaacggtgaacccgaaagcggtgctctctgcatcaacaagcaatactgatgctcaggggaacgctaccgtttcactaaccagcagcgaaattatgagcactaccgtcagcgcgcagcttgataatggccaaaagctcgacagcgagacgctccagtttactgccgattccagcagcgcgacggtaaccggggtggaagtcgataaaaaagttgcccgtgcggatggtcaggacactatcactgttcaggcaacggtaatggatgcagaacagcacccgctggcgaaccagccagtagactgggcaatcagatcggccgcaagctctacacatctgtctgataaacaaagcaataccaacgaaaatggtgtagcgaccattactcttacctctgcaaaagccggacaaggcattgttaccgcctctacgggaaacagtgagccagtggaatcagagaccctgacctttatgccggatgtgaaaagtgcgacactgagcgccattaccgcagataagacggcggcgcaggccaacggcgcagatgccgtcacactaagcgttaaggtagaggatgctaaccataacccaatacccggcgcgcagataagctggacaacaacaagcgccaccgccatcctgtctgccagcgacaccagtaccgatgcaaaaggtaacgccagtatcagcgtcacctcgacaaccgtcgaaaatgtttcagttgtcgccaccatgaaagagcaagcccagacatcgccggatttacaatttaccgtcgataacgccacggcggcagtagaatcgcttaacgccgataaaacccaagccgtcgccaaccaaaacgattttatcactcttacggcgcgggtcgtggatgccaacgatcatcctgttcctgacagcccgctgaaatggcaaattgtagaagggcaagccacccttagcgcaacgcagaccaccaccgatcaacagggtagcggtagcatcacattaacctcctcaactcagggcaacgtggtggtttccgtcagcgcaaccgctggtgacgcggtaaattcaccggcacttctgttcattgcggataccgccacggcgaaggtcagcgacatcacggtggacaaatcccagggcgttgccaacggtaatgatcatattacctataccgcaatcgttacggatgcctccggtaacccggtcaaggatcaggaggtaacatggaatgcgacgccggctaccgcaaatctgtcgtcagcaacgtctactaccgacagcaacggtaatacgtccgtcaccatcaccaccctgaaggccggtagcgtcaatgtcacggcacaggctggggccagcccggcgtggaacgcaccgaccacaacctttgtcggtgacaaggcaactgcgcaaatcctggacttgaagacgaataagagcacagcgcttgctaacggcaccgacagcatcacttttacaggaaccgtgatcgacgccaataacaacgtgcttgagggcgttaatgtggcctgggctgtaaccccgacgacgggcgtactctctaccacaacgagcgcatccggtagtgacggcaaagcgtccgtatcgctcacgtccagccaggtagagagttaccaggttaccgcaacggtaaacggcaaggacgaaacgtccggtaatgtctcattcaccgccgatagcgcctcggcttccctcacctcgctgacgtccgatgaaacgagcaatctgatcgccgggaacggcagcgcaacgctaaccgcagtagtgcaggatgcgaccggccatccgatcgctggcgccgtcgtgaactggtcatccgataatactactggcaatttcagcgaaacaacgtccacgaccaacagtgaaggtaaagcaattgttacctttagcggtacgcacgcgcaactgacaaccattactgccagcagcgtaaataatagtcagaagacggttcaggttacgattgcgccagatactcagagcgcgcaaccggtgactgtagtggcagataaacacggtgcgattgccaacggtgcagataccgtgacgttaaccgcaaccatccaggatcaatatggcaacttcattaaccagggcgatgtcgcgtggacaatcagcccggaggccagctatcacctctcggcaaataaccaaccgacgaacaatgaagggcaatccatcgtcacgcttgcatcggatgatgttgtctcctgtaaagggacggcaacctttaatggccttagcaagtcgacagcaaccatacgttttactgcggacacaacaacagaaaaagtcgatacgttgaatgccagcaaaacggaaaatgtggtagcaggaaaagacactatcacgcttgaagcgacggttacggatgagaatgggcacccggttgcggataccaccgttcactggggaaccgataacagtagcggcaccttccagccaggggacagcagcgtaaccgacagcaatggcgtagccaccgtgacctactcagcgaccaaagccgttccaacgcttattggcgcaggtattaaccagtctgaaaaaaccattacagtgaattacatcggtaatgctgacacagcaaaactatcgaatattaagccggataaaaccaaagccgtcgctgataacaccgagctggtgacctggtctgtcgatgtaaaagatgcgaatggcaatattctgcccggtatctctgtaaactggagcagtgacgacccggacctcacgctggcagccagcagcagcgtcaccaatgagcacggcgtggcaaccatcacgggccgcactcttaaagcgcgcgatgcggtggtgaaagccacactctctgctggcgggcagatgctctctgccgccaaagtgaccttcattggcgacgccaaaacagcaatgctgatgtcactaaatgtagataagttcaacgtcctggctaacggtggggatgccgccacctataccgcttacgttgaagatatcaaccacaacattgtgccggatgcgaccgtcagttggcggacaacaatgaacaagctttcttccgggacaagtaagaccaactcatccgggaaggcaaccgtgaagctaagcggtaacggcgttggcatggtaacggtcacagcgactatcaataattcgtcgatgtcgaagagtggcgtcaagtttattaacgtcattgaagatacatggtatgtcaaatccggttcatcaacttacacgtccagcgcgattaaaggttacccggatctgggctttgtcgtcgcctcgccaacaactggcccaacctacctggagtggagtcctaccggcacgtcgaaagtaacaacgcccgttacgctgattgatgacgccggccaacaatatacagtcaatcttaaaggcaaccgaacctctgattgttcgacgcgtccgcttaacgcagccgttggttgcagcagttcggcgggatacaaggcgcaatttacgtggaatatcaacgataacaaaagcataccgcctgggcattacaccggtcttatccacttctatggtaaagactggcataccgcttgggcatttgagtatcgcttaacgatggatttaacgattaactaa

SEQ ID NO: 374919 - DNA, 2319 bp, Salmonella enterica
atgaaaattagcgacggaaactggctgatccagcctggccttaatttgattcacccggttcaggtgttcgacgttgaacagcaggggaatgaaatggtggtctatgccgcgccgcgtgatgtccgtgaacgaacctggcaacttgataccccattgtttaccctgcgctttttctcgccgcaggaaggcgtgataggcgtacggatggagcacttccagggcgctttggataacggtccgtattatccgctcaacatcttgcaggatataaaagtggagatgcagaacaacgccgaatttgccgaactcaagagcggcagcctgagcgtgcgcgtcatcaaaggcgagttctggtcactggattttctgcgcaacggtgtgcgtattaccggcagccagttgaaaaataatggttatgtgcaggattctaacagcgggcgcaactacatgtttgagcgtctggatctcggcgtgggcgaaaccgtctacgggcttggcgagcgttttaccgcactggtgcgcaacggtcagacggtggatacctggaaccgcgacggcggcaccagcaccgagcaatcgtacaaaaatatcccattttatctgaccaatcgcggttacggcgtgctggtgaatcatccgcagtgcgtgtcgtttgaaattggctccgagaaagtctccaaagtacagttcagcgtcgagagcgagtatctggaatatttcgtcatcgacggtccgacgccaaaagcggtactcaaccgctatacccaatttacgggtcgtccggcgctgccgcccgcctggtcgtttggtctgtggctgaccacgtcgtttaccaccaattacgacgaagcgacggtcaaccgctttatcgacggcatggccgagcgcaatctgccgctgcatgttttccacttcgactgtttctggatgaaagcttttcagtggtgcgattttgaatgggacccggtgacgttccccgatccgcaagggatgattcgccgcctgaaagcgaaagggatgaaagtttgcgtgtggatcaacccgtatattgggcaaaagtctcccgttttcagggagctaaaagagaagggatatttgcttaaacgtccggacggctccttgtggcagtgggataagtggcaaccggggctggcgatttacgacttcaccaacccggaagcctgcgagtggtatgccaacaagctgaaaggcttggtcgatatcggcgtcgactgttttaaaaccgactttggcgagcgtattccgactgatgtccagtggttcgacggcgccgatccgcagaaaatgcataaccattatgcgtatatctacaatgaactggtgtggaacgtactaaaagataccgttggcgaagacaacgcagtgctgtttgcccgttccgcctcggtgggcgcgcaacagttcccggtacactggggcggcgactgctatgccaactatgaatcgatggcggaaagtcttcgcggcgggctgtctatcggcctgtcagggtttggcttctggagccacgatatcggagggtttgagaataccgcgccagcgcatgtctacaagcgttggtgcgcgttcgggctgctttccagccatagccgtctgcatggtagcaaatcttatcgtgtgccgtgggcctatgacgaggaatcctgcgacgtggtgcgctacttcaccgagcagaagtgccggatgatgccgtatctgtatcgggaagcggcgcgcgccaacgaagcgggtacgccgatgatgcgcgccatgatgctggagttcccggacgatccggcgtgcgattatctcgaccgtcagtatatgctgggcgatgccgtgatggttgcgccggtattctctgaggcgggcgacgtccagttttatctgccacagggacgctggacgcacctgtggcgcaatgacgaagtacagggtagccgctggcataaacagcagcatgatttcctgagcctgccagtgtacgtgcgtgacaatacactgctggcgctgggcaacaatagccagaagcccgattacgcctggcatgaaggaactgaattccagcttttccatctggaagacgggcgcgaagcgatctgcgaagtgcctgcggctgatagttcggtgatctttacgctcaaggtggcgcgtgtgggcaacacttttaatgtgaaaggcaagggtgaggcgcgcaactggacgctatgcctgcgtaatattgcgcagattagcggcgtagagggtggttcatacagtagcagtgaatggggaattgttgtgaaaacgcagaaaaatgaggttgtgatccatctttaa

SEQ ID NO: 374920 - DNA, 867 bp, Salmonella enterica
atgaaaaagacagtgctcataaccgatctagataatacactattcgattggtttagtgtttggtatcatagctttaatgcaatgctaaataaagttgtcgaaatttcaggattttctagagatgatctcatagcacagataaaacccattcatcaaagatatggcactgccgagtactcttttattttagagagcattcctttgttgcaagaaaaatatggcgacagagattctattaattcagcgatggatgatgccatacacgctttcagaagtgagagaaagaaataccttaccctttacccaacagttatggacaccttaaacacactaaaaaataaaggttgttatattgttgcatacactgaatctaaagcttattactccaactttcgcttaactcgcttaggattagatggggtaatcaatgtccttttctcaccagaagatcatgaaattccagatggtgagaaaaaacaaagtaaatatgacttaattcttacaaagcaagagtatacaccagttgatgaaatcaaacctaacccacaacttctactagatataataaaatcaattggagcaactccagaagagtgtgtatatatcggtgatagtgaaatgaaagatattgaaatggcccaaaaagcgaatgtttcagatgtatttgccagttatggaaccggccattttgaagataacaaggaaggatatgaattacttcgtgctgtaactcactggactgatgccgacgtagagcgggagagaaaaattaaagaaaaatcatttggtgcaaaaccaacttatgtagcccaacaattttcagacattttatctttttttaatttcaccacattcaaaggtaaatga

SEQ ID NO: 374921 - DNA, 633 bp, Salmonella enterica
atgagtgatttagaattaaaacgacatgaagacgctatgaaacttgagcaactaaagttaaaaattgatgtttggaaaacggttattgacgtccaaaaacattttaatgaccttgagatgaaggtcagaaactttggcattctaatattatcagcttttattggcgccattggtgtaagttttaattctggctctgaatttatagtctttggatataatcattctgttgctgctattctcgctttaggtgcatccgttgtttggttgttattctattttgtcgatgtatattggtaccaccctttgcttcttggggctgttaaaaaggggctagcacttgaacaagagatcgcatctgacatcccaaatataaaccttacggaaacaataggtaatagtagtccaaaaaacattttgtgctggaaaaacatgcacagcactggaaaagccaatttattctattttggggttttaagtgttctactagccatatgtatcgcgctgtttatctttaaggccccacaaaaaacaaaccaactaaacaaaataaatatcgaagcaacttgcactaggaatagcaattacaatggagttaactgcattatcgcatccccatcgaatgacaataagtag

SEQ ID NO: 374922 - DNA, 267 bp, Salmonella enterica
atgcacacagtttcatcagcagcatcatctctcactggtaagcacccgatgccggtttcagccccggctcaggaacgttttttacgtctcccggaagtcattcatcagtgcggtctgtcccgctccacgctctacgatttaatcgcccgcaatgctttcccggcgcaggtttccctcgggggtaaaaatgtcgcttggctgcagtctgaaatcacggcgtggatggaagaacgtgtcgcgcaccgcaaccggaaatacgacgcatga

SEQ ID NO: 374923 - DNA, 603 bp, Salmonella enterica
atgaatcagagccactttcacaaagcccctttttctggcttgcatcttttgtatgtttcctggtacagtttcgctgttgccgcaaaatcggcaaccgggcgtgagaacccgagcaatccatcggcgataccagacgcgccatgcgtctttttttgtgtcgcaatcaacgccacagagcgccagataatggtgtggtgtgcggacattcgtgcaggtgtgactctccgtctcctgcccgtattcgtacattatgccgtcatgtcaatggtagctcaggcggggcagccctcgggctggccggtattcgatggagccggtattctcacccccgtctgggctatcgccactgagcgtgagaactccggcgatagcaattatcagctatccatcggaggttgccttatggccacgaccctcaccccgtctcaccctgaatttatttttgtgtttgcggccgttcgccgcactgagcgtaaaccgcatatctgcatgctccgcaccgttgccggtgacgaacacaccgcacgtcgttcccttgtccgcgactatgtcctttctcttgccgcccgtctgccgcttgcggaggtgtcacatgcacactga

SEQ ID NO: 374924 - DNA, 300 bp, Salmonella enterica
atgcacactgaaaacagcattcagaccgtctcagcgcgtcgtgatgaccttaacactctccgcgagcacctcagcattgaggcataccataaactcaaccgcgccagcgctataacacagtttgtcgggcttgatttggagcaacgtgaattaaccggcctgcatcagctttgtatgccacatattttcagctatctgcacgatgacatcagttttgttctggaggaactgaaaggcaaaggcctgtgccgtgactttctcactcagcaaggcctgcgggaggaagaagaccatgtttga

SEQ ID NO: 374925 - DNA, 450 bp, Salmonella enterica
atgtttgattttcctcagtccggtgagatttatcgctgcacaggtttctctgatgtggtcgtggtcggcattctggctgctggcattccgtgggatatgccgtaccgttgcccggagctggtctggaatccgtatcgccgcgcgtacagtattcttgtccgtataaaaaatgatggccgtattaccgaaataccactcggtcgttttttgcaggaatttacctgtgtgaaaccagacctgtttaaacgctgccgcgaaaaccgttatgccgtactgaaagaaatcactttcgaccctgaattacagaagtggcgagcgaaaaatatcgatatttacccggaagatataacgccttccagacgaccaataccgacgacgcgtagatggcgggatattccgcgaacggagccggaaataaaaccggataacagttaccgccattatttgtaa

SEQ ID NO: 374926 - DNA, 261 bp, Salmonella enterica
atgcctgtttacagtacggaacggccgcagaataaacaccagcccgccatcagccgggcagaccttgaatgccttgaacaccttcgcaacgtcggccagctcgtcggcgacctgatgcaggtgcaggactgcacaaccgttcgccgtgacccggtgcagcagtcacagctcacctccgtgatttacctcatgaccgcccagctcgacggcgtggtcgaacgctgcaatcagcgctggctgaccggggagggcaacgtatga

SEQ ID NO: 374927 - DNA, 321 bp, Salmonella enterica
atgaaacagccattaccgcccgtattgcgcgccgcgctttatcgccgtgctgtggcctgtgcatggctgaccctttgcgaacgtcagcaccgctacccgcacctcaccctcgatgcgctggaaagcgccattgccgccgagctggagggcttctatctgcgtcagcacggcgaggaaaaaggtcggcagattgcctgtgcgttactggaagatttaatggaagccggaccactcaaggccgcgccgtcgctgtcctttctcgggctcgccgtgatggatgaactctgcgcccgtcatatcaccgcaccggtactgcactga

SEQ ID NO: 374928 - DNA, 2334 bp, Salmonella enterica
atgaaaatgaacgtaacagaaacggtaaaacaggcgtgcggccactggccgcgcattctcccggcgctgggtgtgaaggtgattaaaaaccgccatcaggcctgcccggtgtgcggcggtactgaccgtttccggtttgacgataaagaggggcgagggacgtggtactgcaatcagtgcggcgcgggtgacgggcttaagctggtagagaaagtgttcggcgtgaccgcatcagaggctgccggaaaggtgaacgctgtaaccggcaatctgccaccggttgccccggaggtgattgcggccgcagaggccgaaaccgaggccgaccgcaaagcggcggccgcgctggccgtcaggctcatggagaaaacccgcccggccagcggcaacgcctatctgacccgcaagggcttcccggctctggaatgtctgatgctcacagccatacataaaaccggcggcgtgacgttccgcgccggtgatgtggttgtcccgctgtatgacgataccggcgcgctggttaatcttcagcttatcaatgctgacggtctcaaacgcaccctgaaagccggtcaagttaaaggggcatgtcacaccatcgaagggaaaaaacagaccggaaaacgcctgtggattacggagggctatgcgaccgcgctcactgtgcatcacctgaccggcgaaaccgtcatggtggcgctgtcctcagtgaacctcctttctctggcgagccttgcccgacaaaaacacccggcctgtcagattgtgcttgccgccgaccgcgaccttaacggaaacggccagagtaaagccgctgcggccgcagacgcctgtgagggcgttgttgccctgccaccggtgttcggtgactggaatgatgcgtttatgcagcacggcgaagaggccacgcggaaagcgatttatgacgccatacggccaccggctgacagtcctttcactaccatgagcgaagcggaatttaccgccatgagtaccagtgaaaaggcaatgcgggtgcatgaacattacggcgaagctctggccgtggacgcgaacggccagctcctgtcccgctatgaggccgggatatggaaaatcattccaccgtcagactttgcccgcgacgtggccgggttatttcagcgtctgcgcgcaccgttctcgtcggggaaaattgcctcagtggtggagaccctgaaactgattattccgcagcaggacgccccggcacggcgtctgattggctttcgcaacggcgtactcgataccgccaccggcactttcagcccgcaccacaaagcacactggctgcgcacactctgtgatgttgattttaccccaccggtggagggcgaaacgctggaaacccatgcaccggatttctggcgctggctcgaccgtgccgccggtggcagacaggaaaaacgcgacgtgatacttgccgccctgtttatggtgctggcgaaccgctacgactggcagctctttcttgaggtgaccgggccgggtggcagtggcaaaagtattctggccgaaattgcgaccatgcttgccggggaagataacgccacatcggccaccatcgaaacgctggaatcaccacgtgaacgtgctgcgctgattggcttctcgctgattcgtctgcctgaccaggaaaagtggagcggtgacggggctggactcaaggccatcaccggcggcgatgcggtctcggttgacccgaaatacaaggatgcgtactcaacccatattccggcggtgattctggccgtgaacaataacccgatgcgatttaccgaccgcagcggcggtgtgtcacgtcgccgggtaattattcacttcccggaacagattgccccggaggaacgcgacccgcagctcaagaacaaaatcgcccgcgagctggccgtgattgttcgacagcttatgcagaaattcagcgacccgatggcagcgcgcactctgctccagtcgcagcagaactcagacgaggcgctcagcatcaagcgcgatgctgatccgacatttgatttttgtggttaccttgaagcactgccggagcctgagggtatgtatattggcaatgccaacatcattccgcgtcagccgcgcctgtatctgtaccatgcctatctggcgtatatggaagcccacggctacaggaataccctgagcctgactatgttcggtaaagggttgccagccatgctgaaagagtacgggctgagttatgagaagcgccgaaaaaatcagggcatacaaaccaatctcacgctaagagaggaaagcaacgccgactggctgccgaaatgtgatgaccccatagcgaaataa

SEQ ID NO: 374929 - DNA, 681 bp, Salmonella enterica
atgttcgatattcaaaaacacagacacaactatttctataacttagccactgtagttgaggagctaatcccggctgaaatatgtgataaccttaccgatcgcgttaatactatcatagcccagggattagttgaccacgttaatcattctggtttaggtaatgatgctgtatctgacttgggtggggtttataaccatcatatatttaaaggtccggatgtcagggcacatttaccggaattaaatgcaatctaccacgcaatcactccgctaattagtttgatcacctgcacggacgcgatagtttccccatattctttatcagatataaatattaaagcatatccacccggtgggggaacgctgggtttacattatgacactaacggaataactgttctgttatttctgacagataacaacgaatctccattacgtatgcaaattaacagaagtcaccctgccaggaaagaaacatggactgaacataaaaaaatatttgcaagaaagggagcactccttgtcatgcagggaagaaaaacacttcatgacagtgaacccactataacagaacaaaaattatctgtagtttataatttttatgagcgtcatgacacataccgacatgaggattttgataattttgtatattacggaaacaaacctaaagagttaatttaa

SEQ ID NO: 374930 - DNA, 918 bp, Salmonella enterica
atgagcaaaagacttgacttgtttgttggctttttagtgacagttctgtggggtgctaattttgctgtcattgagctgggtttgagggatcttgatccctttattttaacttttttaaggtttacattttgtgcttttccgttagtgttttttattaaaaaaccagaaggcatatcactgataagtattgcactgtacggagttttttttggtgtcgggttatggtgggtcgttaattttgctatgtttaatggactgtctgctggactttcatctgtattccttcagtttagtgcatttttcacgatcgttttaagttgctttttcctcggcgagaaaataaataaaatacatatttcaggaattgttacagcttttgttggcttaattatgattattcatttttcagaggaatcctccacaattaaaggagtgttttttgtgataattgcagccatgtcatgggccgtctgtaacattatcgtgaagttaactaggcctgccaatatgattgcgtttattgtatggtcaagcttgttctctgcgcctgctgtgttaataatgacagtttatgtcaagggatgggggggggtattgtcaataccggacgatatcacggtgggttcttctttctctgttctgtttcaggcatatataaccacagttgttggttatatgatctggaataatctgatgaagaagtatccggcaactgaagttgcaccattatcactttttgttcccgtttccggggtgattacatcctatttatttttagatgaaaggctgagtgttcagcaacttatttcagtgatagttgtcatcacaggtattttcattttcttgaattcggcaaggatcattaagctcatgaattctcgaagcaacgctgagtctcaaaaatcaactatacgttag

SEQ ID NO: 374931 - DNA, 324 bp, Salmonella enterica
gtgattgcggaacaggtctccgctgtcaaaaaagggattattgccggcttaaaaggggagaccccctccatggccgcgcaaaaaaacaccgttgatatcgacaaaacactggataacagcgggattgcgcttgccgtcatcgccctggtttgcgcgtttataggcggcatgcgcaaagagaaccgctggggtatccgtggcgcattaatctttggcgtaagtacgctcgcgtttcacgccctgctctttggcattggaatcatctgcgccattattttgctgatcctggtattttctttcctcagcggcggctcccccatttag

SEQ ID NO: 374932 - DNA, 1494 bp, Salmonella enterica
atgactcggcctaattttctgttcatcatgaccgatacgcaggctaccaatatggtggggtgctatagtggtaagccgttgaatacgaacaatatagataatctggcagcggaaggtatccgctttaattccgcatatacctgttcgccggtttgtacgccggcgcgggccgggctgtttaccggcatttacgccaaccagtccggcccgtggacgaacaatatcgcgccgggaaaaaacatctccacgatggggcgttattttaaagatgccggctatcacacctgttatatcggtaaatggcatttggacgggcatgactacttcggcaccggcgaatgtccgccagaatgggacgccgattattggtatgacggcgccaggtatcttgcggaactgacggataaagagatcggtttgtggcggaacgggctgaacagcatcgacgatttacgcgccaataatattgatgaaacctttacctgggcgcaccgtatcagcaatcgggcggtcgattttcttcagcggccagaaagatcggcaacgccctttctgctggtgatctcctatgatgaaccgcatcatccttttacctgcccggctgagtatctggaaaaatatcaggatttttactacgacctgggcgcaaaggcgcatgactcgcttgtcgataaacctgaacatcaccggttgtgggcgcaggctatgccgtcgccggtcggtgaagatggccgctaccgccatccgctctattttgcctgtaatgattttgtcgacgatcagattggccgggtaatgaagtcgctcacgccgcagcagcgggaaaatacttgggtgatttatacctccgatcatggcgaaatgatgggcgcgcaccggcttatcagcaaaggcgcagcgatgtacgatgacattacccgtatcccgctaattattcgcgcgccgcagggagaagctcgccagatcaacacgccggtgagccatattgatttattgccgacgatgatggcgctggcggaaattgaaaagccagagattctgccgggcgaaaacctgcttgtcgccaaaccgtcgcgcggcgtgatggtagagttcaaccgctatgaaattgagcatgacagcttcggcgggtttattccggtacgctgctgggtaactgaccgctataaactggtgctgaatctgtttaccagcgatgaactttatgacagatataatgatcccgatgagctgcataatctgattgatgcccccgaattcgtcaatgttcgcgaccagatgcacgacgcgctgctcgattatatggacaaaattcgtgatccgttccggacttatcagtggagcctgcgcccgtggcgtaaagacgcgcagccgcgctggatgggcgcttttcgcccgcgtccgcaagacggctattcgccggtggtgcgcgactacgacacgggactgcctacgcagggcgtgaaagtggaagacaagaaacagaagttctga

SEQ ID NO: 374933 - DNA, 1716 bp, Salmonella enterica
atgaatatgctacaaattttgagctttgtcggctttacgctgctggtggcgatagtcacctggtggaaggtgcgtaaaacggatactggttcccaacagggttattttcttgccggacgttcgctaaaagcgccggtgattgccgcatcgttaatgttgaccaatctctctaccgaacaactggtcggtctgtccggacaggcttataaaagtgggatgtcggtaatgggctgggaggtcacgtccgccgtgacgcttatctttctggcgttaattttcctgccgcgctatttacagcgcgggatcgccacgattcccgattttctggaagagcgttatgacaaaacgacgcgtattattatcgatttctgttttttgatcgcgacaggcgtctgcttcctgccgattgtgctctattccggcgcactggcgcttaatagcttgtttcatatcggcgagtcgctgaatatttcacatggcgcggcaatctggctgttggtgattctgctggggctggcaggcattatttacgcggtcatcggcgggctgcgggcgatggccgtcgcggattctattaacggcatcgggctggtcattggcggtttgctggtccctgtttttggcctgatcgcgatgggaaaaggcagcctgctccagggtatcgaacagctcaccaccgtacacgcggaaaaattaaactctattggtggcgcctccgacccgctgccgattggcgcggcgtttaccggactgatcctggtaaataccttttactggtgtacgaatcagggcattgttcagcgtacactggcctctaaaagcctggcggaaggacagaagggcgcgttattgaccgccgtcctgaaaatgctcgatccgctggtattggttctgccaggtttaatcgcttttcacctttaccaggatttgccgaaagcggatatggcttatccgacattagtgaataacgtccttcccacgccgttagtcggttttttcggcgcggttttatttggcgcggttattagcacgtttaacggttttttaaacagcgccagcacgttattcagcatgggcatttatcgtcgcgtgattaacgaaaatgcgcagcctgagcgcctggtccgcgttggacgccagtttggattgtttattgcgataatttcaatactggtcgcgccgtggatcgctaatgcgccggaagggctctatagctggatgaaacagctgaacgggatttataacgtaccgctggtcaccattatcattatgggcttcttctttccgcgcattccggcgttggccgccaaagtcgcaatggggatcggcatcgttagctatatcaccatcaattatctggtgaagtttgattttcactttctctatgtgctggcctgcacgttctgtatcaacgtcgtcgtgatgctgatgatcggcgcgattgcgccgcgcgccacgcccttcaaatttcaggatgcgtttgcggtggatatgaaaccgtggaagaacgcgaagatcgccgccgttggcattctgtttgcgatggttggcgtctattccggcctggcgcaatttgggggctacagtacccaatggttgacgatcttcagctacggtatcaccgcggcggtcgtggtgtatctgttttacagcaactggcaggcgcgtcgttctgcgactgcaatatgtctctctaacgcgaaggatgaagcatga

SEQ ID NO: 374934 - DNA, 864 bp, Salmonella enterica
atgaatggaaatttgcaaagttcgcatgtaaaaaacgaaactacgtataatattccgctactcattaacgaaaatgtgatctccagcggaatttcattgatttcgctatggcatacctacgccgacaaacattaccgggttatctggccccgcgataaaaagaagcctctaatcgctaattcctggatcgctgtttataccgtacagggctgtggaaagatcttacttaaagacggcgagcaaataacgctaaatggaaactgtattatttttttaaaacctaccgacatccagtcttatcactgcgaaggattggtctgggaacaatactggatggaattcacgccgactagcgtgatggatattcccattcgccaacaaggcattatttataatggtgaaatttatagtcaggagttaatggaggtttcgcaattaattaccgcagcggaacccattaaaaataatctggcggtcgcatttctcactaaaataatctatcaatggatttgtcttatctgcgcagacggtaaagcagacccgcagagagtgcagattgagaaattactggccgcgctacatgccagcctgcaacggcgctggagcgtcgcggaaatggcagcggcgattccctgtagcgaaacctggctacgccgcctgtttttacgttataccggtaaaaccccgaaagaatacgtcatggatgcccgacttgaactggcgttatcactgttaaagcaagaaggaaatacggtaagtcaggtagccgatacgcttaacttctttgactcattccatttcagcaaagcgtttaaacataagtttggctatgcgccgtcggcggtattgaaacatgcgaagtaa

SEQ ID NO: 374935 - DNA, 747 bp, Salmonella enterica
atgaaagccatttcgttaaagacatccttcgatgacattcatatcagaaaaagtacatcaaatagtgaacatcaaactttttggcaaaaagttctctcttttgatggatatcctgagcatgcaataaaattatcatcctcttttaatgaacttgtaaaagtagacagtagtatatctgctgaagaaaatgaagcgcttgaaaattacgtcgaaaactcttgggaatatataaataaataccttatcaacaatgaaggaaatgattccactcttcatctggagcgaaaagcaaccttagaaaaattagtaaataaaatgccgctgtcaaatcttgatttctatagagccgttagaacagatggcagaagttttttttcccctcttacttacaaactggaaaatagattaatagaaaccggtaccatcctgataaacaaaggattcttatcattcaccaacaatccatactctttaaaggctttttctggtgatactattaccggggaggttgagaacaactgcattatatataagctaacaggcggtgttaagtcaatatcgaaaatatctcctattgatgagtttgagggaatagttcttcctggcagcttacttgaagtgaaacatgcacgaaatttaaatattaaaataaaatcaggccatctgcggagtatatggattatagagcttgagaaggcgccattatcgtccagtcctcattttgacttctacggcaaacctgtatga

SEQ ID NO: 374936 - DNA, 198 bp, Salmonella enterica
atgatgggaaatgtgagcgatgcacccctttcccggttgacgatgtcatttgtttcatttcagcctgacagctatttatcgataatagcgcacggcatttatgctgccgggtggtacattatcagtaatatcgaagataactgttacaaaaaccacatttccatcaacagtaatataattaccctgctatggttatga

SEQ ID NO: 374937 - DNA, 792 bp, Salmonella enterica
atggtggcgcgctacggccactttgtcacctacgacccgccgctgaccccgctgacggtgctgctgtgggtgctgccgctggccgccatcgtggcgggcggggggataatcgtcgcccgcacgcgccggcgggggcgtatcaaacaggacgtctttgccggcgacattcctgcggcgggaccacgtgcaggcgtggggatgtatcttccgggcgtggttattgcgctggtcgtggccgccatcagttactcacagaccggcagctatcagcaggtcaggaactggcagcaggcaacggcgcagacgccggggctgctggcgcgggcgctggacccacaggcgcagccgcttaatgaagaggagatggcgcggctggcgctggggctgcgtacccgcctgcaaagcgaccccggcaacgctgaaggctggatcatgctggggcgtaccggcatggcatcaggtaacgccggcacggcgacggaggcctatgccagtgcttaccggctggatccgaaaaaccgcgatgcggcgctgggctatgcggaggcgctgacgcgctcgtccgacccggaagataaccgccgcggcggggagttgctgcgccggctggtgagaagcgaccacacggacatccgggtattaagcctgtatgcgtttaacgcctttgagcagcagcgctttggcgaggcggtggcggcctgggagatgatgctgaaactgctgccggcggccgacccccggcgggcggtgattgagcgcagtatccggcaggcgctggcgcaggagaaataa

SEQ ID NO: 374938 - DNA, 2547 bp, Salmonella enterica
ttgtacctctatattgagactctgaaacagagactggatgccataaatcaactgcgcgtggatcgcgcgcttgctgccatggggcccgcttttcagcaggtttacagtcttctgccgacattattgcactatcatcatccactgatgccgggttaccttgatggtaacgttcccagcggtatttgcttctacaagcctgatgaaacccaacgccactatctgaacgaacttgagttataccgcggtatgacgccggaggacccgccgaagggcgaactgccgattactggcgtttacactatgggcagcacctcttccgtcgggcagagctgctcgtctgatttggatatctgggtgtgtcatcaggcctggctcgatggcgaagagcgtcagttgctgcaacgtaaatgtagcttgctggaaagctgggctgcctcgcttggcgttgaggtgagcttcttcctgatcgacgaaaaccgtttccgtcataatgaaagcggcagtctgggcggggaagactgcggttctacgcagcatatcctgttgcttgatgagttctatcgtaccgctgtgcgcctggccgggaagcgtatactgtggagtatggtgccgtgtgacgaagaagagcattatgacgactatgttatgacgctctacgcgcagggtgtattaacgccaaacgaatggctggatttggggggcttaagttcgctctccgccgaagagtactttggcgccagcctgtggcaactgtataaaagtattgactcgccgtacaaagcggtgctgaaaacactgctgctggaagcctactcatgggaataccccaacccacgactgctggcgaaagatattaaacaacgtctgcatgacggtgaaatcgtatcgtttggactcgatccctactgcatgatgctggaacgggtcactgaatacctgacggcgattgaagatccgactcggctggatttagtccgccgctgcttctacctgaaagtgtgcgagaaattaagtcgcgagcgtgcctgcgtaggctggcgtcgggaagtattaagccagttagtcagcgagtggggatggggcgacgcgcgtctggccatgctcgataatcgcgcgaactggaaaatcgatcaggtgcgggaagctcacaacgaattgctcgacgcaatgatgcagagctaccgtaatctgattcgctttgcgcggcgcaacaacctcagcgttagcgccagcccgcaggatatcggcgtactgacgcgtaagctgtacgccgcctttgaagcgttgccgggtaaagttacgctggtgaacccgcagatatcgccggatctgtccgagccgaatttaacctttatccatgtgccgccggggcgcgccaaccgttcaggatggtatctctataatcgcgcgccgaacatggattccatcatcagccatcagccgctggaatataaccgttatcttaataagctggtcgcgtgggcatggtttaatggcctgctgacgtcacggacgcacctgtttattaagggcaacggtattgtcgacctgcctaagctacaggagatggtcgccgatgtttcgcaccatttcccgctgcgtttgccggctccaacgccgaaagcgctctacagcccctgtgaaattcgccatctggcgattatcgttaacctcgaatatgacccgacggcggcgtttcgcaataaagtggtgcattttgacttccgtaagctggacgttttcagctttggcgaagagcaaaactgtctggtaggcagtatcgatttgttgtatcgcaactcgtggaatgaagtacgtactctgcactttaacggcgagcaggcgatgatcgaagcgctgaaaactattctggggaaaatgcaccaggatgccgcgccgccggatagcgtagaggtgttctgctacagtcagcatcttcgcggcctgattcgcacccgcgtccagcaactggtctccgaatgtattgagctacgtctttccagcacccgtcaggagaccggtcgcttcaaggcgctgcgggtttccgggcagacgtggggcctattcttcgaacgcctgaatgtctcggtgcagaagctggagaacgctatcgaattctacggcgctatttcgcataacaagctgcacgggctgtcggtacaggtggaaaccaaccatgtgaaattgccgtcagtggtggatggcttcgccagcgaagggattatccagttcttctttgaagaaacgggcgatgagaaaggctttaatatttatattctggatgaaagtaaccgggcggaagtgtatcaccattgcgaaggtagcaaggaagaactggtgcgcgacgtcagtcgcttctattcgtcatcgcacgatcgcttcacgtatggctccagctttatcaactttaacctgccgcagttctaccagatagtgaaaaccgatggccgcgcgcaggtgattccatttcgtacacagcctatcaacaccgtaccgcccgcaaaccaggatcatgacgcgccgctattgcagcaatatttcttatag

SEQ ID NO: 374939 - DNA, 477 bp, Salmonella enterica
atgaagaataaatgcggaaaaatagcgctgtatttatttttgttggctggcgcttataatttatggaccctgcgtccggttaaagttctgtatgcctattcagattttggctcgacagtttttctggttgtggatcatctgccatggactgacaaagataaaatcaggtggtacctgacgcaccgggaagaatttaagaggaaatatcctttattggatcaggactggtctacctatcttgtgatagatattggcaacggctttactaatgctaaagattatcacgatgggccatatgaagatttatattgctttccaaccattaaggatgatgctgattgtatcgtgaaagattacttattaaccgttgatgagtatcctgataggaacactcgttttggtgtaaccgttattgatggcgagcttgagtaccagttaacgcccgagaaacaaatagagagagttttctatccataa

SEQ ID NO: 374940 - DNA, 837 bp, Salmonella enterica
atgttcaattcatcaatgtatctcccttataccctctttgaacccgtcacacgcttcaacgatgactctgccggtgacatgcaatgtggcgacatgggagaagaagagcttctggcgctcggcctgaatgacatatcagaaaaagtcgatccttatcgccttattcattacccttttcctcatcccggagggatagatggatattttggctcatccacctccggaataaaaatatcgcacagtgagtgtgttgatattttatttacggaaatgaaagaacttgcagggatgttttcattttatggtgaatatagattcttgattgaagagcttatcgggcatttcagatatggaaatggtagccttttttacagccagcaattgaattccgcctttcataaaagaataaatataaaaacacataacagccctcttttaataattaaaaaatgtattgaagatgaatttaaaaatcataaaagggaagtttatatccctgctttattacataaaattcaaacaaaattacttagatcaaaactcgctaaatttaataatctggaagacagaatcaatggactggagatctgcgttcacgatatcgctgcgcaaaagataactctcacgaattttcaaaagtacgccataggctggagcgctacattacatttcgttgcgcaggatcattttgggctggacgttgctgatattaagaataagctttatcgcgaatttcgttttttccgcatatggtgctttttacagcggcacagagattttgcctttaaaccttttttcacaaattttaacactatcaccagaatcggcagttactga

SEQ ID NO: 374941 - DNA, 666 bp, Salmonella enterica
atgataaaaaacactgtgtttttcgtcccaggtatttccggagccagcaacgcctccagtctgtcgatccgcaatcgccgggcagcgattattctgcatgaaatttatgggattaacgctcatatccagcgcgcaggccatgaatggatgacacgcggattcgacgtctataccccctcgctgtttcctcaccataccccttttcgctatgagcaacaggaggaggcttaccatcacttttcagaaaatattggttttgattccgccgtcgttaccacgttactcaatgatctcagagtgcagtacgagacgctgatcgtcgttggatatagcgtcggcgccacgctcgcatggctaagcgcggccagtgggttatgcgatggcgtaatttgctattacggttcccgtatacgccagtacacccatccagcgcctcgctgcccgacgctggttattatcgcgcgctatgagccagcgtttgatcccctcgccatgcgtcaggcgttggaaaagctcccacgggtgcggtgtaaaatgtacgatgcgcggcacggcttttgcgatgctgatagcgcaacctttgatgcagccctatcccatcaggtaatggacctggtgactacatttattcgcgacctcatcagtgcaaacacatcgcccgattga

SEQ ID NO: 374942 - DNA, 447 bp, Salmonella enterica
atggacgccatctatttaaaactggacggtattgaaggcgaaagcttgaccaaaggtttcgaaaaacaaataagacttattgcttacaaccacagccaggcgaagtgggaatccggcgaagcgagaggaacatatattggtggattgacgctgacgaagcctatcgatcttgcgacgccagggctctatgagcactatcgtaacgggaaaacggtgaaagaaggcgtgctgacattatgccgtaatgataagggcgcaatgcagccattcattatttatacgctcaccaatgtgcggattttacgcatgagcaatcatggccataccgaagacagcgccacggaaaccgtggatttggtttatagccatattcgttgggatatacccgcattagcgccaaaaagcaaaacacggctgccacttcaccgacaggaattgtggagataa

SEQ ID NO: 374943 - DNA, 909 bp, Salmonella enterica
atggatgtaactggagcaggtttgcacaatattgagacaaaatggctgtatgattttctgacgctggagaagtgtcgcaatttctctcaggccgctattatccgcaacgtatcgcaacccgcctttagccggcgtattcgcgccctggaacatgccgttggcgttgaactgtttaaccggcaggtctcgccgctacagctttccgagcagggtaaaatatttcattcccaggttcgccacctattacagcagttggaaagtaatctgaccgaactgcgcggcggcagcgattatacgctgcataaaatcaaaattgccgccgcccactcgctctccctcggcctgttgccgactatcgttaagcagatgcccacacagtttacctactccgttgaggcgatagatgtcgaccaggcggtagatatgttacgtgaggggcaaagcgattttatcttttcttatcacgatgaaaatctgcaacagacgccgtttgataatatccgcctgtttgagtcgcgactgtttcccgtctgcgccagcagtgaacagggcgagccgcgctatacgcttgagcagccgcactttccgctgctcaattacagccagaactcctatatgggccggctgataaatcgtactctgactcgccatgctgaactgagtttcagtacgtttttcgtctcttcgatgagtgaattattaaaacaggttgtgatggacggctgcggaatcgcctggttgcctgagtatgctatccgtcaggagattaccgacggacgcctgattgtgcttgatgccgacgagctggttatcccgattcaggcctatgcctatcgcatgaatacccgcatgagccaggtggccgaaacgttttggcgcgacctgcgagggcttcaggccgcgctgtag

SEQ ID NO: 374944 - DNA, 924 bp, Salmonella enterica
atgagcgatatccagcttttccgctacggcgccgggaaagtacaagaactgccgggcaaagctgcggtcattgaaaaagatctgcaaacgctgatcgaatcccatatggaaacatttctcggcgtccgctttctcgataccgaataccgcacgggcaaaacccatcgtgggcgaattgattccctcggcctcgatgaaaataactgcccggtaattattgaatataagcgccacagcaatgaaaacgtcattaatcaggggctgttttatctcgactggctgctcgatcataaagcggaatttcagttgcaggtgatggagaaaataagtaaaaccgcggccaaagccatcgactggtccggcacacggttaatctgtattgccgccgattttaataaatacgacgaacatgccgttcagcaaatcaaccgcaatatcaacctaattcgctacaagctttttgccgacgacctgttaatgctggaactagttaacgccgtggtcgaaaatagccctcagcacatcactgtggacggcccgaccagcggtaacggtaagcgccatacccgcacgcagcgcgaacagctctcttcggcctcacccgcgctgctttcattatatgaacagctaaaaagctatgtgctatcactcagtgatgaggttcagtttaaagagcttaagctctatgacgccttccgcctcattcgtaactttctgtgcgtggccgtttatcccgttaccgacccacacctacgcctgtggctgaaaatcaatccacagcatatccagcttgaagaaggatttagccgggacgtcacaaacattggccactggggaaccggcgacgtcgaattgattgtgcgtaacgaacacgatctggataaagccaaactgctgatcgagaaagcctggcaggaaaattag

SEQ ID NO: 374945 - DNA, 645 bp, Salmonella enterica
atggaacaggttacaacgctatttcccacggcgtttcccgcactggcgctggcgcattttatggcactgctcagcccagggccagacttctttttactggtcggttacgccatacgctaccggctacgcggcagcgttgggctgtgcctcggcattgcggcgggaaatgggctctacattctgctggtggtgattgggtcagggctactgcgtcagacgccgctgctcttgaccatcatcgaactgttcggtgccgcctacctgctatgggtgggccgtcaattgttgaaaagccgtgccgggccgctggggtggcggcggcacgccgcatcggcatgtccgtcactggcaaaacagctattgctggggccaggctcatcactgctgaatccgaaaaatgctctgttttatctggcgctaatgaccgccctgctggccccaaacgtgaccgtgacacagcaggccatatgcggaatctggatgaccagcgtagtgttactctgggatctgctgctgataacgcttatcgccctgccgcaaattcaacgtcgtctgggtaatcttgtctggaaaattgaacgcgccgccggcggcattctgatcgcctttggcagctggattgtgtggcagttcatcacaagttaa

SEQ ID NO: 374946 - DNA, 780 bp, Salmonella enterica
atggtagaggcgcttttacttgggctggtggcgtttatcgcccagtcggaatatgcattagggacatcgctgatctccagacctatcgtgaccggactcttaaccgggttggtgctgggcgatatggaaaccggaattgtgatgggcgcgacgctggagctggcgtttatcggttccttttcggtgggcgcgtcgctgccgccggatgtggtcactggcggtattttaggcgtggcgtttgctattaattccggtgccggaacggaaaccgcgctgttattaggtttgcctatcgcgacgctggcgttaattgtgaaaaatatctataacggaatgtttattccgttactctgtcataaagctgatgcttacgctgaagtcggtaataccaggggcatcgagcgtatgcatttaatctccggtattgggctgtcgctgacgctggggattatcgtcacggtctcttatttagcgggcgtgaatgtggttaaaggttttctggatgccattccggaatttattaaacatggtttaagtgttgccaccggtattattcccgcgctgggttttgccatgctggctcgattattaattaataaaaaagttgccccgtattttttcctcggttttatattaatggcgtatttaaaaataccggtgacgggtattgcgattctcggcgcgattgtcgccgtcgtgatggtaaatatgccaaaacttgcggcctcacagccagcccctgcgcaaggagcgtctcatgacgatgaagatgatttctga

SEQ ID NO: 374947 - DNA, 327 bp, Salmonella enterica
atgactcagcaatctccctattcagcagcgatggcggaacagcgtcaccaggagtggctacgttttgtcgagctgcttaaacaatcctacgcggaagatctgcatattccgttgcttaatttgatgctgacgcccgatgagcgtgaagcgcttggcacacgggtgcgtattatcgaagagctattacgcggcgagatgagccagcgtgagcttaaaaatgagctgggcgccgggatcgcgacgatcacgcgcggttcaaatagccttaaatcagcgccggttgagctacgtcagtggctggatcaggtattgctgaaagaggcttga

SEQ ID NO: 374948 - DNA, 264 bp, Salmonella enterica
atggcacagatcgccgggtttgggacgccgctatcgctggcacgtcatgagtttccgcttctcaaaatcccgctgctgtcgccggagagcgtgtactcgcgccagcaattgatgaatattatctggtccgatgcgcaggatatcttcgaccggacggttgatacgcatatcaaaatgctgcgcgctaagctacgtgcgatcaatccggatctatcgccaattcaaacgcatcgtggtatgggatacagcctgaggagcatctga

SEQ ID NO: 374949 - DNA, 1431 bp, Salmonella enterica
atgcctgagtttttcagttttattaacgaagtactctggggctcggtaatgatttacctcctgctcggcgcaggatgttggtttacctggcagaccggattcattcagtttcgttatattcgccaatttagccgtagcctgaaaggcagctttagcccgcagccaggcggcctgacgtcatttcaggcgctgtgtaccagcctcgcggcgcggattggcagcggtaatcttgccggcgtgtcgctggctatcgccgcaggcggtcccggcgcggtcttctggatgtgggtctcggccatcatcggcatggcgacctccttcgccgagtgttcgcttgcacagctttataaagaacgcgacccggcgggccagttccgcggaggcccagcgtggtatatggcgcgcgggctcggtatgcgctggatgggcgtggtgttcgccctctttctgctcgtcgcctacggggtgatttttaatagcgtgcaggctaattccgtctcacgcgcgctccattttgccttcaacattccgccgtttatctccggcattgttctggcgttctgcttgctgttaatcatcattcgcggcataaaaggcgtcgcgcgcctgatgcagtggctgattcccattatcgcgttattgtggatcaccagcagcgtgttcatttgcctctggcatattgagcaaatgcccgaagttatcgcctcaatagtcaaaagcgcatttggctggcaggaggctgcggcaggcgccgccggatatactctcactcaggctattacctgtggttttcaacgagggatgttctctaatgaagcgggaatgggttcaacccctaatgcggccgctgcggcggcatcgtacccacctcatcctgtcgcgcagggcattgtgcaaatgataggcgtatttagcgatactattatcatctgtaccgccagcgcgatgattatcctgctggcggggaatcatacatcccactcgtcaacggaaggcattcagcttatcctgcacgcaatggtttcgctgaccggcgaatggggcgccagttttgtcgcgcttatggtcattctgttcgccttcagctccatcgtcgccaactatatatacgccgaaaacaatctgttttttttgcggttacataacgcaaagatgatctggctgttacgccttgcgacaattggcatggtcgtcgccggggcgctacttagttttccgctggtatggcagctcgctgacgtaatcatggcctgtatggctattaccaacctgacggcgattttactgctctcgccggtggtgcataccctcgccagagattatctgcggcaacggaaactgggcgtaaggccgcagttcgatccgcagcgtttcccggatatcgagccccaactggcgccagatacctgggatgcgtcattacgcgattaa

SEQ ID NO: 374950 - DNA, 249 bp, Salmonella enterica
atgacggccctgaatctattcaccagcttgttaaagttgggcttgacaatcgttactggcatggatgggaaaacctatacggaggagagtgttagtaacaatgttcacgatttaatgatgtcactcttcttgttcagccgggcaaatgaagagtcgctgactaagcaaaaacgtgcctttgataccacattgaagctgattgaacggcataaatcggggcaacctacgaacataaaaagtgcaggctga

SEQ ID NO: 374951 - DNA, 945 bp, Salmonella enterica
atgccagaggtcaaaaccgaaaagccgcatcttttagagatgggtaaaccgcagcttcgcatggttgatttgaacctattgactgtgttcgatgcggtgatgcaagagcagaatattacgcgcgccgcccatacgctgggaatgtctcagcctgcggtcagtaacgccgtggcacgtctgaaggtgatgtttaatgacgaactatttgttcgttatggacgaggaattcagccgactgcccgcgcatttcagctatttggttcagtccgccaggcgttgcaattggtacaaaatgaattaccgggatcggggtttgagccgatcagcagcgaacgtgtattcaacctttgcgtgagcagtccgctggataatatcctgacgtcactgatttataatcgcgtagaacaaattgcgccgaatattcatctcgtttttaaagcttcgttgaatcagaataccgagcatcagctacgctatcaggagaccgaattcgttattagctatgaagaattccgtcgtcctgaatttaccagcgtaccgctatttaaagatgaaatggttttagtcgccagccggaaacatccgcgtattagcggcccactgttagaaagcgatgtttataatgaacaacatgcggttgtttctctcgaacgttatgcttcatttagtcagccatggtatgacacgccggataaacagtcgagcgtggcttatcagggcatggcgcttatcagcgttctgaatgtagtttcgcagacacatttagtcgccattgccccgcgctggctggcggaggagtttgcggagtcgctggatctgcaaatactaccgttgcctttaaaactgaatagccggacatgctaccttgcctggcatgaagcggctgggcgcgataaagggcaccaatggatggaagagttattagtctctgtttgtaagcgataa

SEQ ID NO: 374952 - DNA, 1179 bp, Salmonella enterica
atgctctggattatgacgatgggacggcgtctcaacgggatttatgcggcgtttatgctggtcgcttttatgatgggcgtcgccggcgcgcttcaggtgccgacattaagcctgttcctgagtcgcgaagtgggcgcgcagccgttttgggtggggctattttataccgttaacgccattgccgggattggggtcagtctggcgctggcgaaacgctcggacagccgcggcgatcgccgtaagctgattatgttttgctgtctgatggcgatcggcaacgcattattgtttgcttttaatcgtcattacgtaactttaattacctgcggcgtactgctggcgtcgctggccaataccgccatgccgcaactgtttgcgctggcgcgggaatatgccgatagttcggcgcgcgaagtggtgatgtttagttcagtgatgcgcgcccagctttcgctggcgtgggtgattggtccgccgctggcctttatgctggcgctgaattacggattcaccgccatgttctctattgccgccgttatttttgccgtcagcctggtattgattgccctgatgctgccttcggtggcgcgcgtcgaacagcctgtcgatgcgccgattgctcagggaaacggctggcaggataaaaatgtacgtatgttgtttatcgcctccacgttaatgtggacctgcaataccatgtacctcattgatatgccgctatggataagcgctgaactgggcctgtcggataaactggctggtgtattaatgggtactgcggcagggctggagattccggcgatgattctggccggcttttatgtgaagcgttttggcaaacggcggatgatgatcgccgccgtggcggcgggcgtgttgttttatatcggtttgatcttttttcacagtcggacggctttgctgttgctgcaactgttcaatgctatttttatcggcattgtcgccgggattggaatgctgtggtttcaggatttgatgccaggcagggcaggggccgccacgacgcttttcaccaatagcatttcaacgggcgttattctggcgggcatgattcagggcgcggtggcgcaaagcttcggccattttgccgtctactgggtgattgcggcgatttccgtggtcacgctggccatgaccgggcgggtgaaagacgtatag

SEQ ID NO: 374953 - DNA, 1287 bp, Salmonella enterica
atgtctgaagatatctttgacgccattattgtcggcgcagggctggcagggtcagtcgccgcgttggtgctggcgcgtgaaggcgcgcaggtactggtgattgagcgaggcaattctgctggcgcgaaaaacgtcactggcggtcgcctctacgcgcatagtctggagcgtattctacccgattttgcggcacgggcgcccgtagaacgcctcattacccatgaaaaactcgcctttatgaccgaacaaggggtgatggcggttgattatgttaatgcggaggagcaagcgccttcacgacgttcttattccgtgctgcgcagtaaatttgacgcctggctgatggagcaggcggaagaagcgggcgcgcaactgattaccggtatccgcgtggataacgtcgtacagcgcgacggcaaggtcgtcggcgtggaagccgatggcgatattatcgaagcgaaagtcgtgatcctggcggacggcgtcaattccttgctggcggaaaagctgggcatggcgaaacgcgtcaacgcttcgcacgttgcggtaggggtgaaggagctgatcgaattgcccaaatccgtcattgaggatcgttttcaactacgaggcaacgaaggcgcagcctgcctgttcgccggcgcgccgaccgcagggctgatgggcggcggatttttatataccaatgaaaccactctgtcgctggggctggtgtgcggtctgcatcatctgaacgcggcgacaaaatccgtgccgcaaatgctggaagattttaaacagcatccggcggtcgcgccgctgatcgccggcggcaaactggtggaatatgccgcgcatgtcgtcccggaggccgggtttgctatgcagcctgagctggtgagcgacggggtgttgattgccggcgatgctggcggaatgtgcatgaatctgggctttactattcgcggtatggatttggccgtggcggcaggagacgcggcggcgaaaaccgtcctttccgcactgcgcagcgctgattttagtcggcaaaaactggcggaatatcaccagcatctcgacaacggtctgatgcgggatatgcgaatgtaccagcgtctgccggcgtttctcgataacccgcgcatgtttacccgctatccggaaatggcggtcggtatcgcccgcgatctgtttaccgttgacggcggcgcaccggaggcgatgcgtaaaaaaatcctgcgtcatgcaaagaaagtcggccttatcaatctgatgaaggacggtattaaaggagcgaccgcattatga

SEQ ID NO: 374954 - DNA, 774 bp, Salmonella enterica
atgaagatattgacttgctacaagtgcgtgcctgatgaacaggatattgtgattaataacgaagatggttcattagatacccataaagccgacgccaaaattagccaatacgatttaaatgcgattgaaaccgcttgccagttaaaacagcaggccggcgatgccgtggttacggcaatgagcgtgggcggccaggcgctgaccaatgccaaagggcgtaaagatgtgctttctcgcggccctgacgatcttattgtcgtgattgatgagcagtttgaacaggcgctgccgcaacaaaccgccgccgcgctcgccgccgctgcgcaaaaagcgggttttgatctgattatctgcggcgatggctcttccgatctttatgctcagcaggtgagcctgctgctgggtgaaacgttgcatatcccggccattaacggcgtgcgcaacatcctttcgctgagtgaagacgcccttatcgttgagcgtgagttggaagatgaaatcgaaacgctgcatatcccgttacctgcggtcgtggcggtctctaccgatattaactccccgcaaatcccgtcgatgaaagcgattctcggcgcggcgaaaaagcccgtccaggtctggtctgcggcggacatcggctttagcgcggcggctgactactccagccaacgcgtcgctgcgccgaaacagcgcgagcgtcagcgaattgtcattgaaggcgagggcgaagaacagatcgccgcattcgccgaaaacctgcgcaaaatcattaagtaa

SEQ ID NO: 374955 - DNA, 1554 bp, Salmonella enterica
atggatattgtaggcggacaacacttacgtcagatgtgggacgacctggccggaatatatgaaggcaaaacggcgctaatttttgaatcctgcgcgggagaagtacagcatttcagctatgcctcgctgaatagagagatcaatcgcacggcaaaccttttttattccttaggcatacgtaaaggcgacaacgttgctttgcatctggacaattgcccggaatttatcttttgctggtttgggctggcaaaaatcggcgccatcgtcgtgccgattaatgccagattattgcgcgaggagagcgcctggatcctgcaaaatagccggacgtcgttactggtcaccagcgcgccgttttatccgatgtatcgtcagattcagcaggaagggcgcacgccgctcagtcatatttgtctgatcggcccaacgcttccggccgaagaaggtgtcagccacttttatacgctgaaagcgcagcagcccgacgtcctgctttatacgccgccgttaacgcctgacgatactgcggaaatcctttttacctccggcaccacgtcccgcccgaaaggggtagtgattactcactataatttacgtttcgctggctattactcctcctggcaatgcgcgttgcgcgaagatgatgtttatctaaccgtcatgcccgccttccatatcgactgccagtgtacggcggcgatggcggccttttctgtgggcgctacgtttgtgctgatcgaaaagtacagcgcccgcgccttctggggacaggtgagaaaatattgcgcgacagtgacggaatgtatcccgatgatgatccgaacgttgatgacgcagacgccagccgctgacgatcgtcaccactgtttacgcgaagtgatgttttacctcaacctgtccgtgcaagagaaagaggcctttactgagcgcttcggcgtccggttgttcacctcttatggtatgacagaaaccattgtcggtattatcggcgaccggcccggcgataagcggcgctggccgtcgattggtcgtccaggtttttgctatgaagcggagattcgcaacgaacaaaaccgcgcgcttcctcccggcgaaatcggggaaatatgcattaaaggtattcctggtaaaacgctttttaaatcttatttcgaacgcccggatgccacagccaaagcgcttgagcccaacggctggctgcataccggcgattccggctatcgcgatgaggaaggctttttctatttcgtcgatcgtcgttgcaacatggttaagcgcggcggagaaaatgtctcttgcgtcgaactggaaaatatcatcgccggacatcctaaaattcaggatgtcgtggttatcggcattaaggatgatattcgcgatgaagctattaaagcgtttgtagtactcaatgaaggagaaacattaaccgaggaggatttttttacgttttgtgaggaaaatatggcgaaatttaaagtaccttcatatctggaaataagagaagatttgccccgtaattgttcaggaaaaatcattaaaaaaaatctgaaataa

SEQ ID NO: 374956 - DNA, 669 bp, Salmonella enterica
atgttatccggtgcggtaaaggctgatgaaaaatgcgccgtcaaagcgaaaccggcgtgggataaaccttttactggcgaaatcccggaaaaattgccagaaggatataatattctgttagtggtgaccgaccaggagcgttttttcgctacgtatcctttcccggtacccggcagagagcggctcatgaaaacgggggtgacattctgtaaccaccagaataccagtaatgtctgcacgccttcccgctccgtattgtataccggcttacatatgccccagacaaagatgtttgataatctgggattaccctggatgccctatgaccttgaccccgctcttggaaccacaggccatatgatgcagaaattgggatactatacggcctataaagggaagtggcatcttacagaaaaactggagaagcctcttcctgatgaaaaagatgaggatattgatgtcgggaatattcctgaaccagaattacataagattatggaaaaatatggtttttctgactatgttccggaaaaagccttaaaccgctttgtcatcagtttaaggctactggcatcaatggcctttccattccggatcgcgtttttcggcaaacgccagcggcccttcgagggcatcttccgagtgcaggacggcgggatagtgttttag

SEQ ID NO: 374957 - DNA, 396 bp, Salmonella enterica
atgagtaaagaatatgttgaaaagccactttatttgttaattgctgattgggtaatggcggagaaccgttgggtgagcgctaaagagattgctaagcaatttaatatggaccactgcaaggcgataaacacggtttcttatattctttcagaagtgggagaaataaactgcgaaactaaaaccattcctaatcaactcgaagggcgaggttgccagtgtcagcgtctggtgcgtattaaaagtattgattcgcagctgtatgcgcgcattggaaatagcgcccgggaaaagatggcaggggcaggaaaaacgccacatatgacgacagttccgccgacggagcttaaccgggagcaaaagtggcaaatgatgctgtcaaaaagtatgcgtcgttag

SEQ ID NO: 374958 - DNA, 738 bp, Salmonella enterica
atgtctactgaaagtaatattattatcgatggcggttttgaagaggggtttgatggctgggtactgtcatcgcagtcatccatatttgtcgaagatggcgcgacaggaaacaaccacttttgtcgaatcgaacccaccaataccattacgcaatactttaccattgagcccgaaaccacctatcggctgactctcgccgttagaggcgaggcgaagggaaacgtcactatttcccagacttatcctacccatacctcttttatctctgacatcaatgctaacttaaatgcggaatggcacagggaagaatatgtcttcacaaccggcgctgatacgggtcgtaccgcgttcaggatttccgttccgtggaacagcgctaacaccccaatggatatcgatcttatcagcctggtcgaggtgccttttgaatacagtaagccgttgtgggtgaatatgactaacgtcagttcaagcagtaactttttccagttgaacgtcatgacccgtaccgatgcgcctgaagggcaaattaaccgcatttatcgtaatggcaattacgtcacgcagatggatgccgttggtccggatgactttaaccaaaccggcggctattccagctttgctgctggcgatgtattccagttccgcgcttataacagccttaccgggaaagagtatttactctgtgaaaccacctatgaacagcttactgcaagcggcgtgttcaatattgaataa

SEQ ID NO: 374959 - DNA, 726 bp, Salmonella enterica
atggctgagattaacaatattattattgatggttcctttgagggtggtttaacagaacaatggcaaattggctcactggttgaagtagaagaaaatgacagcaaccatttttgccgtatcgatagcgctaacgccttaagccagacggtaacgctggagacattcatgacttacgcgatatcttttttaatcacggggaaccttgttggaaaaattatcgttcagaccacagacagaaccacgacgttttttgaacatgatatcaatatgactacgcaagatgaatggcacacggaatcgctggagttttcgacacaggcggtagcaggcgaagccgttgtcagctttatcgcgccgggtgagattggcgcaggaagtctgtttatcgataatattaacatggcggcggtgcccttcgtatttactcgcccactgtgggtcaatatggatcgggcatccagtaattatgtctactatcaatatggcataatgaccactgcggatgccgcgactcaaacctatcgtttatataaaaacgagggttttctcgcagaatacagcatcggagcggatgattttgtacaaagcaccacaatgaataccgttgttgccacggatgtatttaaactgactattcttaacacgaaaacaacggcagaacatgtcgtgagcgaagaaactgtcgaaacattaatggcgaaaggcgttatttatctgactgaataa

SEQ ID NO: 374960 - DNA, 264 bp, Salmonella enterica
ttggctaatatcaaatcagctaagaagcgcgccgttcagtctgaaaaggctcgtaagcacaacgcaagccgtcgctctatgatgcgtactttcatcaagaaagtatacgcagcaatcgaagctggcgacaaagctgctgcactgaaagcatttaacgaaatgcaaccaatcgtggaccgtcaggctgctaaaggtctgatccacaaaaacaaagctgcacgtcataaggctaacctgactgcacagatcaataaactggcttaa

SEQ ID NO: 374961 - DNA, 906 bp, Salmonella enterica
atgagcgtgtctcatattaactacaaccatctttattatttctggaatgtctataaagaaggttcagtcgtgggtgccgcagaggcgctttttctgacgccgcaaactattaccggtcaaatcaaagcgctggaggaacgtttacaggggaagctattcaaacgtaagggacggggtcttgaacccagcgaactgggcgagctggtttttcgctatgcggataaaatgtttacgctaagccaggagatgctggatatcgtcaactaccgcaaagaatccaatctgttgttcgatgtcggcgtagccgatgctttatctaaacgactggtcagtagtgttctggatgccgcagtggtggtggatgaacccatacatctacgttgtttcgagtccacgcatgaaatgttgctcgaacagctcagccagcacaagctggatatgattatctccgactgcccgatagattccacgcagcaggagggactattctcagtcaaaatcggtgaatgcagcgtcagtttctggtgcacgaatccgcttcccgaaaaagtgtttcctgcctgcctggaagagcgacggttgctggtgccgggacgtcgctcgatgctgggacgtaagttgctgaactggtttaattcgcaggggttgcaggttgagatacttggcgagtttgacgacgcggccttaatgaaggcgtttggcgcgacgcacaacgcgatttttgtggcgccgagcctttattcgctggatttttatgctgatgagtcagtaatagagatcgggcgcgtcgagaatgtcatggaagagtatcatgcgatttttgccgagagaatgattcagcatccggcggtacagcgtatatgtaatgcagattactctacgttgtttactccggtaagtagataa

SEQ ID NO: 374962 - DNA, 792 bp, Salmonella enterica
atggtggcgcgctacggcaacttcgttacctacgatccgccgcttacgccgctgaccatcctgctgtgggtgctgccggcggcggctgtcggcgcgggcggctggattatttttgcccgctcgcgtcgccgggtgcggcttaagcaggaagaattttccgacgctgttccggcagatggaaaacgtgccggatcaggtgcttacgtaccggggatcgtgattgctctcattgttgcggcgataagctattatcagaccggcagctacgggcaggtgaaaatctggcggcaggcgaccgctcttacgccggtactgctggagcgcgcgctggatccgaaggcgcagccgctgaatgaagaggagatggcgcggctggcgctggggctgcgcacccgcctgcaaaatgatgccggcaatgttgagggctggctcatgctggggcgcattggtatggtactgggtaatgccggtaccgccaccggggcctatgcgaacgcctaccggctggacccgaaaaacagcgatgcggcgctgggctacgcggaggcgctgacgcgctcgtccgacccggaggataaccgccgtggcggggagctgctgcgccggctggtgagaagtgaccacacggatatccgggtgttaagcctgtatgcgtttaacgcctttgagcagcagcgctttggtgaggcggtggcggcctgggagatgatgctgaagctgctgccggcgggtgacgcccggcgggcggtgatagagcgcagtatccggcaggcgctggcgcaggagaaataa

SEQ ID NO: 374963 - DNA, 645 bp, Salmonella enterica
atgcctgaagtaacacctgttcaggtgcttattgtggacgaccatccacttatgcggcgaggtattcgccaattactggaactggacccagcttttcatgtcgttgccgaagcgggtgatggggcgagcgcgatcgatctggcgaatcgcattgagcccgatttgatcctgctggatctgaatatgaaaggcctaagcgggttagataccctgaacgcgctacgtcgggatggcgtgacggcgcaaattattattcttaccgtctcagattccgccagcgacatctacgcgctgatcgacgccggcgccgacggttatctcctcaaagatagcgatccggaagtactgctggaggctattcgcaaaggcgctaacggcggtaaagtctttagcgagcgggttaacgaatatctgcgtgagcgcgaacggtttggcgcacaggaagatccctttagtatcctgaccgaacgagagttagatgtcttacatgagctggcgcaggggctttctaacaaacagattgcatcagtactaaatatttctgagcagacggttaaggtgcatatccgtaacctgcttcgcaagcttaacgtgcgctcgcgcgtcgcggcgaccattctgtttttacaaacgcgcggaatgtaa

SEQ ID NO: 374964 - DNA, 486 bp, Salmonella enterica
atgaataaaaatagcgacattttctcattgttaaaagtggaagagggagttagtcataaaccttatattgatgctctcggttatcctactgttggagttggttttaagctagggccacaaggcgctaacctgaaaaactatacattttgtttaacagataatgtcattgaggcctggcttcaggaaaatattaatagggtttacaagagcatgcaacagaatgagaaaatcaaccaggcattgttatgcagcaattcagttcgtacggatatcctgatatcaatggcatatcagatgggggtcaatggtcttgctggttttaatagtatgcttatggcgataactgagctggaatggaataatgcagcagatgaaatgagaaggagtatttgggcaaagcagaccccaaaacgggccgaaagacatgctgcagtaatagaatcaggacaatgggcaccagtatataattttgctattaaccaatag

SEQ ID NO: 374965 - DNA, 321 bp, Salmonella enterica
atgttccagttgcttgggcaaggtacagtatggattattcttggagcaattgctggaggtacagtatttgtagtgtcggcgtcggagtatatactatctgtccgcattatcctttttgctgtatcagtaattataggtataatattcgctgatttagttgcattggcattaactcatctaattaataaacacttctctgtgatgttagtaattccttcgtccgttggggctgttgtcgcctctacactttctattcgtgtgcttacttttttaggaaaacggatagttgatttacaagcaggaaagaataatcatatataa

SEQ ID NO: 374966 - DNA, 177 bp, Salmonella enterica
atgaatcaggcaagactattgcaacattactcttggatgagtatgaaacgtagtttttcaaaaaaactaagtttgcttaaaacgaagcagccactgtatttgagttttagcctttgcaaggcatctttggcgatggcgaagctgacagacagcgaaatccccatgctatcgctttag

SEQ ID NO: 374967 - DNA, 2916 bp, Salmonella enterica
atgtgtactgtaacagttgcttcaggcactccggttatcagcgttaatgataatcgggggtttatcgtacgtatactaaactggaaccgtgaaaaagcgtccgttccgcggcgtcttttggtcaaccacagctaccatgctgatgacagcccggtggaagaaaaacgtgatcccaggctattttcagcatggctaaaagaccggagtgtagtggcaaatttgcgcaatatgtcatctcttgccgggcaggtaatcaaaagagagagcaccgacagcggatggctggtcacgctgtttgatgccgcggctcgcctggtgtggctcactgatggtcgtggcgccacgcaagagcagacctacgatgaactgggccgcctggtgcagacaagggagcagcaaaaagatggggaaaaacgcgtcagccggataactgaatatggtgataaaggtctggagggcgataatctgaaaggcctgcctgtacggcagtatgatgacagcggcctgcaaatcatccattctgtcgcgttgagcggagcaaccttacaaatatcgcagcaattcctgatgtcaggtgatatagcgccaaactggcctgcagacgacactaacagaaagcgtcttctggattcggaaatctatgtaacttcgctacaagcagatgctttcgcaaatacgctaaccagaaccgacgccatggggcaccaacagagctggcgctatgatatcagcgggaaagtaacaagtcaggccataaaactagatggtgaaactaaacagacgttacttgaacatatcagttggagtgctgcgagtcaggttttagaagagaaaacaagcaacggcataactacgacatacggctatgagcctgaaacacaatggctatcaacactggcagcacagcgcagtgataacacagtacttcagtcactggcatatcgctacgacaatacaggaaatgtcacctcgattacggataaccaggtagcaacacgctactatcgaaatcaggttactgacgggctgaaagaattcagctatgacgccctctaccagttgctggaagccacggggcgggaaaacgccgggaacaacataatgccctacagcagtttacctgccgcactgacgcccgtacccacggacaacagtcagtatgtaaactacaccaggacctggatgtgggacgacagcggcaacctgcagtcacagactcacacgggggccggaaactatacgcgaacgatgataacagagacgacatcaaaccgtagtgtacaaatgaacgacggtggagcgcaggcttcagatgagataaaccaatggttcgatagcaatggcaacctgaagcagttacagatttcggcgtcttcatccagtcataacatgatctgggacggtaataataacctacaggcggtagtgctactttgccgcagcgccacggatatggcacagaatgatcgagaaatttaccaatatagcggcaatagacgcgtccgtaagcagacccgcaccctgacgaatgccagccagcaactttggacagtagatgaagtacgctacctgccgggtcttgagctacggcaaagctggcaggagtccgtggggggtaacaacgttatttcagtacttcataccttaacgggtcaaataggccgtgccggcatacggatattgcactgggaatcaggtaaaccgaatagcattgataataatcagctacgctggagtctttgcgacaatatcggctctgcatcactggaactggatgcagatggtcagcaaattagtcgggaagaatactatcctttcggcggtaccgctgtgtgggcggcacgcaatgaactggaagccagctataaagtgattcgctactcaggtaaagaacgtgacggcaccggattgtattactacggctaccgctattacgccccctggctgtgtcgctggacagcagccgatccggggcgggagatcgacggtctgaatttataccgtatggtgagaaataatccactgacactttcagatgccgaaggactcgcacccacggcatcaggtggcgctgagaagcccaaactttctgataagcaatctcagaaagtcgatgcagtctataaaaaaatgggaacgggtagactctggtgcgcaaaaaatccacaatttagctgtctttatgcccctagctcagctgctcgcgtgcgtcaaataagctccgataacatcagggctttgaaaaaaaggttgggaaaaatgagtccggaagaaaaaacatttgttgaaagattcatgcaacttgaatttcaaatgatacatcacacaaatgcccatataaccaaccctaaaacattagaagagacttttttaagccgtgatgagttaataaatagaaggatagtgtttgacactacccataccaccgatgctgatgttgttcaacttgctaataccggattcgctttcttcgccctttcggttaaaggaattaaattgcagaagagcaacagtcgttttgggaaaaatgtacatgtggtatcgatggacacggcgaagcaaaaaagcccgtatatgactgaagcacatatggttattaataatacattaaaattcaaggagagaaaactatcagaaagattagttacattactgggtggagatgatatcgcgcgcagagatgcgagagtgtttagtcatcaggttgtcgcagacgatgccaaagatactctctttcacattgatgatattcacatgggcctcgctttatctattctctggagtataagatctgcccctatttcagaaagatccagacaaattttattgggtgttaagggcgaagcacagtttgaacaattaattaccactttatttagaccacagatactggttcctgtggaattgacggtttaa

SEQ ID NO: 374968 - DNA, 2889 bp, Salmonella enterica
atgacgctatcaaccgcaacgccggtggttaccatctgcgataaccgcggcatgaccgtacgcacgcttaactggaatcgtgaatccgaccaggatccgttacgccttttgctatctcattctcaactggagacatccagccggaccgccctataccgcgatccccgccgctttattgcctggcagcaggacagtacggcagtgccgaacctgcacaacaggctgtcactggcaggccagatactgaagcgcgacagcaccgacagcggctggcacgttatgctctttaatgctgaaggcgctgccgcatggggcatcgacgctcgcggtactatccagactcatgcctgggacgtgctgggccgtccagtttcaggtattgaacaggctgccggtgacgcaccccgaaccgcctggcgtaaagagtatggcgatgctgttgtatcccctgaggatgcttaccgtaacaatctgcgtggtgtctgtgtgcaccagtatgatgacggcgggctactttccatcaacgcgattgcccttagcggcgccgttttacagcaaacaaaacgttttcttaacgatgctgaaggtaagcctgactggccggaaaatgataccgcttgtgacgccttactggaagacagcggctttatctccactattgtagcaaatgctgccggcgccccctttagctggacagattcgcagaacaacagagtggcgacattttatgacgtcagcggcgctacctgccgccagactctgcaactggccggacagactacgccgctcaccctgctggaaaacattgcttttaaccccgtagggctgatcgctgaagaaatcagcggaaacggtgtgacaactacctacagctatgaaccagagaccttacgtctgcataatcttcatgctgtccgtagcgatagtagcgtgcttcaggatctaacgtatgattatgatccagtagggaatagaacggtcatcaccgacagtactgtcaacatacgttactaccgaaaccagtcgacctctggtgaccgaatatttacctatgacgcgctgtatcagcttatctctgcctgcggacgcgagaatgccagtaatacgcaagccccatacgcagagctgcccacactcatcccaactgacagtaaccaaacccttggctatacccgctcataccagtacgatgacagcggtaacctgagctcattctcccaccttggcgccgccagctttacccggacaatggttataagcgctcagtccaaccgcagtttattgcaagacgacaacggctccctgactccagacgatactgatgctggattcgacccttgtggcaaccttcgcagattacaaacgtctgccacgactactgacaatatgcgttgggacaatagcaaccacttgcaggcagttattcttcttgaccgcaaaggtgatatccaacaaagcgaccgtgaaatctaccagtacagcgccgggacacgcgtacgtaaacagactcgtcgcctgacaaaagccgaagataacctgtggactgttgatgaggtgcgttacctacccggtctggaactgcgacgccactggcaggagacggtcagcggtgacaccattacgccacatgcggctacggaagcattgcatgtcatcacaacccaggccggacgcgccagcatccgggtgctgcactgggaattgggaaaacctgccagtattaacaatgatcaggtacgctggagtgtggatgacagcagcggcgcggcctcactggagttggatgcccaagggcagattattagccacgaagaatattatcccttcggcggtactgcggtgtgggcggcacgcagtgaactggaagccagttatagagtgatccgctattccggcaaggaacgtgacggcactggcttatattattacggctatcgctattacgctccctggttgtgccgttggacggcagccgacccaggccaggaaatcgacgggctgaatctgtaccgcatggtgagaaataatccggtcacgctgacggatgttgatggattaatgcctaaattaatgttaacgaaggaggagatcgcagaatttgagcatttatatgaaagtgctctgaaaagtggaaaatatgaaaaacattcccttgccatgaaacgtttcattctcaccaaccattcacgcgccagtacatatcccttaaaaaccgaaacttctataaatattctttttcacgtcatatatgaacagtcaaaatatatgtctccacctgacttttcacaggacgccttaagggcacataaagaagcaaaagctaaagcagcccaggcaactgccgaaaatgcaaaaaaagcaatactctatgtttgggcagcgcaatcccacttgatacaaaacgcatctcctacagagagattgaaggcaagcaaacttgttaaacatataagaggactaaacagagacccaaatgcaaccagagatcggcatgatttttttgagcaaaaagaacataaaggcgtggcgaacggcatatatgaacttgatggtaagactggcgaagagcttgccaaccttcttgatgactatattaataataacgccacactaataaataaaacactctatcggggaacaaccacgttgccatcagttcgtcccggtagattcactgcgacatcagaaagtaaggagattgccggttgttttggcaaatatatcgagaccttcaaaggaggatatggagtacgggtacccaatatttatttcaataaagatgaaaaagaatatttattcagtcggagcgccccgcccaagctggctcactctaccaatcctcgccagagagcattagatcctggcgctggtagtagcaaagccgcctga

SEQ ID NO: 374969 - DNA, 2646 bp, Salmonella enterica
atgactttggcaatagccacaccggtgattgctgtgtgcgataaccacggtatcaccattcgtacccttaactggaaccgcgaggataaagatagtccacgtcggctcctcgttacccacacccggctggatacggccagccgggccaccgtgcaacgcgatcctcgccgtttcgccgccaggcaacaggacgatactgcattgtcgaacctgtactgcatgtcatcgttgacaggtcaggtgctgaagcgcgccagtactgacagcggctggcaggtaacgcgctttgatgcagccagccgcactgcatggtctattgatgttcggggcaccgtacacactcaggcttacgatatgctgggccgtccgcagagcggcagtaagcggctaaaaggcgaggcattgcgggtaagctggcgtcacgcatacacggatacgtgttctgcagatgctaacgcgcagaaaaacaatctacgcggattatgcgtacaacgctgggatgatagcggtctgcagactgtcgaatcggtggcgttgagcggagcaattctccgccagacgcaacagtttctcttatctgcgcaagcgcaacctgactggccggaggatgacgccggcaagcaggcactactggaggataagatttatgtttcgacaatatctgccgatgcgcgcggtattagcctgaaccagaccgatgcaatggggaatcagcagagctggcgttatgacgtcagctcccatgtaaaaagccagtatgcgacactttcggatggtaaaaaacagacactgcttgaggacactatgtggagtgccgcaggccaggttctggaagaaaagaccggtaacggcgtgaccacatcctaccgctatgaacccgaaacacagcgtctctcggcgatgagcgcactgcgcgccgacagtactctgcttcaggatctggactacggctacgacaatactggcaatttaatttcaattactgataacaccattgcgacccgctacttccagaatcagcaaaccgacggacggagggagttcacttatgacgcgctctaccaattgctggaggcaaccgggcgcgagaatgctggtaataccaccgtcccatatgctgttctgcccgcatctatcccaacagacagcactcaaaccatcggttatacccgctcttttcgctatgaggacagcggtaatctgctctccctttctcaccagggcgccgcatgctttacccgcacaatggtagtgagtgatgcgtccaaccgcagcaggttgcaaaacgacaccggaacgctgacgccggatgatgttgatgctgcattcgaccccagtggcaacctccttagtttgcaggtgtccgccactgcctctgagcagctaatcttggacgccagcgaccatctacagacggttatccttcttggtcgtaacggcgacatccaacagagcgaccgggagatttaccagtacagcgcaggaatgcgtatgcgcaaacagacccgtatcctgacgaaagccgacagcaatctgtggacggtggacgaagtgcgctatttgccgggccttgagctgcggcggcactggcaggagaccatcaccggcgataccgtcacgccgcaggatcctactgaggagctgcatgtgataaccacccaggcggggcgcgccggtatccgactgctgcactggaaaacaggcaaacctgacagcattgataatgaccaggcacgctggcagatgagcgataatttttatgcgctggaactggatgcgcaggggcaaacgatcagtcgcgaagaatattatcccttcggcggtactgcggtgtgggcagcacgcagtgaactggaagccaatgccagagttgtaccggaaaatagctggtggacgtacttacagcatttatgtgagcgatggaatccattggctgataatccatccaacagcaccaacaagcctaatgagattaacaatgaaaccagagccattattaaagactatatgggaaatgattcaaaggaaacaataaaaacattaaaagatgccttagagaaaaggcatcaggctgcagcggcgttaaatgaaaattcatttcgtaacattaaggaagaaccttacgcaccaaaaaatgcaactgcatgcgtcgggactaatgaacacaatttatatgacacctcgaaagacatcaaaatactaattaattacgaagatacaggaaaaagacatttatatgatattgccacaataattattcatgaaatgacacatctggttttaaaaaccaaagattattgtaattcacaaactgtacccttttctggtaaatttgatggaaagagtacgaaaaagttgcggcaatatgccagccaaacgaatagcacacctttaacaggggcggataatatagcaaaccttattagtttactttattactcacaagcctgcgatgagcagacaaaatctttatatacacgctataagcagagcttgtcgaaatcaggctggcgggaggcattactggattttggcggcacaatgccagaggttagctggccacgggtgagttctgctgaaatccagcgacgagtattacccgtaaattctcgttcatcccgaataaaaccagcatcagctcactaa

SEQ ID NO: 374970 - DNA, 4422 bp, Salmonella enterica
atgttaaaagaaaatacatcttcatccacggcctcactcatggtaactcccccctccttaccaaaagggggcggtactttaagcggtatgggagaagcgctcggtcaggcaggtcctggcggcacggcgtcaatgacattacctctacccgtaagcgcgggtcgtggttttgcgccttcattatcattgacttacagcagctctgctggaaatagtatttttggtattggctgggcgtgcgctacgctgcgcattagtcgacgaaccagccatggcgtaccacagtataacgacaatgacgaatttcttggccctgatggtgaagtgctggtcaaaaccattagtacaagtcagacccccaacccaactacctgccaacaatatggcagtacgacactaactcaaacctggactgttacccgatatcagccacgcacagaaggcgcatttcatcgtctggagcactggcaaagcgaggccacagacggtgatttttggttactgcacgaaagcacgggtaatttgcatatgctgggtaaaaccgcatcagctcgaatcagcgacccgcataatgccgcgcatattgctgaatggctggtagaagagtcagtcaatcccgtaggagatcatatttattattgttggaaagcagaaaattccagtaatatcagagaaatagacaaaaccaatcagcgcgattgctccacacaacgttatctcgcaagcgtacaatatggctgtcaaacgcccgcgtctgatttgtatctctggaaaagtgataaacccgacgcaagatggctgtttacgcttattttcgactatggtgaacggtcactcgatcccggcactgcccccgcgttttcaacgacgacaagttggcctgctcgtcaggacgctttttcccgctacgagtatgggtttgagattcgcacacaccgtctgtgtcatcaggtattaatgtttcatcattttcctgatgaactaaaacaagataatgccctggtttcacgcttattgctggaatataacgaaacgccggtgctcagccaactgacatcggcacagacgcttgcctatgacgctgacggctcggtactctcatgtccgccattagagctttgttactcgcaacctgatatatcaggcgctcagtggcaacagatgtcatccctttccggcctggattccccgccttatcagttggtcgatctctatggcgaaggcgtaccgggtatactgtggcttaatggcaaagactggcgttatcgcgcgccttgccggggcgagacgggtacagacgaggtggtctatgccgactgggttaacctgccgcagatcccggccttgcaaaacgcatctgcccgtctgatagatatcgacggtgacggtcaactggactgggtaatcgccgcaccgggtatggcaggtttctttactcaacaatcagataaaaactggagccgttttactccgttcagcgccctgcctgaagagttttttcatccgcaagctcagtttacacagttaatgggatccggacttatcgatctggcgatgatcgggccaaaaagtgtgcgtctgtatgccaatgagggcagcgctttcagcactggattaaacattaatcaggatgaaaatattgaactgcctggcccagggcgggatgcccgcgaactggtgctttttgccgatattctgggatcagggcaatcacacttatgccgcatccgttataacagcgttacctgctggcctaatctcggcggcggccgtttcggctcgcctgtccagttgtccctgccatcgccactggacagtgaagaacagtttaatcctgaaaatttgttgttggctgataccgatggttccggcgctcctgacttgatctatgtgcagcataaccaggcaaaggtttggctgaatcagggtggcaatggtttcgttttcgggtccaatattgcttttcctgatggcgtcgtttatgaccgtctttgccaacttactgtggcagatattcagggtaatggcatggctgaactggtacttactgttccctggcctacccctacgcactggcattttgctttttgtgcacaaaaaccctggctcctgacaggcacaaataacaatatcggcgccaacactacgcttttttatcgcagttcagcgcaagaatggctggatgaaaaacagcaaaatccacaggcgacgccggcattacctttcgctatgcatctgctggttaaaacaaccacagaggacgaagttaccggcaaccagcttagccagagcatccgttatcgtaggggtgtttatgatggcaaagagcgtgaattccgtggttttggttacgtcgaaactgaagataccaatgatgatgcgctcccggttggcgacgatacccctgtcgccgcgacgctcctgacaaagacctggttccattgtggtcgtgaagaggatgaaaccacactatttggtacgccctggcgcggtgatacagaagaaatcacgcttaatgccacacttctgacaacctggcaggcaggagaggatcaggtattgaacaaccccgataaagctacgcgctggtggatgttccgtgcattaaaaggaacagcgctgcgcagcgaaacctatgggctggataccagtagcgtcgcatcctctccttataccaccacacaacagcgaatgcaggttcgtctggtccaggggggtacgatgcccgttgtattgcccgtcgcactggagcaaataacacatcattatgagcgtctggctggcgatccacaggtttcacaacaggtgacgcttcaggctgacggctatggttacgttacccggcaagttagcattgcgtacccccgtcgcgcttatcatgcccttcaaccctatccggctaacttgcctgatgatgcctgggaaaatacctatgatgatcaacagcaaaaactgcggctggtggagagcctggcatcttttattcacctggaaaactcacaaacctggcgattggggcttccctctcaacaacgggtaaatcaactggagttcgattctgttcccgctggcggtatcaactacgaaacgcttcgggcagataatggcttgttaagtgccgaacaaactcgctatctgacccaacaaaacgaaattatctacacgtcgaccccccttgatttgcgggcgctggtgcactatcaacgcacggcggtactggatgaaacggcgctcaaagcctatgaggggataacaatccctgctgaatacagtttcgataagctaggttatgttaatacaccagcactcttttcctttacaaccgaagccgacctttgggccgttgagcacagctttacgctctataacgatgtcagccaattctcaacggttgcaagccagcaatctaccaggcttgtcggagccataacctgtcagtatgactcgcattatctggtaccaattagtcagcaagatgtactgggtaatacagtcacaatggaatacgactatcgtttcctgagcccatggcgcacaactgatatcaataataattatcaggagtgtcaactggatgcgctcggtcgtctgttggcaaccagtgtatatggaacagaaaatggtggccaggcggtggggtttgcaaaaatcgcagactatcctgtctcgtcttcgcttaccgttgagcaagccattgcgatggcgacaacggtggggtatctccagcaactagccaccatcaacgtcactgatatgttcagttggatggggtgcgtttcctctgaccaggcaaacagtgtcactgctgatggctggtctactctattgaagaaccgctttattacatttaccggacatattcgttcatctggtcatctttgggcgcgtaaaaatccacagcatcctctggcaaatttactgaccgaggcaacccgtaatcccatccacagtgtgaccctgactgcagataactatcctgcaacgtttgatccagatgactcaacgaaacgactgcagcaaaccggtatttcgctgagctacagcgatggttttggccgggcattgcagcaatgcgtcctctttccggatggaaaagcctggcacagagaaagcaatggggaaatcagtacaacagaggttgatgccagcccccggtgggccgtttccggacgcactgaatatgacaataaaggccaggcggttcgcaactatcaaccctttttcctcgatgactggcactacgttgtcgatgccgctatgcgtacaaatggctatagcgacacgcattattacgatgcaacgggccgcaatattcgcacggttacggctaaaggctatctgcgccgcaatacctactatgcctggttcacggtcgcagaagatgaaaacgacactgtgggtctggaggatattcccgtatga

SEQ ID NO: 374971 - DNA, 4527 bp, Salmonella enterica
atgtcgacaaccattagcagtgaattaaatcagggctatcgtagtgcattactcgcgtattatattgggcaatatgcacctaatagcggtgacgctactttaagcaatatgattaaaacatcagacgatgtttatgaatatttgttaattgacccactggtcaccaatgatgtgcagacatctcgcgtagcacaagctatgtccagtatccaacagtatatcaatggtattgcgctgaatatggaaccgggctacgacacccaagcgctggacacaatgcagctaaaacgctggaataatggcgccgatcagtatgcagtctggggtggctatgttgaactcgacagctacccagaaaattatattgatcccacactgcgccaggatcagacctcctgctttaacgatttgattacggaactaaatcaaaaaacagtcagcaatgataccgctcaacaggcggtaatgggatatttaaatcatttcgaacaggtcgctaacctgactattgtcagcggttataccgacgacaaagatcaaaccaaaggaacctattatctgttgggtaaatcgacctcttcgccggtgcaatactactggcgctcgtttgatatgtctctcaacgttgataacgttgtagcatcaaacgcctggtctgaatggtatccagttaatacatccataaacgatgatctgatccagggaacaccgcgcctggcctattttaataatcgtttatacctgttctggtttgagcgtgcggaaggcaatggtccgaatgaaagcgataccattacggcttattcatcacagtgtgattttagccgcaactggtcatcaccttttgccatgatgtcaattgactcagataccgcaaatcatcatggggagcaaacatactgtgataaactgtttacttcaaagtatctctgcactgcttgtggctataatgaaactgataattatttattggtatcattatacgacggtacagatgttacggcatatacggacaatggatacaacgatttcaccatcacgatagattactggtttaatacagaaaaaagagagtcgaaagtcagcgtcgggatgacaaatacaatctctaagtttttgtacaattatatcgaaagccaaaccatcaccaacaatcaaagtaaaattcaatcctgtttccttgtggataaattttacgttgctgatgttaaatgcgattcaacaaagttctatgacgggttacactcatatattacgcttccggcgctggatacccgtaacttttcggttaacaccgcagatgatggcagcatcactttagaaggctcgataattactgcctgcagcactaacagcactggcactttttatcacgaaaattggaacttgaatgagaatgatggtgttttagattgttattattcatttacagattcaatatttaccggcatgcaactggttgatttacctgtcacattatcagcaacaattaataccgttgctattgaggttccttataacactggcatgaaaacctttccgttatcaagatcctatactattgataaaggtattctcactgatgctgccaactttgctgctgagatgattgtgaccaaggccgcgatgacatcccagggaaacatgcaatactttcattttgaactgagaaataataataccaaggtcctgtcaatagttaataataggcatattgaaaactattataatgatacgtcgtggactcttgatgtatttgagagcaaaagcagtggttgttggcaatcaaccaatgctaacacctgcataagtaaaacggccgccacgataaataacaatacaaaatttaattattctgtcgctgactttacagatgatgaaataacaactggtgctatcacgcgctacatttctgttggctatattaataattgcggcggcgcgaccacccataccgaatatcgtgtttcgcttcagaaattaacgaatattcccgccactccactcatcgctacccgcagggatgaggagctgggtacggtggtatttctctcttttaacggtacgttcgacgatggcgctgcgatttctcctgttcgcctgaataccctgtttgccaaagagttaatcaacaaagctaacgttagcattgacgatctgcttgcctgggatacccagctaaccctggaacctgcaatgaccagcggcgccagccccacgccaatggatttctatggcgcaaatggcctctacttctgggaactgttcttctatatgccgtggctggtcgccagccgcctgagccaggaaggcaactacgcagacgcgcaaaagtggtttaactatattttcgacccttccgcctgcggccgtatcaattcaaatgccgattacccggaaccggactactggagcgtacgcccgctagttgaagcgaacgcgcaggaaagccttgcggcgttgattctaaacccggacgatccggatattatcgccaaagccgatccggtacattatcagaaagcaatcgccatggcgtatctggcaaatttgattgctgctggcgacgctgagtatcgtcttttaaccaacgatggacttgcccaagccaaactgcgctatgtgcaagtcaaaacgctgcttggtccccgcccggatacttcaacgctccagcaatggcagcccgatacgctgaaaaatatcgccagtcagcgcaataccgacctcaccgcgctggaagatagcgccagcatctcgctgtacgccttctccggcagcaatacactcgcgcaggaagtcaccattaacgaagcgttttcgctgccgttaaatgcgcagttactaaactattgggacgttatcgactcgcggctttacaacctgcgccacaatctgtctattaccggtcagccgattaacactccgctgtacgccacgccggttaacccggcaatgttggtgcaaatgaatgctaccggcggttcattggcaggccaggcttctaaactcagtatggccatcccgccttaccgtttcaccgccatgctgcaacatgcccgcggcgcggtcggtacattaagccagatgggacaaaccctgctcagttactacgaacgtaaggaatctacaggattacaggagttacaacagcagcaggcgctggatctctcctcctttaccatcagcctgcaaaaacaggcaattgatgcgctgaaagccgatcaaaaagcgctggaggccagtaaagatatcgccaaacagcgctatgactactattacgacctgtacaccaccggcatttccgccagcgagcaggaagtgatgaatatgcaatcttccgccagcgcattacttacttccgcagagcccttcctgacgaccggcgcgacgttaaatatggcgccgaacatcttcggtgtcgccaccggcggggctgtctggggcgcagcgctcaccgccagcggtatggtattgcagttcagcgctaacagcattcaggccacagcgcagcgcatccaggtatcggaagagtatcgccgccgcagcgaagaatggaaacagcaataccaacaggcgaacgccgagatgaccagcatcgacaggcaactggatgcgcttgcggtacgccagcaggcggcccagacctcgctacaacaggcacagaccgaacaggcaaatctgcaggccacgatgcagtacatttccagccgattcacgcaatcgtcgctatatagctggcttatcggtcaactggcggcgctttactaccaggcatacgacgcggtgttgtcgctgtgcctgagcgccgaagcgtgttggcagtatgaaatgggtgatttaaccagccgtttcatccaaaccaacgcctggaacgacagttaccacggtctgctggcgggcgaaacgctggagctaaacctgcagcagatggaatccgcctggctgtcacgcaaccaacgccggctggaactcaccaaaaccgtgtcgctgaaaaccctgcttggcgattctgacttcgcaaatctgatcgcgaccgggtcggttaacttcagacttgatgagagactgtttgacaatgattatcctggtcattatctgcgccagattaagtttgtcacgctctccctgccgacgttgcttggcccatggcaggacgttcgcgccacgctcacgcaaaccagcagcagtacgcttctgaaagcggatattgatggtgtgaattatctcaacgacaacaccaccggcaatgcggcgaacgtggtcacgaacctacgcgccagccagcagattgccatctcctctggcatgaacgacagcggactgttcgagctcagttttggcgacgaacgctacctgccattcgaaggcaccggcgcggtatctagttggcagttgagcttcccacgaccaaaaagcagtgagcagaaggccattctcgataacctgagcgacgtgattgtgcaggtgcattacaccgccgtctctggtggcagtgacttcgcaaacaccgttgaaaaaacactgtaa

SEQ ID NO: 374972 - DNA, 4920 bp, Salmonella enterica
atgagtataacagccactttatccctcaaaaaattagaggaacattttggaatacagaaccagttatctaaccgcggatattattctatatttgatatcctgaagttatcaaaaagtgaatttacttgcaagcaccagggcctctttggtgctaaagccagtaaaatctatgataccgcctccggttacgcaacacagattatgctgttgtttcgcaaaacttaccttgctcaggcggtgcagacgtcggtgtattccactcagttacaggatagcaattctgtagtactcacaaagggcggcccgacgtggcaaaccctatttgctgatgactggcgtgaatattgccagaatggcacgccggaggccattgactctccggtcgcttatctctcctggctgtataatcaggccacgaattttgaatcacagatgggggtcgataatattatcccgctggctgtccgtcgccctgatttagcagagcttatgctggataatgacgcgattaatcaggttgtaccctccttacaactggtcaatgaggtgcttgagcagtccgtcacgccatacgttaataacgtcgcccagaataccagcgttagcgaaatgctagctaccacccgttatccaacgctcctgccttatcattacccgcatcaacaggctctgctttctctggaagccagtgacgaatcgctacagaatataattaagaaaacagatatcgcctggccttattttgtaaagcagaacctgcgtgcgggaaaagcggaaacggcatggcaactggagagtaatcttgcacctgagcagcggaacattattattgaaacattcgctgattctacaaccgaattaactaatttctaccatcaaagtctggggatgaattccagcagctttgaacaattcgtaaatagtaatattttctgccagcaactcagcattaccaaagaggagatggaaaacttaatcgcctcaacctgcaacgagtctaaagtctctatttccgataattaccagcctgcttatcgggtatccggatctgatttgtatggtgccagttatattaacaactatcttaatgattctgcattattgcaggatagaagcgtggtaaaagatgaatgcactaatccgataccgatgtatatcagttcgcaaggggttagttttgtcactggcaagtttggttcagctttaaaaattgatgcgacagaaaatgctgaagtctatttcaaatcaaatattgctactgacggttcccaactaattccctttacattatcgttctggtgtaatatcccagcagatatacaatcaggcagcctggtggtaacaaataaaactgatcattatgcttcatctgcaaaaggaattaccgttaaggcattccctgacaccaatggtaattgcagtctggaattaagcgcgtcagatggcataaccgacccgctgaccttatcacgtatattccctactaatacctggcttttcgtgtgtattgaatactcacccgacaccaacttgtactttataactaatgtaaatggttctggtcctacatattatgacaccataaaaatagatgccccagaaagcattgcattagaagaagaatactgggggtttaatgggaattatggcaacaagtattataaagagcatagtagttgccgctcagtcattttatatgacgacattgcggtttggaataaatatataaacgatagagagattaatagttatctttcaaaaggtacaaccgcgctagcgttaaatacaccaattcattattattcctgtgatgctgctggcgtatctatcataaatgaaacaccgtcaaaaatagaattatcacaatcgcaaaatgaattttatccagaacgactcttcgatagatatggtgagtattataaactctgcgcaacgaagaataactacatccgtctgaatgaggccatatgtaatcagttcgatggtaatcagaatttttcattcggtttttggtttaaatactcaaaacttccaacagacagaatcccggtagccatgaatatatatccacaaagtggtgaacatgggttttccattgagcttttttcaagcggcaaacttcacctcgttgtacaaaatgatcgtaactacaaatactttgaaagcgatgcattaactacagaaacctggtattacgttgctctcgtatggtgcacatcgaccggggttgccaccctatatttagtgaaagagggttcaagtgatatcaatgtttatgaaaccgatgcgcttaacgcggcttcatttactaaaaacggtgaatactactggacactcaatgaaagtggaaatgttaaccgaacatggtacaccacggacaaaaattcttcagtaaaactctgtttttctgagcctgcattctggtctggcctcatcaaccaaaatgatgtcacgcttattgcctcattacagagttcattgaatgacaaggattcgggactcagtttataccctgcgtgttatttcaataatagcacgacactcatgcatctgagtgatgtacgtatgcagcgcatcaatcgtatgatccgtttacaacgctggcttggcctctcctttgaagaggtagacttattgctcaacgcctgtattcgcggtcagggtagccagaatagcgataactcccttaacgcacaaacgctacgtatgttgggtgtttaccgccactggcaacaagcgtatcaggtcacagctttccagtttgccgctatcctgtatcaaatcacaccttacgcgatctcccctgcggttccttttctggatcagatatttaatacaacctccgcttttgatgaaccattcaaaattaccgattgggcgtttaactatactgcgctgaccggtgaggatggtcagattgttaagcagatttgcgccggtcttaatatcacccgcgctcagtttctggtactggcgaaacaggtcagcagcgcacagaactgcgacacgaatacgctaatctgctcgttagatgttatctctgcgctctaccgtctggtgatggcgccgcgctggttgggtctgagctttgaggatggtgtagcattattgatgctggtagaagaaggtaatgcgctgacacgccttgccagtattccgatttatacgacagtagagaatagcgccagcgatcttctggacaccctgatggcgctgtctgacgccgcgcaatggctagctgataacaacctgacggcgacctgggcgcttgccatgttacagggcggagaaatggttcttccggcgacaacggctgaactgaatttcatcagtggtattaatcaacaattaccttcaacgctattgaatgaaaattatttttcttctctcccgcaggatatcatttcggagtcagtttattttccaaatggtacggatgcacctagctcgtataataacactttgagctatgcacttaactcaacgaaagggcaatatgcatgcctgagcgatacagctaacaatatattagacccagattcaagtatagcaagttcactgggcatgtggtgctatattaaaaatggtgcacgtgtaggagttcctcttattgcctcagccactatcggcagtgatggtaatatagggacggggattgctatcacccttggtgagagctataaatttaatatatgcatgaaagactcaaatggaaattcagcaggtgtttctgcgagttcagctcaatgggagaaaaatgaagcctggttctatgtatccatcagaatgccctacaataacatgttgtacttggatatttatttagataatggcacaaaaacatatagttcagtcttagattataataacatgggaagctgtaaggctgagggcaattgttggtccataaatgaagatggatcacaaacattctattcgacacatcaacaagcaaaaagcgacattatcataagtgatgttaccgtatggcaaaaaaacataacaccggacgaatttaaaaatattgtaaaatcaaatcgtcctgctaacgaaacagtacccggaggtttgtcatttactgaaaccacctggatggaatctttgaataatatcattgacagcagtggtcttgtattacctgtagcaactgattatcagacaattagcaatatagttcataacgatcttcgctatggtactaacgaaacgcaactggatgcagtctcaaatatcatctatcaagcaaaactcgcgcaacagaatattgccgatagtgcgctggcgaaagcgtttgatattgatcactcatatccgccatacctgctcgcctggaccgcatcgtctgaatacgatctgctcagccaaagtctggcgttaaacggcatcacgacgccagatgctatcccggatgagtaccaacaatatctgtatcagattgcccgccgcgcagggttatgtagtacctttaacctgacgccagccatgctttccacgctactggcccacacagactggttcggcgtagccgatactacgattgattttaacttgttgtatctgttcagtcgttatagcgactggatgaaactggccgataaagaggacgccatgctggcctacctgcgcagagcaaacggcgcgccatcgcttaccccggaccaggccgcctcctgtctggcgttgctaaccgactgggaaagcgatgaagtcttacaggccgccgcgtatgccaatcccgccacgggcattgccgctacgctggcgcatattgacatcgtaatgcgcctgaaaacattgtgtacccgtaccggcacatccgttgaaaccatactgaatactggcggccttaccaccacctctacttatcaggagtggcaatctgtcggagagtcattggtagccgcgcaaagtaataactaa

SEQ ID NO: 374973 - DNA, 828 bp, Salmonella enterica
atgggaatttttatttcaaaaaaattaagatattttatagcaattatggaaaagcgctcttttgccagcgcttccgaagaattgtgtattacacgttcgccattaagcaaagcaatcactgaaattgaagaatatttagatgacaaattatttgtcagaaaacataatgacttaatacccactcctctggcactagaatattataaaaaatgcaaaccactatatgaagagctattaaaactggagaaaataaaaaacctaaaactctatacagtaatcttcgatagttgtttccctctaacttttgtaaaatttttgcgggatttcattgaggtcccaggttttgaattccgagttgaacatacaattattacacctgagcacctactctctcttaaaaacgaaaataaaatatttatatctctcaaaaatatagtggatgtcccagatgaaaataaatccatatggccaactggcggtttgactctgctgtcgccatttatttctaaaaataataatctattcgtatgtaaagaaattcatattaactctctgaaaaatagattttctaaaaccttagaaaattatttatacagcattaatttcattgaacataaccacgacccctccactttgatctataaagtaaaaagtggtgaaggccatggtttgttctcatctaagttagcacagttctacaatctcaatggaataaaaaaaacgccaataaaagaatataataaaaacattgtcgtttatcatgacgcgtcagatttaaatagcatagttttattaaaaataaaacaaatacttaatgattttatttag

SEQ ID NO: 374974 - DNA, 666 bp, Salmonella enterica
atgcagggtgaaaacagtgaaatcgatttagtcgatatttccttgctcctaataagaaactggctaagtatcgtaatgactacctttatttttgttgttatgggctatgtttttgtgagcgtgcagcatgatacaaagattgtgagtattaaaattaaacccaatctggatacgcctgctacttatgctttatgtggctatgttaatgatattcaatgtaaaacaacggttatccttaaccgatttagtcgtttcttgcctgcggactataaaaataaaataagcttcgaagcgagaagtcagcttatcctttttaaggtgcaggggagggagggaagtgtcaatcatattatttccacactaaaaaatagcgtcgataaaatggcggtatggtatatcgatgatggtgacattaaacgctatagtttgcacaaaaacatgttgcaaacggaaacgtatgcaaaactgtcattgctatcggatgcggttagaaataatattaatattgaagtgttagatgtttctattacgccaaaatataagatgcggctggtattggcactttgtgtactgataggcttgattttctcaatagccggtcttttatggaaaagggcgataacagtatatcgtgttgagaaaaagacagtgaagggcaatggatag

SEQ ID NO: 374975 - DNA, 1689 bp, Salmonella enterica
atgaaaacgctgctgataattgacgctaatctcggccaggctcgcgcttacatggcgaaaaccctgcttggagcggcggcgcataaagcaaatctggaaattatcgacaatccgaatgatgctgagctggcgatcgtgctgggcgaatctctgccgaacgacaatgctctgaacggcaaaaaggtttggctgggggatattggtcgcgccgtcgcgcatccggaactgtttctgagtgaagccaaaagccatgcgaccccttacagcgctcctgctgcggttgctcctgcggcgagcggtggtccgaaacgcgtggtcgcggtaacggcctgcccgaccggcgtagcgcatacttttatggcggctgaagccattgaaacggaagcgaaaaaacgcggctggtgggtaaaagtcgaaacacgcggctccgttggggccggcaatgccatcaccccggaagaggtggcggaagcggatttagtgattgtggcggcggatatcgaagtggatctggcgaagtttgccggtctcccgatgtaccgtacttctaccggcctggcgctgaaaaagacggcgcaggagctggataaagctgtagcggaagcgacgccgtatcaaccggcaggcaaagcgtcgcaggcagcggctgaagggaagaaagagagcgctggcgcgtatcggcatctgttgacgggcgtttcttacatgctgcctatggtggttgccgggggactatgtatcgcgctttccttcgcctttggtattgaagcctttaaggaaccgggcacactggcggcggcgctgatgcagattggcggcggttcggcctttgcgctgatggtgccggtactggcgggttatatcgctttttccatcgcggatcgccctggccttacgccgggtctgattggcggtatgctggcggttagcaccggttccggttttatcggcggaatcattgccggtttccttgccggttatatggcgaagcttatcagtacgaaactgaaacttccgcaaagtatggaagcgctgaagccgatcctgatcattccgttaatttccagcctggtggtaggcctggcgatgatttacctgatcggtaaaccggttgccgggattctggaaggtctgactcactggctgcaaaccatggggacggcgaacgcggtgctgctgggcgccattctcggcgggatgatgtgtaccgacatggggggcccggtgaacaaggcggcgtatgcgttcggcgtcggtctgttgagtacccagacttacgcgccgatggcggcgatcatggccgcaggtatggtgccgccgttagcgctgggtctggcgacgatggtggcgcgtcgtaagttcgataaagctcagcaggaaggcggtaaagcggcgttggtgctggggctgtgctttatcactgaaggcgctattccgtttgcggcgcgcgacccgatgcgtgtactgccgtgctgtatcgttggcggcgcgttgaccggggccatttctatggcggtaggcgcaaaattgatggcgccgcacggcggtctgtttgttctgctcatccctggcgcgattacgccggtattgggatacttgttggcgattgtggctgggactctggtggcaggactggcttacgctttcgtaaaacgtccggaaacggaagtcgcggcaaaagcggcgtaa

SEQ ID NO: 374976 - DNA, 699 bp, Salmonella enterica
gtgaaagaaatccaaaatgatgttctcaggcaacaattgatcggctgttctggctatacagaatgtttttctgatgatgttgtgcaggatacccggttatttcatattgaagccggtgactacattgtccgggaaggaagccagccagcatacctgttttatctggttcgcgggcgcgccagactgtacgcgacattgcccaacggacgcgtatcgctgattgacttttttggcgcaccttgttttatcggtgaaattgaattaattgatgtcgatcacggaccacgtgccgttcaggcgattgaagcgtgctggtgtctcgcgctgcccatgaaacaatatcgttcccgtttgttaaacgatgccatattcctgcgacaactttgcctcgcattaagccgtaaaaattatcggaatatcgtttcattaacccaaaacatatcattcccactaactaatcgcctggcagcgtttattttattaatgcaacatggtgatctgtatcacgaaaaacacacacagacagcagaatatatgggagtgacctatcgacatttattatatgtgttggcgcaatttacgcgagaaggattactgttaaaacagaagaatggttatatcatcaaagataaacaaagactcactgcgctggcgcttgagatgacgccggaaaacaatgtcatagatttattccattaa

SEQ ID NO: 374977 - DNA, 933 bp, Salmonella enterica
atggaaagaagaaaaattatcctggattgcgatccggggcatgatgatgctattgctatgatgatggcggccaggcatccagcaattaatctgctgggaattactattgttgccgggaatcagacgctggataagacattagttaatggattaaatgtttgtcagaaacttaatattgatgtgccggtttacgctgggatgccgcaaccaattatgcgtaagcagattgtcgcggacaatattcacggagaatctggtctggacggcccggtatttgaaccgctgaaccgagaagcggaaagtacccatgcggtgaaatatattatcgatacactgatggcaagtagcggcgatattacgctggttccggtcggaccgttgagcaatattgccgtggcgatgcgtatgcaacccgccatcgtgccgaaaatccgtgagattgtcctgatgggcggcgcttacggtacaggcaattttacgccctccgccgagttcaatatcttcgctgatccggaggccgcgcgcgtggtcttcacctctggtgcgccgctggtgatgatgggacttgatcttaccaaccagaccatctgtaccgccgatgtgattgcccggatggaaaacgtcggaggtcctgcaggccagttgttcagcgatatcatgaattttacccttaaaacgcagtttgaaaattacggcctggccggtggcccggtgcatgacgcaacgtgtattggctatctcatcaatccccaggggatcaaaactcaggatatgtacgtagaagtcgatgttaacagcggcccgtgctatggccgtaccgtttgcgacgagctgggcgtgctgggcaaaccggcaaatgccaaggtcggtatctccattgataccgcctggttctgggatttagtggaagagtgcgtgcgcaaatacctctga

SEQ ID NO: 374978 - DNA, 1251 bp, Salmonella enterica
atggatgtaatgagaagtgttctggggatggcagtattactgacaattgcatttttgctgtcagtaaataaaaaacgtatcagcttgcgtaccgttggggcggcgctgttgctgcagtttaccattggcggtgtgatgctttactttccgccgggaaaatggctggctgagcaggcggcgctgggagttcataaggtcatgacctatagcgatgcaggcagcacttttatttttggtgcgctggcggggccgaaaatggatcaggtttttgatggcgccggatttgtatttgcctttcgcgtactccccgcgattatttttattaccgcactggtgagtctattgtattacgttggcgtaatggggggattaatccgcattcttggcggtatattccagaaagcgctaaatatcagtaagatcgaatcatttgttgcggtcactactatttttcttgggcaaaacgagatcccggcgattgttaagccttttatggatcgcttaaatcgtaatgaattatttactgcgatttgcagtgggatggcctcagtcgcgggttcaaccatgatcggttacgccagtctgggcgtgcctattgattatctgctggcggcgtccttaatggcgatccctggcggcattctgtttgcccgtatgctaagtccggcaaccgaagagacgcaggtgacgtttgacaatttgtcatttaccgaaacgccgccaaagagcattatcgaagcggcggccagcggcgcgatgaccggtctgaaaatagccgcaggcgtggcgacggtagtgatggcattcgtggcgattatcgcgctgattaacggtattatcggcggcattggcggctggttcggatctgctcatgcctcgctcgaagggatttttggctggcttcttgctcctctggcctggttgatgggcgtagactggagcgaggcaacgctggctggcagcctgattggtcagaagctggcgatcaacgaatttgtcgcttatctcaacttctcgccgtatctgcaaactggcggtacgctggatgtgaagaccattgcgattatctcgtttgcgctatgtgggtttgctaatttcggctcgatcggagtggtggttggggcgttttctgccgttgcgccgcatcgtgcgccggaaattgcgcaactgggaatgcgcgcactggcggcggcaacgctttctaacctgatgagcgccaccattgcgggtttttttattggccttgcgtaa

SEQ ID NO: 374979 - DNA, 1470 bp, Salmonella enterica
atgggttccaaaactaaaaccacagaagcgcccgcgctacgtcgcgaattaaaggcgcgtcacctgacgatgattgccatcggcggttctatcgggacaggtcttttcgttgcatctggtgcgacaatttctcaggcggggccgggcggcgcgctgttttcttatattctgattggtctgatggtctacttcctgatgaccagtcttggcgagctggcggcctatatgccggtatccggctcgtttgcgacatatggtcagaactatgtggaggaaggctttggttttgcgctgggctggaactactggtacaactgggcggtgactatcgctgttgacctggttgccgcacagttggtaatgggctggtggttcccggatacgccgggctggatctggagcgcgctattcctctgcgtcattttcttgctgaactacatttccgtgcgcggttttggcgaagcggagtactggttctcgttaattaaagtggcgactgttatcatcttcatcatcgttggcgtagcgatgattatcggcatctttaaaggcgtcgagccggtcggctggagcaactggacgacgggcgatgcgcctttcgccggcggttttgctgcgatgattggcgtcgcgatgatcgtgggtttttcttttcagggaaccgagctgattggtattgccgccggggaatccgaaaatccagagaagaatattccacgcgcggtgcgtcaggtattctggcgtattctgctgttttatgtcttcgcgattttgattatcagcctgatcattccttataccgatccgaacctgctgcgtaacgacgtcaaagacattagcgtcagtccgtttaccctggtgttccagcatgcgggcttgttgtctgcggcggcgataatgaatgcggttatcctgacggcggtactgtctgccggcaactccgggatgtatgcctctacccgaatgctctacaccctggcctgtgacggtaaggccccgcgtatttttgctaaattgtcccgcggcggcgtaccgcgcaatgcgctttatgctaccaccgtaattgctggtctttgctttttgacctcaatgtttggcaaccagacggtctatctgtggctgttgaacacctccgggatgacgggcttcatcgcctggctggggattgctatcagccattatcgcttccgtcgcggttacatgctgcaggggtacgatgtaaatgatttgccgtaccgttccgggttcttcccgctggggccgatcttcgcctttatactgtgcctgattattacgttagggcagaactatgaagcgttcctgaaagataccatcgactggggcggcgttgcggcgacttatatcggcattccgctgttcctgattatctggttcggctacaagttgataaaaggcacgcatttcgtgcgctatagcgaaatgcacttcccggaacgcgttaaaaagtaa

SEQ ID NO: 374980 - DNA, 1992 bp, Salmonella enterica
atgtttaggtttaaccctttcgttcgggtagggctttgtatgtccgcagttacgttggcctggccggttgccgcggcaacggatgatggtgaaaccatggtcgttaccgcgtccgccatcgaacaaaatctgaaagacgcgccggcaagtatcagcgtcattacccagcaagatttacagcgcaggcccgtgcaaaacctgaaagatgtcctgaaagaggtgccgggcgtacagctcactaacgaaggggataaccgtaaaggcgtgagtattcgtggtctggacagcagttatacgctgatcctgatcgacggtaagcgcgttaactcccgtaacgcggtcttccgccataatgattttgatctgaactggataccggttgacgctatcgaacgcattgaagtggtgcgtggccccatgtcctcgctgtatggctccgatgcgctgggtggcgtggtcaacattatcaccaaaaaaattggtcagaaatggcacggcagcgtcacggttgactccactattcaggaacatcgcgaccgtggcgacacttataacggtcagttctttaccagcggcccgctgatcaacggcgtgctggggatgaaagcctacggtagcctggcgaaacgcggcaaagacgagcagcagcgttccgccaccaccgctacgggtgaaacgccgcgcattgaaggatttaccagccgggatggaaacgtcgagtttgcctggacaccaaacgaaaatcatgacgttaccgcaggctacggttttgatcgccaggaccgggactctgactcgctggataaaaaccgtctggaacggcaaaactacgcgttgagccataatggacgttgggatctcggcaatagcgagctcaagttctacggcgaaaaagtggaaaacaaaaaccccggcaacagtagccctatcacgtcagaaagcaattcgattgacgggaaatacgttctgccgttagcgcctgtcaaccagttccttaccttcggcggcgaatggcgtcacgataaactgagcgatgcggtgaacctgaccggcggttccagtactaaaccctccgccagccagtatgctctgttccttgaagatgagtggcgcatcttcgaaccgctggcgctgaccaccggtattcgtatggatgaccatgaaacctatggcgatcactggagcccgcgtgcttatctggtctataacgcgacgaataccctgacggtgaaaggcggatgggccacggcctttaaagcgccgtcgctattgcaattaagtccggattgggcgaccaactcctgccgtggcggatgccgcattgtcggtagcccggatctgaaacctgaaaccagtgaaagctgggagctcggcctttattaccgtggcgaagaaggcatactggagggcgtggaagcgagcgttaccacgttccgtaacgatgtggacaatcgcatcagcattagccgtaccgctgacgttaacgccgcgcccggctattccaactttgttggtttcgaaaccaacagtcggggacagcgcgttccggtcttccgttattacaacgtgaataaagcgcgtattcagggcgtggaaaccgagttgaaagttccgtttaacgaggcgtggaaactgtcgttgaattacacctataacgacggacgcgacgtcagtaatggcgggaacaagccgctttccgatctgccgttccacaccgcgaacggtacgctggactggaaaccggcgcagctcgaagactggtcattctacgtatcagggaattataccgggcgtaagcgagccgacagcgcaacggcgaaaacgccgggcgggtatgtggtctgggataccggcgcggcatggcaggcgacgaaaaacgttaaactgcgtgcgggcgttctgaacgtgggcgataaagatcttaaacgcgacgactacggttataccgaagacggacgtcgttactttatggcggtggattaccgtttctga

SEQ ID NO: 374981 - DNA, 858 bp, Salmonella enterica
atggaaatgctcgaagagcaccgatgttttggcggctggcagcagcgctggcgtcatcatgccgccacgctaaactgcgccatgacattcagcatttttcttccgccgactcaggataatgaaccgcctccggtgctatactggttgtccgggttaacctgcaatgatgagaattttaccaccaaagcaggcgcgcagcgtatcgcagcagaactgggcattgtattggtgatgccggataccagtccacgcggtgaacaggtcgccgacgatagcggatacgatttaggccacggcgccgggttttatctcaatgccacacagccgccctgggccagccattatcgcatgtacgattacctgcgcgatgagcttccggcgcttatccagacacagtttaacgtcagcgaccgttgcgccatcagcgggcactcgatgggcggccacggcgcattaatcatggcgctgaaaaatccgggtaaatacaccagcgtctctgcttttgcgcccatcgttaaccccagccgcgtgccgtggggaatcaaagcgcttaccgcttatctcggcgaagatgaatcagcctgggctccgtgggatagctgcgaattaatgctggccagccagccgcagaacgccattcctgtgctcatcgatcagggcgacagcgatcaattcctcgccgatcagcttcagtccgccgtactggcggaagccgcgcgacaaaccgcctggccgatgacgctacgaatccagcctggctacgatcatagctattattttattgcgtccttcatcgaggaccatctgcgctttcatgcccggtatttacgggacgagcgtgagacgtcaccaacataa

SEQ ID NO: 374982 - DNA, 1260 bp, Salmonella enterica
atggcaaagcaggcgagcgccgccaatacctgggcagaagcgcgtaatgatgcgatgggcgggacgggcgtagcgtcggcgtattatggcagcggggtgctgttaaacccggcattactggcaaaagccaaaccggaagacactatcaccgttgttcttcccgcagtcggcgtccaaatcacggataaagacaatctgcaggatgaaattgatgatatcagcgataaagttgattactacgatgaggtggtcgataaccttacgctggggcaaattttgctcaatccgcgaggtgtgctgaatcaatttcagggcgccgcgcgcgatctggccgatgaactggaatatctcaacggaaaaaccgcccgcgccaatgccggcgccgggttggcggtaagtattccaggacaaacgctttctgttgcatttatcgcaaaaggttatgcgcatggacgcgtgagttcgtctattgatcagaacgatattcagtatctgcgcgatatccagcatcatgacagtatcgcgcttcgtgaagcgggacgcgctgcattgctggggtcggatgaaattacaaagcatttaaactctaccgcgtcggggcgggtggcgattgtatctgactatggtattgcgctggcgaagcagtttgtggtgggcgacgtgccggtttccattggcgttacgccaaaactgcaaaaaacctggctttataactacaccacatcaatttataactacgatagtagcgattggaatagcagccgttatcgtaacgacgataccggctttaacgtagatgcgggagttgctgccgatgtcggtaaaaactggactctgggtctgagcgggcaaaacctggtgtctcgcgatattgatacgaaagatattttcatcaccaatggtatgacgagagaaaccaccaactacaaagatacgtaccaaatccgccccctggtcactgcgggcgtcgcatggcacaacgatttgctgaccgtaagcgccgatggcgatctgacggaaacgaagggctttaagagcgaagacaattcacagtacgttggcgttggcactgaagtccggccgttatcatggctggcggcgcgcgtagggtatcgtgcggatgtgaaaaacaacgatagcaatgtgtttaccggcggtcttggctttgcgccctttaaccgcgtgcatctcgatttaatgggactgtacggcgaagatgaaacctggggggcaggcgcgcagcttacgatgacattctga

SEQ ID NO: 374983 - DNA, 1071 bp, Salmonella enterica
atgaaagcaatggtctattatggtgagcatgacattcgttttgaagagcgtcaaaaaccacagctccttaattctggtgatgtcattattcggatgattaagaccacaatctgtgggacagatctgggaatacttaaaggaaaaaaccctgagattgaggagaccgcactgaataagttcggcacgtttaatggtcgaattctggggcatgagggtgtaggtgttatagaagaggccggggcatctgtaactaaatttaaaaaaggagataaagttattatttcctgtatcagtcggtgtggttcttgtgagaattgccagaaacaactttattcccactgtcaaaatgaaggggggtggatcatgggttatatgattgatggaacacaggcggagtatgtccgtgtcccttatgcagataactcattacatttattgcccgaaaatcttaatgaagatactggcgttttgttatctgatgccttaccaacagggcatgaaatcggtgttttaaacggggagataaaaccaggcgatacggtagctatagttggggctggcccggtaggtatgagttgtctgttaacctcacagctttattctccttctaatataataatggtagatatagatgataatcggttaacaatggctaaaggaatgggggcacattatacggtaaattcagtgaaggaggatgctattaataaaattatggcattgacccaacagcgtggcgttgactgcgctattgaggctgtgggtattgagccaacctggaatatttgccagagtattattaaggaaggcggcaatttagctaatgttggtgttcacggaaaatctgttaaattttctatagaaaaactgtggagtaaaaacatgacgatcacaacgggtctagtgaataccaatacgataggtttgcttatgaatagttgttgttcaggaaggctacagacagaaaaactagtaacgcatcattttaaatttaacgatattgagaaagcctatgatgtttttaaacatgcagctaatgaaaaagccatgaaggtaatcattgagttctaa

SEQ ID NO: 374984 - DNA, 135 bp, Salmonella enterica
atggaatactataacatagagaaacgactgaaatccgatgacgagccatgctgccccagcacaacgttgctcaaggagaaaagcgtcatcataactgctcacgatttactgcaaaaaaatgctgtacagccttga

SEQ ID NO: 374985 - DNA, 339 bp, Salmonella enterica
atggcgtttattaacgaaatgcgtaacctgcttaccgtcgcccaggccgaacatcctggagcatcctcggcgattgccgaatttatccagacgtacaagcaggcaagagaagacagcgatgaaggcatccgcgagtccgccgcgtttatcgcccgcgcacttcaggaatacactcgcggctggctggacgacgacgatattatcactctgctggaagggcagcgggatatcgccctgctgcgcgccaataatgcgcaaatcgccctcggcagtcgtatccggtcaacgatcatccgcctcattgatatcgccctggcgtcgttggtcggcgcgctataa

SEQ ID NO: 374986 - DNA, 825 bp, Salmonella enterica
atgggaacggtttgcaaatcgcacccccatcaatataaatcatatcgtatagaaaataggatctccttatgtaaaattaatgtttcattattaaagcataagaaaatagggacttcaatatacgtaaaattaccagtgcaaatcagaccagtgagagtaataattattaacaataaaagaaaaggccaaaaacggtcttttatttatataaaaatagccacaaaccacgatttatgctccttaacgtggagcataaccataaataggtatgcgataatagaaagtcatttacccaaaaaggatatttatgtatctataacttgtacggtaaaaaaaatctcacatattaaaaacgtctattttttgcgaaaaagtattcataaattacagaataataacgtcgctacacgaaactattttaattatattaagatgataagagcgcaaatctatagaaggtgcataagcactatgtctgaggtgtgccaaatctttcaagaaaaaacggggcattatggaataatggctggtaatcgagagttttatgaggggtcgggtgactcacttccggtacagaagtataaaggtctgtttaccatctttccattcgaatatcatctctatgttttcaattttatccctgtcctctcatttacggacaaaactaccttatttcggaaagagcccagtaaaacatcagtacggcttatatttaatgtcttatggaatatcttatcgcatacaaaggtaaccgtagtatccatctcttacaggacactaaaaaatgaagtaaagccagtcgttaatattttaattgaacaataa

SEQ ID NO: 374987 - DNA, 648 bp, Salmonella enterica
atggaagacgaaggtaatccgtggcctagttttgttgatacattttcaacagtgctatgtatattcatatttctcatgttggtatttgcacttaacaacatgcttattatgtacgataactcaattaaggtatataaaacaagtaatgcagaaaatatcaatcctaatgctaaagaaattaaggatgaaaaagaagttataaacgaatctactaaagtagatgaaatagataaaacgaaaactattgatgaaaggaaatttagtggcactactgaaaaaacggggaaagaaaagggtatctatgatatcgctaacgggcaacgggttgatatgaccgcgacagaaaaggaatttattattacctattacggtaggttaagaagcttttcagaagaggatataaaaaaattaaccgcttggttaaaagaacatggaaataataaattattaatagaaatgattgttcctcagtcggatatttcttattcggactctttgcgtttgggctacgaacgagggattattttaatgaaagaaattaagataatctgccctgaggtagatattgatatgagtgttaattcaggaacttcaggagtaggtggcaaagccattattacaactgtcgataaaaaggtgtcagagtga

SEQ ID NO: 374988 - DNA, 1392 bp, Salmonella enterica
gtgaaatctataaataagtatcgctatttctttacctgtttccttatcgcaataattccttttattgctttgtcttttgatgggattaggggttacgtttttgataatttcatggtatctgcgatctataacagtgttattatcgctatctatattatgggatctgtatgcacattatttaccgtatttaaaaattgcgacgcaagagaaattttaactaccaataatgccaataaaaaaagctctacactttccagtcttaatcaggtcatttttgctgatgatttcatgaagtgtgattccaatttattaatagagttagatgatagtgtgtcgacagctcgtaatcaacgattatcatttattatgagttgtagtaatgtctctactctaattggtttattaggaacatttgcaggcttgtctattactattggatcaataggcaatctattgagcaccccatcaggagttggtggagaaagttccagtaatacgttacatatgattgttacgatggtggcatcgctttctgaaccattgaaaggaatgaatactgcttttgtttcatctatctatggggttgtgtgtgctattcttctaacatcccaaagtgtttttgttcgtagttcttatgctcttatttctgctgagattaagagattaaaagtaaaaagaagtcgggcaagtagtaatcgacaacgaagcttacggatagaatcagagacacttttcgaatttaaggaactatttagagagttttttgacaactataaatccattgaactttcacgcacccaagcagaagaaaaaaaactgacggttttttctgatggcctatccagcttacagaataaattatctgataatactgtgatattagaacagctttctaaacaggttgataattatataaatattagtaataagcattacatccaaatttctgacaacatggataatgttgcagaacatttatcgaaaggtaatgccttaatttctgaaaataacgtgatgttagctcaattaaaccatacacaagactctatagataaaaagaacgatacagtaattgcatcacttgatagatgtcatcaggaatctgtttcccaaagaaaaaccatagatagtattgctatcgaaaacgtaaaggttactcaccttgtcacagagatgaaagctgccatagatgaggatagtaataatattcattcagcgttatccaacttatctgctgcagatgaaaaaattattgatagaacaaaaatgataggtgctgaaatagttagttatcgtgaaacatatatcccattaatggaaaaaataacgttgatgcatcagaaattattaaagcagagcttattacatgatgaggtaaaaaatgaagattaa

SEQ ID NO: 374989 - DNA, 1320 bp, Salmonella enterica
atgaagattaaacattttttattaacggcagcttttgttatgcaaggtgctcatgctagtgaatttgcaatactgccattaagtaagttggtggatgctgcattaaaacatcagccatctgttgctgtttcctattacgaaactgaaaagaaaaaaagtgatttagaagctacgagggcttcgctttatcctacattggatctatcgtctggtattaataataacagaaaagagtcttccggtgatgaacgaaatattgaaaataaaatttcactatcgtatcggattactgattttggtgtaagaggagcaaatatcagaaaatctgaatatgaaaaaaacagtagtgatattgattatgaaaaaacaaaaaacacagtagctcaagaggttataacaacttattataatatcagtaaatatcgtgaaatgattgatggtataaataaagagaaagaattttataaaaacatgttgggtaccttttcgctgttggtatcatctggtgttgctatgcaatctgacttgagaaaagtacaggtttcgatcgatgcattgaataccagaagtattatgtatcaatcaatgctggatgatgaaatgtataagatgaaaaatatgactggcatgcagttatcgccagatcaaatccaaagtgatgaacatttcgatttatttaaaaaatatatttttgtggatagccctgaaaagcttatgaatatggttatgaagtacaatgatgactataaaatgcttgtcagcgcgcgaaaggcggcctcagaagatattaatgctgctaactcttcctatttcccaactgtcgatttagtgtctagctatgtacagaataatccaagtggcagcgccaaaaaaagcgattacgaaaatgaatttaagacaggggttaatgttagttttaatatttttaatggcttcagaaactcagcacaagaaagtaaaatggtagccagttattctcaggcaaaattacaaattgacgattttttgctgaaaacgcgttataacatcgattcccaactttcaaagtacagtgcagcaaaagaaacatatttagtagctgaacgttctcataaaaatgctttgcaacttactgggttatatgagcaagaatttcagttaggacaaaaaagtttgcttgatttaatttctagccgtaatgaagcatttcaggcatatgtaagcatggtagatagtaaatatagcttatatatgctgaaactacagcaactatctttagtttttcatttaattgattacctgaaaggaaattcagctagtgagttgaatataacaaaatga

SEQ ID NO: 374990 - DNA, 1251 bp, Salmonella enterica
atgatgataatcataacgctaacaattatgattgtcattcttacctattttgtaaagataaattctgtagtgcatggtcagggtgttattacaaccaaagataatgctcaactaatatctttgtctaaaggtggaacgatacaagatatttatgtaacagagggagacactgtaaaaaaaggagagctacttgcaaagatagttaaccttgatttacaaaaggaatatcaacgttataaaactcaaaaggggtatctggataaagatgtaaacgaaatatcattcattcttgataaacgaaatgaagatggattaatttcacttgatggtgtgagttctttaagtaacaaagaggtaaaagctaatattgaactggttcatagccagataagaactaaagaattaaaaaaaaattctcttgattcggagattgatggattacaggagaaattaaattccaaagaaaatgaattagctttgctcgcagaagaaataaatattctctctcctttagtgaaaaaaggtattagtccgtatactaactttctaaataagaaacaggcgtatattaaagttaaatctgaaattaatgatattgagagcagtataactttaaaaaaagatgatatcgagttggttgctaatgacattaaggcacttaataatgaattaaggctttcattatctaagctcatatctaaaaatcagcaagaacttgaagtcgttaactcaaccctaaaagtaatagaaaaacaattagatgaagaggatatttactctcctgttgatggtgttatttacaaaataaataaaagtgccactacacacggtggtgttatccaggccgctgacctactctttgaaattaaaccgaaggtgaagactatgctggctgacgtaaaaataccacctaagtacagagatcaaatatatttagacgaagctgtcaaactggatgttcaatcaattatccagccaaaaatgaagtcatatagtgcaacaatcgataatattagccctgactcctatgaagaaaacaccggaggaactattcaacgatattataaggtaattatttcattcgacgtaaatgaagatgattcgcggtggttaaaaccaggcatgacagttgatgccagtataattaccggaaagcatagcattatggagtacctgctgtctccactgatgaaaggcgtggataaagctttttcagaacctgttaatactaaaagattaaatctttcttag

SEQ ID NO: 374991 - DNA, 147 bp, Salmonella enterica
atgtgcaatatttccagcaatatcctctactgtggcggttattttatgatcaccatcagccagactttgatctggtttcagagtataatcccatacaccgtctttattcgtcctgacttcagtcaccaaagcattatctatatataa

SEQ ID NO: 374992 - DNA, 666 bp, Salmonella enterica
atgattttgattgctattgtatattccgccaatcagatgactggtgaagccctcaggcatatttttaaagctgatcgcagtatccgggttgagttttcaacaagcctggaaactttgatagagaaggcattagaaatgaagccagaatgtatcattcttgatatcagtctccgggattcattctatctgatatatatgattcgcaatcattttccggctgttccggttatttttatacaaaaatatttccttttttcagatcgtataatcagtgaatatttcgggcacatttttctgtacgaatatgatgcagtgttgtgtgcataccctgattttactccgctggatctgttcaggcaggatgtgttttctggtactcattgttccggtggtgtatttcttaatgacagatataccggtatgacggatatgtcactacgacaacaccttaatgattatcttcgtcaccggcttgcagggctggtcacctctgaaaggatacgggaggtggttatggactggctggtatgcggcttgtctgtggcagaaacaggaaaatgtgcacagataagtgacaaggtggtttatttgtaccggcgtcaggttatgaacatgattggtataaaaaatttttcgagggaattcattcagtcattaaaaatataa

SEQ ID NO: 374993 - DNA, 303 bp, Salmonella enterica
atgatgctacatgaaagtaaagaaaatttccctgaagagcctcagggattttatcagcagggagagttaattccgggcagtgtagatatccgacactttcggttactgatgactatatcttctgtgaataatgaaaaaatgtataaagcccttgaagaggtactggtttacggaaaatcaagaaaagaggcctgcgaaaataacgcagtcacgcagagttacttttctgtcaaatacaggaatacgcagatggtcagccatgcagtttaccgtatcatgcagtttatgctgactgataagtaa

SEQ ID NO: 374994 - DNA, 591 bp, Salmonella enterica
atgtcacttaaaactaaattatctctggctgcgatctgcctgatggcttctggtgtggtcgcagcagccacgcctgtgggcaacggcacgctgactatcaatggtaccattagcgcatcaacctgtacggtagcccccagtaaaaccagcctgacggttccgaatttagtacctgcaaatatcgatgctgcggcgcataatacggaattgtacaaagatacagtcagttttgatttcaaggactgtggtgctgccggtaacaccatcgttatgaaactcaccagggatgttagtgctccagatggtgcaggtggttctggcgcccttaaaaaagcaggatttagttattcgaatggtgcagactcgctgtattcaccattgtattatcagatgactccgtcttctacagataatttctttatgcttgatggctctggtaataacatcgatatttcttctgtccaggataaaggcgctttctctataccggttgatttagttgtgaaaacagctgtttctactggtgttgatactggaaattatgtcggtaactttaccgccgctccgacctggtctgtggaatacccataa

SEQ ID NO: 374995 - DNA, 714 bp, Salmonella enterica
atgtcagctgtgaaaatatttttctgcgcgatgttatttattgcttttaactcgctggccgggggggggacatggcttgatgctacccggattatttacaacgagaaagacacctccagatctgtgaaaataagcagcacctcgtctgatattccctatctggttcgtgcctgggtcacccgcgttgataatatggcagtggctgataaatgggtagtgactcctcctgtttaccgtctgaacgagaatggagctgttcagctcagactttaccttctcgataatagtggactgcccggtgacagggaaagtgttttttatctgaatgtcctcagcattcccggaacatcatcggacgaaagtaaaacggaaaacgacagtctgggagggaaaataattattgccattaactctaaaattaaagttttctaccgacccagcaatctggcggatacagatatggaagcagagtacaaaaaactgcagttcagggctgaggggcgttccatttccattattaacccaacaccattctatatgaattttaatgaaataaaagtggatggcgtgaaatacaatattaaccgtcagatggtatcgccttttggtaacgtcacattcacaacaaaatcagtgccacaaaagataaattatcgcctgattaatgactttggtggcatcactcctctggtcagtgtcagtctgaaaggttag

SEQ ID NO: 374996 - DNA, 2451 bp, Salmonella enterica
atgaaaggaatctgttctgttgcgctgaaaaccggggcgctggggctgtttgcactgctccctgctcaggttcaggctgactacagctttgatcccggttttttcagagggatgggaattgccggcagcactgatgtggatctcagtctttttaatcaggggagtacttttcctccgggggagtatttgctggcggtgtatattaacggtgagttcatcatccggcagaatattcattttatcagaagtctcaaagggggagatccctttccctgtctgtcagcaaaggatacggcagctctggggattaactatacctctgaggaaaactcggtctgtcaggtaccggaaaacctgcctgattttctctggaaaacggacatgaacagccgtcgtctcagcctgacgcttcctcaactatatctgcagaacaatgattattttaccacctcacctcgctcctggcaggccggagagccggcgctgctgatgaattatgattacagttacagtgacacccgttccggagagcagaccgataccagccagtatctggggcttcagggaggggtgaatctcctgggctggcggctgcgtaatgaaagcacctggtcacgtactgactcccgggagagtccgctcagttcactgcgtacctatattcagcgggattatgcctggggtcaggggggggagtttacggccgggcaggcgtggagtgacggaaacctttttgaaagtgtgccgttcaggggggtaatgctgtcatcgagggacgacatgctccggagtcagtttcgtaactatacgccagcgattcggggcgtggtgaacagtcagtctgcaacggtcagtgtgataaaaaacaaccgcgtgatatatcagacgaacctgccggcggggcctttttcccttgatggaataatggataatggcggcggagattatctcatccagatcaaggaagctgacgggagtatccgcagttattcgcagtcagctgattcactccctgttctgcagacaaaaggaagactgaaatataacatcgtttcgggtgtcagtgactttgccggcacggatgacagttatttcagccaggccgtactgtattacggggcgggtgatcgtctgacactgtatggtggagggctgctttcgtccggatattcagcctggagtgcaggtacaggattacaaattgacgggctgggggctgtctcggcagatctgactctgtcctctacagggaatctcccggggggaaggtcgctttccggtcagtcagcccgtgcatcctggtatcgtgattttgatgctaccggcacatcattcggtctctttgcctaccggtattcttcccgggattatatgagctttgaagaagccctgcgctatcaggttgatggtgataatccccccaacagaaagaaccgtttcgatctgtctgttgttcagagtctgggtgaggcaggcaacctctctgtgaccggccgcagagagagctactggtccggcgagaaaaatctgaccggggtaagggtaaaccataatattggttttggaagggttagcctgaatacctggtttgatcagagccggactgtcgataacaaggaagataaaatcgccggcatgtccgtttcagttgctctttatgagaaaggacgaggagtgtccctgtccagtcgtctttcgggggaaaatggtcgcctgaccagtcagaatagcgtgaatatctcgccgactgaggatggtcgctttgcactggcggccagtaccggaaaaacggaggggaaatccagtctgcagggactgcaggttaattacagtggcagcctgtcagagatgtcggcagggtattacagtggaggagataaccaccgtctcaatgcagggattcgtggggggcttgtggcacacggacgcggtatcactgccggacgcagattgtccatggaagcccccgtcgccgttatcagcacaccaggaatatccggtgtcaggatcagcagcagggcgaatgtggaaacagattattttggtaacgccattgtcagtaatctgcagccttatcagaaaaaccagttatctctggatgtgacatccctgaaacccggtgtggatgttacggaaacagaccggacgatagtccctgccagaggaggcgtcattccggttatttttggtgtaagtgcaggggaacgggcactttttaaagtgatgtaccgtagccgcccggttcctatgggggctgttgccagtgtaaaggacgccgcaggcaatgataagaccgctttttttgccgatcagggacaagtgtatatgaccgggatgaatactcagggcgtggtcagggttaactggggaaatgccagctgtcagttcagttatgacacaggtggacgtggtgaacaggtcccctataacaatacggtggaatgcaggtaa

SEQ ID NO: 374997 - DNA, 879 bp, Salmonella enterica
atgaaaagacaattattcgccctgatgattctggtaggaatttcccccgacaccatggctctcatgtcggagaatctcacagtctctctcggggatatcacgctgaagccccggactcaaaaaaatacggatgcgctggctgtcactcgtattgatctgccacccgtctgtgaagaggtatgtcaggagagcggtacgattactttatatgatggctcactactcccgctgagaaatgagaccacccgatacacaaccttgatgaaaggggttgaggtgtccctcagtcttagcagtgcagatgcggatacgttgcaaaaaggacgtggtggcgcggttgacattactgtccgacaggctgaaaagccttatccatccggagcgtttacccttccgctgatgacatataccggcagttcccgggaacagaacagtaccagagaagtcagcgtgaatctggagggaaaggtgaactcggggagttgcacaataacttcaggaaaagacctgcagtttattttttctgcaacgccaactgaattccgtcagatagagcacagtcgcaaccgcagtcagttgggagtgcagaatatggcgtttgactgtgtgaatgtgtccggtatctctctccgctttagttctcctgatatgaagcaggggttgccaggcgtgttgtttgataacaacacgggagtaggactaatcctcggctatgaggggggcggcagaaagggtgatatccactgggataattcagagattcagttacctgtgaataatgatgccctgtcccttgccatcggtctttatacccggggaggagacgtttcaccaggggcattcagttttaccggggtctatcatgctgagtacaactga

SEQ ID NO: 374998 - DNA, 213 bp, Salmonella enterica
atgtctaaagatagtttcgaccatattgttactgcaatgcggagtcgactggatgctgatacatgtgagccacttaaaacccgggatattgctgatgcaacgggtctgacaatataccaggccaggacttaccttgagcaactccatactgctggggtggtcgggaaagtgaacatcggaaagggagttcccggattatggcgactattataa

SEQ ID NO: 374999 - DNA, 339 bp, Salmonella enterica
atggcgactattataactggtctcccggaacgcagaatcagcagccggctctggtatggcaggctctgcattgagtttaacagcaacggcgacctgagtccggcggagcggcgagttatccggctgctgttacagggatataacagcgggcagattgctgccctctgctttcgcagcgttaagaccatttccacccagaaaggccgggcctttaagcgcctcggcgtcaggaacgatgccacgctgctgcctgcgctgctgcttcagggtatggtaactgtatataccgatctgaaccgtgagcattctctggatgataacagcccggatgcagaatag

SEQ ID NO: 375000 - DNA, 654 bp, Salmonella enterica
gtgccagtaaatcatgcccggaaattaaattctatgcggggagcattgttttcttttctgcttctcggatgcgtccgtgccagtgctgcacaggaatgggagcacgtcacgccccccgttgctgatgctcaggccgtggtggaattcttttccttttactgcccgccttgccatgcattctcacagacggtgggcgtggacctggccatacggcgggagctttcagaaggtgaccggatggtcaagtaccatgtcagccagctaggattgctcggctatgagctgacacgggcctgggcgctggccattgtgatgaacaaaaccgaagccgtggagaaggcattctttaccgcaggtatggtggagaaacgcctgcactcaccggaggacattcggcgggtattcatggtcaccaccgggataaccggggaggcatatgaccgggaaataaagagttcggcagtaaatgagacagtggcactgcaggaacgattgttcagggaatatggtgtgaggggcacgccttccgtttatgtccgtggccgttaccatatcaacaatgctgctttcaacgcattttctgcggatgatttcagaaaccgttatgcgtccgtggtccggacattgcttgtcggtaaagacgatgccagctga

SEQ ID NO: 375001 - DNA, 852 bp, Salmonella enterica
atgaaactgagacatttacttaaatacaagttgactactgctgctctcctgataacggccggggtagttaccttgtgttttccggagaggtattatctgaaagaaacgggatggaatcttacagcagaaaaagaaatccctggattaaaagggggattgtccggtctgacgtggaacccggatagcggtacattatttgctgtgacagatcatccgtcaacagtaatcgaacttgatacagaagggaatgtactacgggtaataccatcggatcgtgaccatgattttgaggccattgagtaccttggtcagaatcgctatattctggcccgggagagagagcggacactctccacccattgtattgacggtactactacagaattatcaccggcggtatacaccatgactctggatataaacaggagcagcgataatgccggttttgagggacttgccagtagtaagggcagggataaactaattattgcccaggaaaaaaaacctcttcggatttaccgtgccggacacagcaaaaacgggatgatgatcagtgacaccatcacccgggaggcatcgctgccgtggtttatcaaggatatctctggtctgcattatgacgggaacaacgggctcctgtatgtgctttcccatgagtcagccctggtactggtgtcggacctggacggcagcaggaaagtgatgtcgctgcgccggggacatggtggactgcgcagcgacataccgcaggcggagggaatcgcttccgatgaccagggaacgttgtggatagtcagtgaaccaaatttattttaccgtttcgagagcgttcagaattctgtgtcacgttaa

SEQ ID NO: 375002 - DNA, 396 bp, Salmonella enterica
atggcagatctgaagccggtgtatcgagcggtgtcaaaagaagccgcagaaacggcactggatgaactggaagcgaagtggggacagcaatatccggtagtaatccagtcctggcgtcgaaaatgggaaaacctgtcacactacttccgttatccggcaggtatccgcaaagtgatttatacgactaatgccatagaatccgtgcaccgtcagttcagaaaactgacgaaaacgaaaggcgccttccccaatgaaaacagtcagttaaagatgatttatctggggctgatgaacgcccgggaaaaatggacaatgccagttctgagctggaatttgacattgtcacaattagcgatttattttgaaggtcgtctcgataaagtgatgacgttgtag

SEQ ID NO: 375003 - DNA, 303 bp, Salmonella enterica
atgagctgtcaggatatcagccgggagattgaggacttgtatgccttcagcgtctcgacggcgactatcagcgccgtaacagacaaagttatcccggaactgaaacggtggcagcagcgcccgctggagaaggtgtatccctttgtctggctggatgctatccattataaagtccgggaggatggccgctaccagagcaaagcggtttacagtgtgctcgcgctggatctggagggcagaaaagaagttctcgggttatatctgtctaaagtgaaggcgcaaacttctggctgtcggtactga

SEQ ID NO: 375004 - DNA, 930 bp, Salmonella enterica
atgaagaagaaaaacagcacacccactcctcacgatgccacgttcaggcagttcctgacgcaaccggatattgcccgggatttcatggaaatccacctgcctgcagagctgcgagcagtctgcgatctcagcacgctgaaactggaatccggctcgttcgttgaggatgatctccgccagtatttcagcgacgtcctctatagcctgaaaactacagccggcgacggctatattcatgttcttgtcgaacaccagtcaacgcccgacaaacatatggctttccgcctcatacgctatgcggtagctgccatgcagcgccacctggaggcagggcataaaaaactgccactggtgataccggtgctgttctatacgggtaaacgcagcccgtatccgtactccacccggtggctggatgagtttgacgatcccgggctggcaggcaaactatacagcagcgctttcccgctggtagacgttacggtcattccggatgatgaaatcgctggccatcgcagcatggccgccctgactttactgcaaaagcatattcaccagcgagacctggcagaactggttgaccggctggcgcccatcttgctgacgggatacttgtcttcatcgcaggtgatatcgctggtacactatatagtgcaggcaggcgaaacatccgacgccaaagcctttgtacgcgaactggcacagcgtgtgccgcaacacggagacgcacttatgaccatcgcacaacaactcgaacaaaagggtattgagaaaggtatccagcttggaagacaggaaggtcgttcagaaggtgagcgcgaagcgactctgaaaatagcccgtaccatgctccagaacggcattgaccgcaataccgtcatgaaaatgaccggtctgaccgaagacgacctggcgcagatccgccactaa

SEQ ID NO: 375005 - DNA, 201 bp, Salmonella enterica
atggctgaaagaatatctcaaagagaacaggagttgttggaggaattcctttgtactgttctggatgatttcagtgaaggcagtataacccgccatcaggctgtcaggggtatcgcgacattatatacagctgccgcagaaggacggagagaagaggctttagaatatctgagagagggaagaaagttgctaaggcagtaa

SEQ ID NO: 375006 - DNA, 633 bp, Salmonella enterica
atgttcgtttttggttacctccgggcatcaacatcagagcaggatgccagccgggcaaaaaatgcactgaaggcatttgcaaaccaacatggccaccgtattgctggctggtatatcgataatgtatccggtacgacaatgaaccgtcctgaactgatcaggctacttggtgatgctgaaccaggtgatgttattctcattgaacaggtcgacaggcttacccgtctggatgataaaggctgggagacactcagaaaacaaatcaccgacaagcagctggccatcgtcagtcttgatctaccgacaagccatctggcgctatccagcacagtaagtgatgactttacccgaagtatgctgaaggccgtaaatggcatgatgctggatatgctcgccgctattgcccgaaaagactacgaggaccggcgacggcgccaggctgaaggtataagcaaggcaaaagcggagggcagatatcggggcagggtagccgatgcacagaaacatgaattgatacgcactctgcgtctggcccacggaaaatcactgcgtgaaacagcccggctagctggcgtatcaaagatgacagtaatcagggtctgtaacggcaatcataaacaggatactgattga

SEQ ID NO: 375007 - DNA, 1206 bp, Salmonella enterica
atgaaacgagattacggtagtgtcggtaccatagcgctcagagcaagcgctctacttcaggccatgagccgggatattgaggagcaaagaaaggaattcaatctgacagagtatcatcaaacatatactcgtaatgcggttgcaaaattgccgaagctaagccgacgcatcgtagaactggccatgaaagaaatggaagaaagcggctatgattttaataaaaagcaggttggcaacgtcgagcaatatgcactaacaattcagaacgtgattgatatatacgctcaccgacagataccaaaatatcgcgatgttcataaagaaccttacgtaatctttgtcgtcaacttgaaaggtggggtatcaaaaactgtcagcacagtcacgctggcgcatgcactacgagtacatcaggatttgctacgtcatgaccttcgtatccttgtgatcgaccttgacccgcaggcgtccagcactatgtttttggaccatacccatagcattggtactgttcttgaaaccgccgcccaggcaatgctaaataatctcgatgctgaaacactgcgagaagcagttattcggcccactattattcctggcgttgatgtcatccctgcttctattgatgacggctttgtggcaagtcaatgggaggctttggttgccgaacacttaccaggttttaagccttctgaagtactcaggaaaaccatcattgaccgtatcgccggcgattatgattttgtcttcattgatactggtcctcatcttgatccgttccttcttaatggcctggctgcgagtgatttgcttctcacccctactcccccggcgcaagttgatttccattcaaccctaaaatatctgactcgtttacctgaaatgctcgaacgtctagaagaagaaggggttgagcctcgcctaagtgcgagcatagggtttatgtccaaaatgaccagtaagcgcgatcacgaaacttcccatagtctggctcgtgaggtgtatgcaagtaatattcttgactcatcacttcctcgattggacgggttcgaacgatgtggtgaatcttttgacactatcatcagtgctaaccctgtttcgtatccaggaagcgcagaggcattgaaaaaagcacgtaccgaagcggagcgttttactaaagccgtttttgaccgcattgaatacatccggggagcgtccaaatga

SEQ ID NO: 375008 - DNA, 972 bp, Salmonella enterica
atgaaaaaggttttagctcgtgggcgcgttctgggtaatagcaattcagagttcgcccgtatgcttgaaggtgacggagatgttaaaacctttacccttaaatcaggtaagcaggccaaatttgtcaaaacggtagtgttaagcggagagattgaatcaaagacgttcgttgatgcttcggttaatggacgcgatcaggctatgctttcgcgcgagtcagttactgacatttcccgcacgattaaacttcaacaattctttccggctattggtcgggaagtaaacggacgaattgaaatattagacggtactcgtcgtcgggctgcctgcatctataacaacgtaaaattcgaaattttggtaacaaaagacgatattgatcttgcagacgcaaggcagcttgcaaaagacatacagactgcaagagagcatagtcttcgcgaactgggaaaacgactggaagttacctatgggaccagtatgactaaagaagagatcgctctggctgaaaatatctcttctgcaaaagttacacgggcatttcaggcggcatcagtaccggacgaaatgatctctgtatttcctgtaataaatgatatttcgctgtcggattatcaatttttgttgaaactgtctgaagaagcaaaccacaaaaaaacgtcagtgaaggagttgatggataaagtgcggcaaaagctgatggctctgcctgattatccagcaattgataaaagcaaaatcctgtcagtctttcggacagagagcaaagctcttatggaccggcctgcaaaaactgttgaaactgagaagttgaaagagtttgctgatcgcaaccagtttgcaaggaagaaaactgactcgaagaagcggcttgttgtttatgaattctcacgtatatctaatgaagtgcagtcagagattgatgaagctattaagcgtattcttgaaaaactgccttcatcggagcgataa

SEQ ID NO: 375009 - DNA, 165 bp, Salmonella enterica
atggcatcttttttttacttttttcaccatgcttttttgaagtctattgtattgattataaagatttttttaaaattctttcatagtgaaatcaccacgaattttcttgtgtttttgcttcgtcatagtttggctactggcaattcagaccagcgagtcgtatag

SEQ ID NO: 375010 - DNA, 1272 bp, Salmonella enterica
atgtttgcgctcgctgatgtgaattctttctatgcgagcggtgaaaaggtgtttcgtcctgacctgcgtaacaggcctgttgtggttctcagtaacaacgatggttgcgtcatcgcgcacagtgccgaagcgaaacggctgggtattaaaatgggcgtcccctggttccagctgaagacggcacaattcccggagccggtcatcacgttctcgagcaattacgagctctatgcgtctatgtcgaacagagttatgtctcatctcgaggagctggcgccgcgcgtggagcagtacagcatcgacgagatgtttctggacattcgcggcatagaccgctgcattaattttgaggacttcggccggcaactgcgcgagcacgtgcgctccggtaccgggctgacaatcggcgtcgggatggggccgaccaaaacactggctaaaagcgcgcaatgggcgtcgaaagattggccacagttcggtggggtgcttgccctgacgtcacataatccgaagcgaacggagaaactgctctcactgcagccagtggaagaaatctggggagtaggtcgcaggatctcaaagacgcttaattcgatgagcatcactacggcactgcagctggcgcgtgcgaaccctgtatttatcaggaaaaatttcaacgttgtgctggagagaaccgtccgagaactcaacggagaaagctgtatttcgctggaagaagcgcctccgccgaaacagcagattgtctgcagccgctcctttggggagcgtgtcacgacatatgaagccatgcggcaggcagtctgtcagtatgctgagcgtgcagctgaaaagctgcgcggcgagcgtcagttctgcaggtatattgccgtttttgtgaagacgtcaccgttcgctgtaaacgaaccgtattacgggaatgtggccagtgaaaagctgatgactcccacgcaggatacccgggacatcatagccgcagcggtgaaagcgctggatcggatctgggtgaatggccatcgatatgcaaaagcaggttgcatgctcaatgatttcactcctaccggtgtttcacagctgaatctgttcgatgatactcagccccgaagcaacagtaatcagctgatgaaagtcgtggacggtattaaccattctggtatggggaaagtgtggtttgcggggcgaggcattgctcctgagtggcaaatgaaacgagaaatgctttcaccagcctatacgactcgctggtctgaattgccagtagccaaactatga

SEQ ID NO: 375011 - DNA, 423 bp, Salmonella enterica
atgatcctttttgtcactcccgcatctgagccagcactgtcaaccgcaccacttttcacagagcgctgtccggcaggttttccgtcaccggccgcagactataccgaagacgaactggatctgaatgcctactgtatccgtcgccccagcgcgacctattttgtccgggccattggcgacttgatgaaagatatgggcctgcactccggcgatttaatggttgtcgacaaagctgaaaaacccatgcagggggatattgttatcgcggaaacagatggcgagttcaccgttaaacgcctgcagcttaaaccccgaatagccctgctgccgatgaatcccgcctaccctaccctctacccggaggaactgcagatattcggcgtggtgatggcattcatacataaaacgcggggtactaactga

SEQ ID NO: 375012 - DNA, 672 bp, Salmonella enterica
atgtgcggtcggtttacgcagtacaactctcgcgaggagtacctggcctttctcggagaagaagcagaacgggacatcccgtatgatccggagcccgtcggccgctacaacgttgcgcccggaacccgggtattactgctgagtgaacgccgctcgcagctgcatcttgatcctgttcactggggttatgcgccggagtggtggaacaagcccgctctcatcaacgccagaagtgaaactgcggccggcagccggatgttcaggccactctgggagcacggacgtgccattgtttttgctgacggctggtttgagtggaaacagcaaaacggcgtgaaacagccgtttttcatttaccgcaaggacggaaatccactcctgctcgcagccatcgggaaaccaccttttgagaacggcaatgaccaggaaggattcctgatcgtcacggcagctgcggatgagggactattggacatacacgatcggcgaccgctcgtgtactcaccggctgccgcacgtaaatggctcagcgaaaacacaaccggtaaagaggcagaagacattgcccgtgagggcagtctttccgccgaaaatttcacatggcaccccgtcagccgggctgttggcaatccccggaaccaggaccgggaacttattgagccgctggcttaa

SEQ ID NO: 375013 - DNA, 678 bp, Salmonella enterica
atgtcccgatttatccagggtaattgcgtccatatcatgtccggctttccggataatgctgtcgatttcattctgaccgacccgctatatctcgtcggttttcgtgaccgtcaggggcgctcaattgcaggagacgtcaccgacgaatggctccagcctgccagtaatgaaatgtaccgcgtgctaaaaaaagacgcgctgatggtgagtttctacggctggaaccgcgtcgatcgttttatggctgcctggaaaaattcgggattcagcgttgtcggccacctggtgtttaccaaaacctacacatcgaagtctgcctgggtgggctaccgccatgagtgtgcttacctgctggcaaaaggccgtccgcccctgccgcaaaacccgctgccggacgtgctgggctggaaatacagcggcaaccggcaccacccgaccgaaaaacccgtaaccagcctgcaaccgctgattgagtccttcacacatcccggcgcgattgtgctcgacccctttgccggcagcggctccacctgcgtggccgcgctccaggctggccgtcgctacatcggtattgaactgctggagaagtatcaccggaccggacagaaacgtctggccgccgtccggcgcgccatgcagtacccggccgctaacgacgagttcccggaggccgcgtaa

SEQ ID NO: 375014 - DNA, 222 bp, Salmonella enterica
atgaactatgcaggacacgaaaaactccgcgcagaagtggcggaagtcgccagcaacatgtgtgacctgcgggcgactctgaacgggatggggcaccgctatcgctttgattccgatgtgctggtcgaacgcctgacctgtcagaccctttttcgcatcaatgccctgtttatggcggcgtacaacgaaattcttgagctggatgcctgctttaaggactaa

SEQ ID NO: 375015 - DNA, 420 bp, Salmonella enterica
atgtacggaacctgtgaaaccctctgccggttgttgcgtgagcagtatcccgcagaaaccccgctgaacctgattatctggtccccggcggatatcgaagcgctggccgacggaatggaacatgccgtttcggaacaggagacaagggcggtactggcgcgtatggacgccataccggaagaacaacagcttgagtcgggcgtgtctgccagtgcggtgatggatctgattgaacaggtgaaagaggccgcgccgggagtggtggtgccggtggaactgcttgaaaccctgctgactactgccgaacaggcgttatggcacagggaatggagcgcccgtgacagcaattatccggtgccagaaagcgttacccgtcgcctggctgatgcggcgaaagttcgcgcgttactgaaaaaatga

SEQ ID NO: 375016 - DNA, 780 bp, Salmonella enterica
atgcaggaaaccaccacgttaaacgcccttgtgatgcgccgtgcgcgcgatttgattgctgattatggatggcctgaccataccgatgttgatcagcgtgatccggtcaataaaccgggatggataagtatttatgtccgtctggatgcggcaaatattgttcatctgcttcctttgctttgtaccggtgaagtacccgcagagctgcaaagtgccatgtcaaagctagccgggacgccagcgcagattattttatccggcagccgctatgccgacgcgccgcagcttccggaggaaggaacacagatagctttcccctgggccggggaatggctgacagagccggagattcaggcggtaacggattgcctgtcccgcgccgtgcgggatgtctcccggcaggtatgggaggatgcgcgccggataaaggcggcgctgaccacgcgcggggaaacgctgttttatcgccagacccgaaatttccgtctggttgtgaaggaaaatgatatgccctgctggctggacgatgatgacaatttgccggtggtgctcgatgccatcctgaacaaaggggcacgctacagcagcgttgagttcttcgttatcagcgacaaagttgatcaaatcttggcatgtggccagatgtgcgatgtgctgcgtattccgggcgagcctccgcgccggtggatggatttaaccctgttacacgaggtcatggcagaagcgcgtgcagaaatcagttttgtccgcaatgccctgtcagcaatccggccagtgtag

SEQ ID NO: 375017 - DNA, 507 bp, Salmonella enterica
atgagcactacgaccaccacaccggctgtttacgtgggcacctaccataaatacaactgcggcagcattttcggcaaatggtttgatctgacggagtttgacggcagggaggatttttacgaggcctgtcaggcactgcatgccgatgaatgggatgccgagtttatgttccaggactgggaaggtatcccgtcgcagttcgtctctgaaagctccattgactgggattttatcgccgcttacaaacgcgccgaagaagagagcagggaagccgcttttatcgcctgggcggagtataccggcgagtgtgactatgacatgtttgatgatgcgtaccgcggcgaggcggaaagcgaggaggactatgcgcgggagatggttgaggacaacggcctgttaaatgaggtgccggagccgttgcgcagctatttcgattttgaagcctgggcgcgtgacctgttcagcagcggctatgtgttccatgacggttatgtcttcagcaactga

SEQ ID NO: 375018 - DNA, 192 bp, Salmonella enterica
atgaaacttgcaccacaaagctgtgagatcctgcgacagtacaaagccctgattaatgcccgccgacgtgatgccggtcagcgggaactgaccaccgcgcaagtgatggatgaaatttgttactacatgacgtgtcagtgtgccgtgtacatcggcggtcatttcatcttacagggcggtaaagggcagtaa

SEQ ID NO: 375019 - DNA, 261 bp, Salmonella enterica
atgcatatgtcgaagtggaatatcgcttctttctcaaaagacgagcaggacagagtatcggtcgataaagcggccgccgctgttgcctggcaggaacggatgaacaagcccgtggtgccggagctggctgaacgggagcagcctgaacatcttcgccagtatttccgtgaacggcttgaagttcatcggcagaacagtcagcagctgccgcgcgcaaatgcgcccgaatataataaacccggtgatgagcagcagaagtga

SEQ ID NO: 375020 - DNA, 312 bp, Salmonella enterica
atgtctctgatgtttgcagccgttactcttttaaccggtattaacctgttgtttattccgtttcagcctgtaccggctctgtgggggggaatcctggccgttgcttttatactgattaatgtcgtggcggataaattgcgtctctggagtggcgttgcatggattatcgttgccggcatcatcataacgttgatgctaaaggggaaggagccgggtgacgaattaagagtgctgatcaccgtttttgctttcctggcttcagcctggtacagcgttgtgcagtacagaaaagaaaagcattttcgctcctga

SEQ ID NO: 375021 - DNA, 537 bp, Salmonella enterica
atgacagtacgcggcatcaacaaagtcatcatcgtgggtaatctgggccaggaaccggaagtccgttatatgcccaatggcggcgcggtcgccaatctcaacctcgccacctcggagtcctggcgcgataaacagaccggagagatgcgcgaaaacaccgaatggcatcgcgtggtgctgttcggcaagctcgcggaagtggccagcgagtatctgcgcaagggcgctcaggtgtatgtcgaagggcagttacgtacccgcaactggcaggacgacagcggcgtaacgcgctatgtcactgaaatcgttgtcggacagaacggcactatgcagatgctgggcggtcgtcgtgacggcggtcagccacagaacactgctccgcagcaacccgcacaaccgcagagtcctgccgcttcccctgaaaaatccccgaaaaaaggcggcagaaaaggccgtcagactacagcgccgtctcagcaagcgcctcagccgttaccggacgattgtccgccgatggatgatgtcgccccgtactga

SEQ ID NO: 375022 - DNA, 243 bp, Salmonella enterica
atgaccagcaacgttataccgccccttcagtcactgcctgatggcacattcacccgcgaacaggctgaagcggtcgcagcgcagtatcagaatgtagcgattgaagacgatcagggaacgcactttcgcctggtggttcgtaagaacggcgaaatgatctggcgggtatggaattttgagccgggtggtgagtacctgatgaaccgttatatccaggactacggcatccgtaaacagcagtaa

SEQ ID NO: 375023 - DNA, 1998 bp, Salmonella enterica
atgtcagtaaccgagtctaaagcaaaaaccaccgcgaaaaccagcaaaaaagcagtcaaacctgccgaagccgcagcccttaaggcggcgcttgaggccgctcagatagaaatggtgccgttgtcggcgctcgtcaaatccccgctgaacgtccgtaccatcccgtatccggtggagagcgtacgcgacctggctgacaccattcttgctatcggcctgatccagaatcttgtggtccactcgttgccgggtggcctgtcaggcgtggcggcaggtggtcgtcgtctcgcagccctgcaactgttgctgagtgaaaagcgcatcgatgccgggtatatggtcatcgtcaagcgcgtcagcgacgaactggcggtggtggcctcgatggtggagaacaaccagcgagtggcaatgcatccggcagagcagatcagcgggttccgcacgttgtctgagcaggggaagactccggcgcagattggtgaccagctggggtatagctcgcgtcacgtccagcggatgctgaaactggcgaaccttgccccggaacttatcgccctgctggcagagaacaagctcgacgtggagcagtgtcaggcgctgagtctggagaacgatcccgtgcgtcaggtagatatttaccagcgcgtgaaggcgcagcacagctatgcccctgcgcacatgcttaaacgcgctgtcactgataccgaaatcagcgtgaaccactcccgcttcgtgtttatcgggcgtgagatgtatgagtctgcaggtggcgtggtacgtgaggatttgttcagcgcccaggagggtgacggtactgcagacggtgtgctggtcgagcgactggtgcaggagaagctggagtccgccgcactggcaatcgaactgcaggaagggtggtcatggtcactggcccgggagggagcggtcagaaactacggtgacgaccgcgaacattatctgctgttaccagagccggaagcacagtacaccactgacgaacagcagcgtcttgatgaactgtacgccactcaggaggccacggaaacgtttgaagatgaagccgcgattcaggtgctgattgacgaaattgaaaatgcggcatcgatccgggcgtggacactggagcagaaatcagcctgtggcgtggtggtcagcctgtatgacggtgagctttgtgtccagcgaggggtgcagaagaagcctcagaacgagacgaaagaagggcagggagagaatggcagtagcggctccctccatgtggtcagcagcaagccggatgtgacggaggggatcagcgccccgctgctcaaaaagatgtcttcagaaagaacgctggcagtacaggccgccctggtacagcagcccgaaaaagcggtggccctgatggtatggcgactgtgcagttgtgttttcgattactgcaataccacccgtcatccgttcgtgatgcgtcttgaggtgcatcacagtgggctgaccagcgaagcgccgaccggaaagagtggtcaggcatggctgagtctgatgcaggagaaagcccgtctggaggcgctgttgccggagggctggaagaaggatttcaccaccttctttacgctcgacggacagactttgatgagtctgatggtgttctgcacggcctgttcggtggacggggtgcagacccggacaatggggcataccacacagagcgacctcgatggcgtggaaacggcgcttgggttccacctccgcgactggtggcagccaacggcagaaaacttcctcggtctgctcagtaagaaccagattgtggaggcgctgaaagatgccggactgtcaggcgctgcgtcagatgccgggaacatgaagaagggagatgccgccagccatgctgaacaatggctctccggtacgtgctgggttcctgcctggatgcggtcacctgatgcgcaacctgacgtcgctgagggtgaggcgacagactctgatgaccatacggcacacgcagcctga

SEQ ID NO: 375024 - DNA, 432 bp, Salmonella enterica
atgcgaaacattattactcccgacgtactgaaaaccatgatcccccaggaatttgaagactggcgcgaagcgggtgaagatttgcgccgcgaactgacccatgcagtcatgcgcgatctgacctgcccggctgactgggacatgaatggtgaataccggagtgagttcggtggcttttttccggtacaggttcgcttcacgccgtcacacggcaacttccatatcgccgtatgcagtcccggcgacatcaccccgtcatggatggtggtgttcattcctgccagcggtcgcccgttttctgttatcagcaccctgcctacctggtcgccggaggttatttctcacacactcagtctgacagcgcgcctcgatgccgatggctacagtcaggccagcattatcagtgttctggcgatggagggtgcacaatga

SEQ ID NO: 375025 - DNA, 729 bp, Salmonella enterica
atgatcccggcgaatttgtcactgatacccctgagtcatgagcgtcgtgctgcaatgcaggccatcgcggaggtggagaagaaatatgagcgtggcgttcatattgctgagtttgcctacgcccacgccttcttccgcatcctgaacggcagcaaacgtgtcaccgtaaaagatatcggctggttttctccggggatgacagcacagaacctgcgggggaaaaagcaggactggctggcagcgattgatcggctgattgaaagccgtggcgcatgttgctggttacccctgtcggtgtcggacggctggcgactgttcccggaaacgaagtttcagacgtcagagcgtcgtcgcaggcaaaatgaactgagcgctgaaaaatacacccgccagcgccggaaagaggcgtgccagcgggaatccgcgtaccaggcgcttgcgggacaggcggaaatagacctggcttttcataccccggaaactgtcagcagctggagcgcacgttggtcgggtactgaactgcgccagtacgatcttgaggacatgttctggcgctggagcgagcgttttccgtcacttgagccaatggagcgctggatgatggcgaaccagcctttctggagtgtgatggtcgaatctgatgccctcgcaaaagaaagcccggaatctgtccggcaactggagcgctggatggtacccaacaagctgatgcatcaggaggcaagctga

SEQ ID NO: 375026 - DNA, 234 bp, Salmonella enterica
atgagaaacaatccctgcaaaacagagcttaaggttgcccgaagccagcgtaaccggctacgtaccattgagaaaaaactgactgaaatgtccagtgagtgggacggactcagcggctggctggagacagaaagcgaccggctggccagagaggtcggtcagcatctgcaggcactggaagaacaacttcaggaatgggctgacgggagtggctaccgggaggatgacgaatga

SEQ ID NO: 375027 - DNA, 306 bp, Salmonella enterica
atgattattgacgaaaaaagactttttttcatggccttgcttaagggaagtgttcgtctggttgccatattagccttgctgatagtgataatcacgccaataggtatggtttatgaatattttgatttttatccacaaattttgaatgaatttgaatatcatgattatccggaaaactatttcatacgatgcttcctgactggattcatgagcctgcctttattaatgggcatctgtattgcaacgtttgtgttttttcatctcctcggttttatagttttactgctcggaggctactatgactaa

SEQ ID NO: 375028 - DNA, 222 bp, Salmonella enterica
atgactaaaaaaaatgaggtggttgaactactggagcatgagcttcgctggtattaccgggcaccggtaatgattgctgttgcaggcatcattttagccattattgcactgattaaaggtgaccatttttaccttatcacgggcggaattatcttcctggctggcctgggagtgcagtggattcttggattcaaccatttcatatggatgcggaaaaaataa

SEQ ID NO: 375029 - DNA, 405 bp, Salmonella enterica
ttggattcaaccatttcatatggatgcggaaaaaataatgagatactggttattctgctaaacggtttatttgcactggtcatgcactttgccgcgccggaaatgttcggaagtactgagtattatgtcggcgctgggatctgcgctctgatagcgatggttatcacctggcgcgatcctcctgggatgctggacaacgtgctcttgtttctctttaagtggggaattgtggcttctggactggtgttttttatctggggtatcggatacaagctggaattctggggggagcataaccccgatgtagttttcagcagcgcgttcgataccatcttgccgaatctggctgtgctgagcggtgttctgcttctggtcagtggctgggtgtactggaggctaaggtaa

SEQ ID NO: 375030 - DNA, 150 bp, Salmonella enterica
atgcctgcggtaaagctgctcttttttattccccttacgctttgttataccctgctgtggatctcctctgaagaacggacgctgcgaattatggtggcagttgtctgtatcaccttttcaaatttgcctgctgtcgggcgacttccctga

SEQ ID NO: 375031 - DNA, 375 bp, Salmonella enterica
atgaacacacagaacgtcaacatcaaaaccgccaccaaagaatcttccgaaagatggggggaaaacacggccctgcggactgatggctttgtacgcaatattcacgcccgtaatccgttcgatgttatccgcgcggacgtggtgctggcgcgtattgagaaagaggcggggcggtgctgcggtatgcattacgagttgtatcaggcgcgagtgctgggcgatgcgctggattatctggacgccctgccactgaaagatcgcccggcattgatgggcgcggcagcaaaacgcggctacatcctgacatttgcagaagaagaacacgcgctggaagcaaaggatgcgctgatgagcgaactggcagcaaacgaataa

SEQ ID NO: 375032 - DNA, 348 bp, Salmonella enterica
atgtacttacacctcaaagaatcctcggcccttccgggaatgcaggccaccgctgaagccgagcgggcgtactggctgagccgtgagaaagcagcagtgaaagtccccactgaaatcgacgtacacgctttccatgatgcgttggggctgatgtacccgatgaactggcacagcagtgagaacggtgagtgtgaaaccttcatgctggcagaaatgatctgcggaaacgtgaccgaaatttatgcacggatcggtatccgttattaccggatgcgtgactacagcaaccttgaccacgcggaaattctggcccgcgttaaggaggtatcagacaagagccagaaatga

SEQ ID NO: 375033 - DNA, 147 bp, Salmonella enterica
atgcaatttgacccgcaaatcgtcgcacaggcgaacgcgtttgtaaatgccctgcgcagtggtaaacgcgcccgagttccggccttaaagctgaaatactggcagcaatttatgacagttgtctacgctggcctcggcctcgcgtga

SEQ ID NO: 375034 - DNA, 834 bp, Salmonella enterica
atgtcacaactgagctttgccgatgtcttcaatatggccagagagagcgctggcagtaaaattagtacccaggacacgcagccgggtaacgaatcatgtccctctgttcagcggctgatgagtgcgcagtacagccgcagccgctttatcagcgtgtttagatccacaggccgccagctggggcgctgggaagtgttcagtgattttctgtcactcgccgccagtgaattggatatggtgcggataagaacgccggagagcatggagcactgtcggaaaatctgtgcgcgatatgaggcttcagacattgcgaacatgcaggagatgttctgcctgatggtgtgcgcactggaagctaaattccatgacttcctcggcgcgatcttcatggagcttgaactcggcgataactttcgcgggcagtattttacgccgtattcggtacagtgcctgatggcccggatgctgatgccgggtgtcagggacactatccgccgggaaggcattgcctccgtcagcgatccggcctgcggggctgccgggatgctgattgcttatgcggagtgtctgcttgaagcggatataaacccttccatgcacatgttcggcagctgcatcgatatcgatcctgtggcggcagatatggctttcatccagttgtcactgctgggtattgcggcggaagtggtgacgggtaatacgctcacgatgcagtttaaccgggtgaggtatacccccgtgtattaccttaatgactttgagaaacggttggctgacctgcgcaggttcagggccatgcgggactttatgcgcggattacaggaggccgcgtaa

SEQ ID NO: 375035 - DNA, 531 bp, Salmonella enterica
atgcacacaattaacgtcaaaaccgccactcttgaatcagccgaacaatttaaaatagataaatttcagcgctattgtgtaacagatgatgatgaacgacttgattttatccctgcattattttttacaccgtcagctgacaatatgatcgccagctggttacggcagcattcaaattatgatggcggtttctggaattactggattattccacagggtgtcggcggtaatgtggctccgaacagaattatcttcactacaactcaaaccgggtatatcgcacctgctggagtacaacgttatgacatgtgtattcctgggaattattttgaatcagaggtcagtgccgatgccgccggaattattgcgacattaatgataatgaactggttgtcgtggcaggtagctgatatggggcctgaatacgccatagtctgcaaacatcttgtcgctcgccaggatgccctgaaggattatatcagccttattcaacatcccgagaggggattaatatttcgcgctattgattga

SEQ ID NO: 375036 - DNA, 456 bp, Salmonella enterica
atgaagaacgttctgcttgttggattactcgcgcttacctctccggtcattgctcaggactgttttgaaatggcgggaagggattaccatattgaacctgatttattacgggcaatctctttcagagagtcatcatggcggcctgatgcaatgaatattgtcagtaatgaaagttacgccgtcggaatgatgcaaattcactcgcagaatttttcacatctggctcagtatggtatcacgcctggtaatctttacagagatccctgcatgaatatctatactggagcttattatctcgcaattgcttttaagcgctggggatactcctggcgggcagtcggtgcttataacgcaggttttcgtgaaaccgaggaacaagaaaggaaacgccagaagtacgcacaggaaattcaggcaatttatgtgggcatcaagaaaaatgcgccaccagagtga

SEQ ID NO: 375037 - DNA, 387 bp, Salmonella enterica
atgccacgtatacaaacttttgtcagcaatcaggttcgtgaagaaattgaatctctggttacagaaaggaggcaggaaggtgcaacggaacatgatgccacggtatcgtctgttacttcaatgcttatagagctggggctcagagtataccggattcagagagaaaaaaaggaaggtggctttaaccagatggagtataacaagatcatgctggataacatggccagagtccgggcaatgtgttcagagataatgaagatgggcgcgctaagtcatgaagttataagcaacggtaactttgataatgaagtcatcaagagatccatagcgaaatttgcagaagaccaggtaagtattttctttcctgaagaagaagaaacggactaa

SEQ ID NO: 375038 - DNA, 282 bp, Salmonella enterica
atggttatcatcgatcctatccgtatggaaattttacgcaagatctttcctgagattaatgatgtcaaaatcgaagtgtttactcttttcgcctttggaatgtctattagagaaatttctgattacagacatactactacacaggcagtctataagacccttaaggaattgtgtgaacaatatagctcaccctccaatgaggcccttaagactttgtacattacgcgacttgctcttcactcctttcttgaactcagaatagaacttcagccggaggagtaa

SEQ ID NO: 375039 - DNA, 168 bp, Salmonella enterica
atgattcaagacatccccctaaaaccacgtccagcagggaaattcatccgactttatctggatggcgttgtatatgaggagttaagaaagaaagctaaaaaaaatgccaagccagtacaaaagacagcaattcttattattgaggaggcgttagggttgaaggagtga

SEQ ID NO: 375040 - DNA, 360 bp, Salmonella enterica
atgaatttatccttatcaaaaggcggcctccccgcgtctgtaaaaaaccgtgcatggcagttctgccagatggcatggcgtggtgtgaccagtaaaaaagcgctgtcccgtctggctgcgctgtctccgctgctgttactcggtgtggggcagatggccaatgcaaccgacctgctggccggaggcaaggatgatgtgaaagccaccttcggtgccgactcattcgtcatgatgtgtatcatcatcgccgaactgattgtcggtgtggcgatgtatatccgcaccaagaacctgctgatcctgctgggcctggttgtggttatcgtcttcaccaccgtcggtcttaccttcatcaactga

SEQ ID NO: 375041 - DNA, 306 bp, Salmonella enterica
atggagggaaacgatttagacaaataccgtttcccgaaaaccctgtcagagcagaaccgcattattggactgccccttgatgaagctatccccgcagcggttgttttgctgtggggatttttcaccaagaaatatttattcagtctgattattgcggcagttatctggcaactgatcagggcggcgaaacgcggaaaaagctcccgctggttatacaactggtgttactggtatctgcctactgaattattccgggttgtctaccgcgttattcccgattccagtttcaggaaatggataaaataa

SEQ ID NO: 375042 - DNA, 564 bp, Salmonella enterica
atggaaattagcgctcgtaattcatccaccaaaattattgccgttattattctgtcgctcacgacactggtctttattctgggctttgccgtggcatggctggctgtgaccaacagagcactcatccacgagcaacgtacagtcgtcacaccgatgacctacaacgcgccttttgtggtatccgaaacgaaagccgataccgagtatttccggatgatgacgctgtccttcctggccctgcgtctcaatgttgcccctgaaacggtcgattccaaccacgcctttctgatgacctttgtcgaacctgatgttcgggcggattttgtaaaagtcctggatgaagaggctgcacagattaaagccaatgatgtgaattccacgttctacaccacagaaattaatgtctatcccgttgacggccgaatcgatgttcgcggcgtgctgaaaatgtggattggtaactctaagccttccacggaaataaaaacctaccggcttcgtctgaagtataccggaggctttacccgtatcggccggttctatgaggtgaccaatgaaaaataa

SEQ ID NO: 375043 - DNA, 741 bp, Salmonella enterica
atgaaaaataaccttccggcgttattgtttggtacagccatgatggtcgttgtgcccccggctgcgcaggcacagtcacctgccacgatcagcctcccacagggcgggcagttccggctaagtatcagcaataccgatcccaacatgatttttatcccgggtgacaaagtcaccgccatcacagcgcctgggggaatgctggcagacaagcggctgacaacggccggaggtgtgctcttcacctcggtggccacccgtactttcacgatttttgtagaaactgcgctgggccagaccttctctgtcgtggccacgcccgtaaaaagtgaaggtcgcgtctatcgactgatgagcgccgaaccgccctcacggcctgaaacccgtaaatgggaaaccgctcaggcttatgaaaagctgctaatcaaccttaaccgtgccgtgcttacgggtgacatacctgatggctacggtgaagtgaaacctctttctgacggtattcgtctccccggtggtttttctgttacccccctgaaagcctgggcgggcgaccagctgcgtgccgatcgttatgaactgcgtaatgccaatacctggggtgtggcgctgcgggagcaggacttctggaagcccggggtgcgtgccgtgatgtttgataacaacgcacagactctgatgggcggaggaagaatgaccgtcaccgttatccgtgaaaacggggagggtgaagatggccaacgttaa

SEQ ID NO: 375044 - DNA, 1362 bp, Salmonella enterica
atggccaacgttaataaagtcgtccgccgtcgtcaggttgccctgcttatagctcttgttctggggattggtgctggcggtgccgggacatggatggtctcagagatgaacctgaagaaagcgccgcccgcaaaagcgccaaaaggagaacccgcgccggatatgaccggtgtggtcaatcagtccttcgataacaaagtccagcgttccgccattgcggaagcccagcggcttaataaagaaacgcagacagagattaaaaaactgcgtactgaaatggggcttgtcagtcgtgaccttaaaggcagtcaggatcgcattcgtgaactggaagaccagaaccagttgctacagacacagcttgaggccgggaaaaattttgactctctcagtgccgaacctctgccgggggcgctggcctctcaggggaaacctgctcccgctggtaatgttccacccccgaccagtttctggccagcaggcggcggacaggccccagctgcaccggtgatgacccccattcagcgtccgggaatgatggacagtcaggaattcagtccaccagataccgggccgaaaaagccccgtttcccgtggatttcttccggcagttttgctgaagcgatcgtggtggaaggggctgatgccaatgcgtccgttaccggcgataaaaataccgccccgatgcagctgcgccttaccggcaaagttcagatgcctaacgatgaagagttcgatctgacaggttgctttgtgaccctggaggcatggggggatgtttccagtgaacgtgccatcgttcggacccgctcaatcagctgcaagctgggtgatgacaacatcgaccagaaaattgccggtcatgtgtcctttatgggcaagaacggtatcaagggcgaagtggttatgcgtaatggccagatcctgctgtatgcggggggcgcgggcttcctggacgggatagggaagggcattgagaaagcctcctccactaccgtgggtgtcggcgcaactgccagcatgagcgccggcgatatcggccaggcagggctcggcggtggagtcagttctgctgccaaaacactctccgattactacatcaaacgcgccgaacagtaccacccggtcattccaatcggcgcgggcaatgaagtcacgcttgttttccaggacggcttccagctcgaaacactggaggaagcgcgcgcgaaagcggctgcacgtaagaaacaaaatcaaccttctgcctcatcaacgcctgctgccatgccgggtaatacgccggacatgctgaagcagctgcaggacttcagggtaggggacaccgtagatccgacgaccgggcaggtcgtcacacagtaa

SEQ ID NO: 375045 - DNA, 615 bp, Salmonella enterica
atgaaacaaatcacatttttgctggcagggtgcgccctgctgttatccggttgtgccggagtcaaaagcagtttcgactgcgatgccacaacgtctgatacctgtatgaccatgacgaaggccaatcaactggcccgggacaaggcggcaaaacaggcgggaaagccggttgcgggcggactgccttccctggttaatcttcctgccccctctgcggcggcggttccgtcagcatcccgtgccgtcgtcaatgtcccttccggtgcgcgggtaaccagtaacagacctgcagtatcagctggcgccgcaacaggtataagcacgaacgccgcagcgtcaacactgacgccacgtccggttgccggaacgccggtcacaaccacttcgtcatcagtggcttaccgtccggtcggctccgtggtcacaccggcaccgtcatgtcagagcgtgcgctgtgaccatcctggatcggtgcatccacaacgcagccaggaccagatagcaacggtctggattgcaccctgggtggacagcgataacgcctttcatcagcccggtcgggtgtcctttgtggtcagccctgccgactgggttcttccgtcccgggtaaattaa

SEQ ID NO: 375046 - DNA, 2592 bp, Salmonella enterica
gtgaaaaaatttctgaacgtactggaaaatctgcagaacgccttccggatgccggatggcgcgtcggagatgacgcgcaatctggccagcctggacttcccgcagctgaccagcgtcctgccgtaccgtgactatgaccgtgacagtgggctgtttgtgaaccgcagtacggtgggctttctgctacgtgcagagccccttatcggtgctaacgaacagattgtgtatgtgctggaagatctcatcaaaagcaagctgccgcgtaagacgccaatatcattccacctggtgtccagcaagctgatcggtgatcagcttgaccggggcctgtctgagttccgctggcagggaaagcatgctgacaaatttaaccgtatcaccagggcatattatcagcgcgcggcgcagcagcagttcaacagcccaaccggtctgccgctgaccctgcgtgactaccgcctgtatatctcctactgcgtgaaggcgaagaagcggacggcggccgtgatgacggaagtcgctcataccctgaaagtgctgcgttcctctctggacgcggcaaaaatttacacgcaggcggccgatgaccaggagctggccacgctggttcacgggatgctgaatgcccgtcatgatcagctgtaccccgatgaggttcgtgtcggcaaatttgatgagctgcatcagcgctgtgttgaccagcgtattggtatcgatgtgcgtccggatgatgtccttatcagccttgctgaccgtcagggcagcgtgacctccacgcgggccatgaacttcatgctggagaacaacccagatatgttcatgctatggatgggcggcgataacctgtccaacctgctcagccccgacctgacaatcgccagtccgttcgtcatcacgatggtgatggaggccgaagaccaggtggcgactcagggggaagccacgcgcaagtatctcgaccgggagaaaaaagcgaactctccctatgccaccctgtttcccggcgtggccaaacaggctaaagagtggaaggagatccgcgagcatctcaacagtaaccagacctgtatagtccgctattactataacgtcaccacgttctgtccggatacggatgaggatgcgctggtctgcgaacagcaggtcattaatactttcaagaagaacggcatagacctgttttccccgacctatatgcagttccgtaactggatagcgatgatccccttcattcatgcggaaggactctgggaagacatcaaaatgggcggagccacctgccgggcggagagtatccaggccgtgaatctgctgccggtggtggccgacaaccggctgtgtcaggggggattgttgacgccgtcctaccgcaatcagctggcgttcctcgatatctacggggacgggatgggcaacaccaactacaacatggcggtcaccggcacatcaggtgcaggtaagaccggtctggtacagcctatcctgcgcagcgtgctggactccggcggtatcgcctgggtgtttgacatgggggatggctacaaatcgttctgcgagaacgtgggtggtacataccttgacggcaagtcgctcaaattcaatccgtttgccaacatttccaatatcaatgagtccggggaacgtatccgtgatcagctggcggtgctggcaagcccgaacggcacgctggatgaagttcaccacagtctgctgctgcgtggggttcaggaggcctgggaagcgcacagggaaaaggcccgaattgaccacgtagtccagaagctgacggccatccgtgaggatgataaataccagaactcgccgggtatcaccaaccggctggatgaaattatcgaactgctcggtaagtactgctcctggggaatttacggcgaatactttaacagtgacgagccgtcactgaccgatgacgcccgctttatcgtcctggagctggggggcctgcaggacaagcctgacctgctggttgcggtgatgttttccctcatcatctacatcgaagacaaaatgtaccgcacgccgcgcagcctaaagaaatgttgcaccattgacgaaggctggaagctgctcaactttaaaaatgagaaggtcggtcagttcattgaaaccggctaccgtacggttcgccgccaccgtggcgcgttcatcaccatcagtcagaacatcaaagactttgacgccgatgatgcctccggcgcggccaaagcggcctggggtaactctgccttcaaggttgtcctcaaacaggatgcgtctgagtttaaacagtacaaccagaaccgtcccaaccagttcagcgagctggagcgcagtgttatcagcaagttcggtgatgccaaagaccagtggttctcttcctttatgctgcgcatcaatgatacctgcagtttccatcgtctctttgtcgatccgctcagtcgcgcgatgttcagttcaaagggtgatgacttcgaatttatccgccagtgccgggaacagaacatggatatccatgacgccgtataccagctggcacaacgtaacttccctgatgagatgcgcgaactggaagcgcttgcggaggccgcttga

SEQ ID NO: 375047 - DNA, 432 bp, Salmonella enterica
atgaaaacggaacaggttaacgacactcaatcaaaacccacaactgccagaaaggcactgactcaacgtgaacgccagaggcgccgctgtctgcgtagcctgctgctggttgccgccaccatcctgtgtattaacgctgccgtcacgtcggtgctgattagctggcgtatgccagtggtggtgtcatttgatatgaaaaaaacgctggatcagttcactgaacaggctggcgctcagtcactggatgagcctcagactaaggcacttaccgaacgatttatgaccagccttaatgcggagctgcaggactggcaggtccgtcatgatgcactgatcctggttacgcccgcagtggtcagcggggcgggcgatatcactgatgagattcagacaggggtggcacaccgaatggcggcgggaggcggcaattga

SEQ ID NO: 375048 - DNA, 639 bp, Salmonella enterica
atgaaaaaagggctgctggcgctgttgctgatttccggcgtagcacaggcaaaaaatctggggacatggggggaaatgtaccccattgctgagcaggacatgctcactaccatccagacacgcctgaaggcaatggaggccagtggtgaaatggcccgggagcaggaagcattcaaacagcgtgtcattgaaaacactctacgccctaaaccggttgaaggactgacgctggctcaggagaacaccacgcactatatcgatccgtcgctgacggttagtgaagatctgaaagaccatcaggggcgggtgttcgcccgtaaagggcaggtgattaacccgctggataccgtcccgttcaccgacacgctctattttattgatgcagataatccgcaacaactgtcctggatgaaagcgcagaaacccggaacgttgacttaccgcgtcattctggtcaacggcgatatccgtgaggcgatcaaagccctggacacgcggatttattttgaccaggacggcacgctaagcaggaagtttgaactgaaggctatccctgcccgggtgacactctcagaagaccgacgtcgtcttcgggtagatacttttgccctccctggtccaggagaagcccatgaatag

SEQ ID NO: 375049 - DNA, 1002 bp, Salmonella enterica
atgaataggtcacttattttgttactcatggcttttgccttcagctggtcgtcagtgagcaaggctgccactaccagcgcttccgttgagtgcgaggggcgttttgtaaacccgatcaccgatgtctgctgggagtgcattttccccgtaaccattggcaatgtgcccgtcgcaaagggacgtcagccggatacgccgaatcctggcatgcccatccagttttgtcctatgggaattttttaccgtgtggggctggccataggctactgggagcctatggctctgactgatgttacccgttccccttactgcatggtgaatctgggcgggttcaatatcaacgtgggtaatgtcggtaccgggactggcgggcaggagaacagggcaaaccccggcgcgttctaccatgttcactggtacaaatatccgctgacgtactggctcaatatcattacgtcaatgggctgtcttcagggaggagacatggacattggatatctgtctgaacttgatccgatgtgggacagcagctctctcagcatgattatccagcctgaagccattctgttcggcaacgtgattgcgcaggcggcctgtgcggctgatgccgccgcaagtctagtgcatatgccgctggaccccctgttctggtgtgccggtagccagggaagtatgtacccctttaatggctgggtatcgaatgaattcagcccgatgcagacctctctgcttctcagtgaacgaatggcattcaagcttcaccgtcagggcatgatcatgaactccgttggggctgatacggcggtctgctttgaatatccatctcccatcattccgaaaagccgctggcgttatcacctggtcaataaatatcccgatgcagggcagtgtcatccgctgggccgaagcgtgacccgctgggaaaccggcaagaacatgcccaatgaccgtcgaaatttcgggtatctcttctggcgtaaacgcaactgcgttttcctctaa

SEQ ID NO: 375050 - DNA, 369 bp, Salmonella enterica
atgtttgtgagcaaaaaaaagtatgagcttgtcctctcccgctatgaactggccgcttcccgcgccgaccaggctgaacaggtactcgcacaactttacggtatggcgctgaaatatggtggactttacaagtgcattctcgaatgccgtgaagcggcaatggccgtgactcaacctggacgggaaagcacaaaactgactacggagcgactggcctttatcgacagaggattaagcgatttgcttccattcctgacgcaacagatgccggacggagaaaggctgatgtggaatgacatgctgaacggccgctctgctgcaatggcttatggcccggaactccaacagccagaggaggaaaccctgtga

SEQ ID NO: 375051 - DNA, 615 bp, Salmonella enterica
gtgaacaaaacactgattttcctgttcgccctgttgaccacagggctggctcaggccacagaacacacggaaaaccgtcaatttatcaaggaacagctcaaactggaccgtcagcgatttcagtctctgcaaaccccggatttcctgaagcaggcacgtccggtagcgccgcaggatcagtcatttctcgacgctcaggcacagcaattccgtcaatccatgcagcctggtgagcgccccgttgatgctgctctggtttttgtttcattctcaatgccccctgatgaactgaaacagcgcgttcaggacgcggcagcactgaatattccggtggttatccgggggatggttaacggcgacatgcgggccacagcgaatgctgtcactggtctggtaaaagagagcaataccggaggcgtgcagatagacccaaccacctttcgtaagtacaacattaccgctgtaccggtactgatcgtcgcctgcggaaatcagggcgataaagttgaccgccttcagggtgatctcacgctgcatcaggcgctgaagcgcgtggcagaagagggggactgtgcgcagaccgcgaaaagcctgctgggagaggaggctgaatga

SEQ ID NO: 375052 - DNA, 1830 bp, Salmonella enterica
atgaaaaggatactccctttactggtggctacggcatcggtctttatggtgcaaccgctcatcgctaacgagcagtttaatcagggtatgcagcaggggaaagcgaacaaaggacagggggctgatgccattcagggatttaagcccgctgaagtcatcccgggatacacaacatccccctctgaaagcggatactacggtggggtgacctcatcgggtgtggatatgacatccccaggttctgcagcgttaaacagttctgaggccgggaaaactattacggaatctattcttaatactcctgcaaacaacaaaccatcgctggatgcgccgtttatttccgaggggctggatatgcaggcgaaagcggaaaccattaccggcggcggttttgacggatgtgtggatcagcctgcgagttttaccgaaatcaccacacatcagtgtctgcgggacacgaaaattgagcagtactgcacccgcaccgcgaccattgtcggcgactggaaggaaaccacagaggttaaaacctacacccttaccgcctttaatttcagccgttccggaaagcagattgtgttcagtgtggcagctcctgaagctggcatcatccacagtgcaagcctgaatgtgaccacccaaaattatctctggaattcccgggccagctttatgaataccacgttcaatctgggctggaatgacaccattgcactgggaggcgcgacagggatggtgctgaccaaaggacagactctcagcgggacaagctgcagcgggaacggcagctgcaccggtacgctggataatgtcatctataaccagttcgtcgggggcagctctcgtttcacgctgacgctggtgatgcaggtgaaaagccgtgaatgggtaccgcgggtagagtggtcagaaagctgcccgttcagcaagtctgaaggcgcaatgaccggttctcagtgcgtggagccgggaggcacccggtccgtcgttgttgagggaaaaacctacagcattcatcaggactgctggaaatggcaagacacctacctgacccagaccgagacagaaggaacctgcggggagtatatgaaggactccgcctgtacggtgacgcgcagccagtgtgcagataccgttgatggtttttgtgtgagtcagcaggtgacgtactcctgtgaacggaagaaaacgggtaacgggcagatttgcggtggtgagtttttctgtacggacggtagctgcgcgcagggccagaccgggaccagcaatatgtttggtcaggccgtctccgcgctggccgccgtagctgctgcaggcgaagatgtggctgaactgaacggggagaacgtcagagcattcactggcgaggccaaatcctgcaaaaagatggctgcgggcttcaataactgctgcaaggattccggatggggccaggatgtggggctgtcgagctgcagcagcgatgaaaaagcgctgggcaaggctaaagagaaaaagctgacggtctatgtcggggaatactgtagtaaaaaagtcctcggcgtctgcctcgagaaaaagcgcggctactgccagtttgattcaaaactggcccgtattgtccaggagcaggggcgtcgtgaccaactgggcgttggcttcggcagcggaaagtcaccgaactgtcgcggcataacagtggatgaactgcagcgcctcgattttggggtgatgaacttcagcgatttttacagcgacctggatgccggcagtgaaataccggaagaccaggcgttgctgaaaaaagcgcaggacatcattaccgaaaaaatgaaggagaacgcaccatga

SEQ ID NO: 375053 - DNA, 777 bp, Salmonella enterica
atgagatgtattgccggtgcgctagccctgatgatggcagtatcgctgcatgctgctcccgaggatgtgctggctcctgagtatgcccgcgaagagggatggcagtggtacaaccccaatgctgaagagaccgagcctgaaccggcggcgccgaccctacgggaacgtctggccagcatgacaccatctgagcagaaaaaggtgctccagcaggcaacacgtgaagcgctggacactgccattctgtatccctctgcggagaacttccgccgctttatgacactgcagaacttctggactgaccgggcaacggacttcacccagacggcgaaactggcccggctgaagtatccggagctggattacaacgtgaagcgcagccattacaacggcacggtggaagcccgtctgacggaagagaagaaggtccagagtgcggttatcagccaggtggctcagcgctatggcctgttctttttctaccggggcaacaatgccgtcgacaacctgatggccggggtgatacgggctttctgtgaagatcgggggatcagcctaatggccgtcagcgtggacggtaaactcagcgaccagctgccgcaaagccgtcctgacagcggacaggctgaaaaaatgcgtgtcacccacttcccggctacgtttctggtcgacccgaaaactcaccagtggcaaccccttgcatggggctttatgagccacgacgacctggatcgccagatggtcagcgtccttacccactttgcacctgactactga

SEQ ID NO: 375054 - DNA, 486 bp, Salmonella enterica
atggattcgctcagtctgccagaaaacggggcagcaataaccacagaccgtaatattcagaatacgtcacccgtctggtattcactgagtgataaccggaaagtgaaggtccaggactggaaggtggtgctgttcatgcagtcgacctgtccgtactgccgccagtttgcgccggtgctgaaagccttttctcagaagacgggctttgatgtctttcccatcagccttgacgggaagggggatgccgaattccccgatgttctgccagcaacgccggatgtgatggtggaatatttccagagtggcctgccggtggccacgccaaccacctttctgaccaacgtcaacacgatggaaacctggccgctgctgcagggtgccgcagaggcaggtgagttccgcagtcggctcaatgaggtgctgcgtatggcactggatcggcagtcagggaaaagcatgccactcaacgctcagggacaacaataa

SEQ ID NO: 375055 - DNA, 1362 bp, Salmonella enterica
atgcgactgaaaccgctctgcctggcttttgcgctgggcctgtacagtgcaggaacggcacatgccgggctgcaggatgacatgaattccttctttaatgacatgagttatgccagcaacaccacttcggcaaaagcctggcagggacaggccgcacgttatgtctccggaggctcgttttatgcgcgcactggcaacaagaacattcagctggtttctattagcctgccgtccattaacgccgggtgtggcggtattgatgtgtatctgggggcgttctctttcataaactccgaccagattatggcgtttgtgaaacagacgatggctaatgctgcgggctacttctttgaccttgcgctggaaaccaccgtaccggaactgaaggccgcgaaagacttcctacagaagatggtcgctgatattaaccggttcaatatgtccagctgtcaggcggcaaaggcgatggtcgacagcgtggcatcgctgtggggagagagccagcagaacgtctgccagtctgttggcgggcagaaaagtgtcttctctgactgggttgcctcccgccaggggtgtacttcaggcggcaaatacggctccgtcgctgacaaggccaccggcgcggaaaaggatcaggtactgaaggatattaacctgatgtgggatgcgctcggcaacagctcgctcagcagcaacacagagctgcgtcagttcgccatgagcatcagtggttcggtgattttcggcagtaacggcgaattgcgggttctgtcttcaatggcatcggaccgcagcctgctgacagcgatgatgagcggggggacggcaaaggtatacgtttgcgataaccagaataaatgcctgtccccgaccctgaataacgtgacgatttccgcagacaaatcccttattaagatggtgcaggacatgctgaccagcatcgagaacaaggccatcaccgacacaccgctgacggaaaaagagaagcagttcatcaacagtacctccatccccatcctctcctggattgtggaccagtcgtcactgagtgtctcgcagtccctgttcgcccaactgacggattacatcgcggtcgatatttatctgcagtatctggaagccgtaatgaaggtggttaacggatcgcttgccaccaaagattacccgggcgccaacatgaaggcgctgaaaaatggcctgtcagatgccagacaggcccttaactcgctgcgtatggaggtacagattaaggaggatgcccttatctccgcgcagcagcaaatccgctttatccgccagcaggtctcctcaaagatgagcgatcgtgtgctgggtaactaccagttcagcagggtgaattga

SEQ ID NO: 375056 - DNA, 2895 bp, Salmonella enterica
atggccgttgatacgatttacaccgttgccggcggggcgtggtttcaggatacgctcaatggcgtggcggcattttttaacagcagagccggagactcactgattgctatggccaccgccgtatcggtgattgtcggggcggcaacctatatccggacgcgcaatattatggacctggtcaaatgggccggattttatgtcctggtgattgccgttctggtcggggacaagcggaatgtgcagattattgacctgtctgagccagcggctatctatcaggtggataatgtccctaccggccttgcagcccctgccagcctgatcacccgtattggtgccggaatggcacaggtttacgattttgtgtttgcccgtccggacgcgctgacttacagcaaaaccgggatgctgtttggcgcgcagctggcggcggggagcagtgatttccggttctctgagccggaaattcagcgcatgttctctgattacgttcataactgcgtggtgggtgacattatgctgaacaacaagtacagcattggcgacctgatgaattctacagacccctacgcgctgatattcagtaaaccgagtccgctgcgtggtctgtatgacaaaaaccgcaattttctgacctgcgagcaggccgcaaccaaaataaacactgattcgagtgatatcagtggcaggaatatgtttccgtttctccagcaggtgcttaaccggatgcacggtttcacgaaccaggtctttggtccgacaaacggtgccagtacggcactgttcaccgaaatgctgggcgacagctataactattttcacggcaattccatgacatccaccgaaatcatccgcaagaacgtggtgatgaatggcctgcgcagtggcctggagagcttttcagcacagaatggcgatacggccggactggtgaacaccgcaacgcagacatcgatggcaaaaatgcgcctgtctcaggcgaccagtgcgtccatcgctgccaacacgctgccggtgatgcacagcgttctgctgggcatgacaatggcgctgttcccggtgctgattgttctggccgtggtgagttctctgtcctggaccattatcaaaggctacatctacaccattgcttatctgcagatgtggcccattctgttctccatcctgaaccatgcgatgaatttctacctgcagggcaaactcaacgggacggcggtgacgctggccacgtttgaccaggtacagaatacctattccgatattggcaccacagccggctggctggcgctgtccatcccgtttatcgcatggggtatggttaaaggtttagggcaggtggtttcgcaggcggggaactatctgggacagaccctgcagtcagcctccacacagtcgtcttcgcaggcgattgacggtaactggtcctataacaatatgacgacggggaatgtacagggtaataagtgggacaccaactacagtcatcgtgaaggtcatatgacgaaccagcttgagagcggggcgacgaaaaccctgacttcgtcaggtcagcaggtgttcaataatgctgagtccatatcaaaactgccggtggatatcatgctgggtaaaacggcgacaagcagttggcagaaacagcaacgcgatgctatcagcgaggctcaaagcctgagcaacagcttgtctcagacctcaagcctggcgacatcgcagttaaaccagtggagtcagcaacgtggtaacagcgataccactgtttcgggtacagacacgtcgactaacagcaatctgaccaaagcactgaacaccattcagtctattggttcccgctatgcccgcgatgaaaataccactctggcggaaggtattcgggcagcggcaactaaaagtcaggatatgagtgccggagtaggcggaagtgctcagatttctttcgattctgaccgacagattctggggaaagttgctggactggctaccgggatgaaaggctcggtagaagggcatctgaagaccgagtataccggcagaagtggttcttcgcatggtaccagttccgatctgactcatcagggaggtacaagcaaaggattcagtgctcaggaactgaaggatttccgcgacgcaatggacgttgtgacgtctacccgcgtgacggacagcggcagccataccgacaatgcatcatcatcccttgctaaccagctgtcttcgacattctccagtctgaagagccaggcatctcagtttaacgatgcggttacccgaagtcatgagtactcacagctggccagctatgcggaaaataacagtgccaatattaaccagaactactctcaggagtttgttggttatgtcacgagtaagcaccctggggaggctgacaaaatattgtcagatgccgccagccctgaggtgcgtgcagaacgagacaggctggtccaggaatttgtggaagaccgcatgaaaccacagttgctgcaggaatttgaacaaaataaaggacgaaccggtgacggaatcggcggtgtcggcgcatcatcaggtcacgtagatcttcaggcggaatacgctcagcagcagagcagcatgaatgcaatggccagtgcgaatggagtgaaacaaggtaatgaggttggtgctgatgtacaacatcgccgcaatagtgctgaatctcaggtcgatattgataaaaattctgtgaactcatccggtagttctgccaggacggattacaatcgcttgcagaaagaacatgaacagggtaataaaaactttaatgacgctaaaagtgccgaggaagatagacaaaaatgggacggtgggagtggcaaaggacgtgaagagttaaataagataaaggatgatttgcaaaaacggattgataagtcataa

SEQ ID NO: 375057 - DNA, 576 bp, Salmonella enterica
atgaaacgttcagatttagaaaaggatgcagcttttatattgaaatcaatgagcgaaagggattatgagattccgtcaaataaaaatattttgaaggttgtttttaactggttgaagtatgtttatgggattcagattgtttttgtttttctggcgttctttatttatagggagcctggagatctcaattttcaaatgcaaaaaattgtctcccttattttgctttccgcaccattcatgttggttttcactctcgtttttattggcgcgacatacagtaatgtgtgtatttccctgattttaggggaggaagttaaaaatgaatcaatcctgctgaggattatcaagaaaaaaataggcttttacagtcgtttgttactcattgttaattccttgattggtttcattttactgtgggccggtgagccctttattgctgggttaggtatctcatggtttgtgacttttctcatgagtgctctctttttacagggttcattatcccgatatatgactcctgcggtggtcagcagtttgtcaaaagtgaaagagttgctttctgcctccccaaaataa

SEQ ID NO: 375058 - DNA, 738 bp, Salmonella enterica
atgaaaaataatgttaaattgatgacaatgatagccgtattatcttctgtccttgtgctttccgggtgtggcgcgatgagcacagcgattaaaaaacgcaacctcgaagtgaaaacacagatgagtgaaaccatctggctggagccttcctcacagaagaccgtatacctccagataaaaaatacttctgacaaagatatgtccggcctgcaggcgaaaataaccaaagcggttcaggataagggctataccgtgacgtcctcaccggacagtgcatactactggattcaggctaatgtcctgaaggcggataaaatggatctgcgcactgcgcaggggttcctgaaccagggttatgaaggtgcaatagcgggcgctgcattaggggcggggatcaccggttataactcgaactctgccggtgcaacattaggtgtaggtctggcggccgggcttgtggggatggccgctgacgcgatggtggaagatatcaactatacgatggtgacggatattcagatttctgaaaaaacaaacgccagcgtgcagaccgataatgtcgctgctctgaaacagggcacttctggttataaagttcagaccagtacacaaactggtaatcagcataaataccagacccgcgttgtgtcttctgctaataaagtaaacctgaaatttgaagaggcgaagccggtgcttgaggatcagcttgcaaaatctgtagctaatattctctga

SEQ ID NO: 375059 - DNA, 1380 bp, Salmonella enterica
atgagcctgaatcctcgtgacttaacgcagggcggtcaggtcgcattcatgcgcctgaaaatgttcctgcaaataaataacctgatttcttattacgttattatggggacggttttatttggcatcgccgtcctgcttatgcgaatgagtattcagaatctgaccaacggcattatttactggtttgtccgggtaatgtcgccctttactgaaaaaatggttagtcagcctgtctataccatccgttattacgaacataacctgcagtacagcgccagacaggtactcagcgacagttacaccatgtactgcggccaactgctgaaacaggaactgtttattgccgggtgtgctgcgctgctggtcgcctttttggccacattcgctgtgtactggtatctcggtcgtactggtcgtaagcagagcgaggatgaaatcattggtggccgcgtccttagtgagtcaccaaaagatgtcgcccggatgatgaaaaaacgcggagaagcatccgatattcgtatcgatgacctgccgctgaagctggattctgaaatccagaacttcgccatgcacgggacagtgggatcgggtaagtcccagctgatgcgcaagattttgaagcaactgcgcgagcgtggtgacctggtcattatctacgacaagggctgcacctttgttgaggatttctatgatgaatcccgggatgaagtgcttaatgctatggatgcccgctgccctaactgggatctgtgggaagaatgccgcacgatatctgaactggagaacgcaagtagtacacttatcccggccagcagcggtgaagatcctttctggcagggtagtgcacgcaccatctttgcggaaggtgcagagcgcatgcgcaaggacgaagaccgcagctataacaaattcctgcgcacgttgctggccattcaacttgatcagttgaggacattccttgccggtacgcctgcatccactctggttgacggtaagattgaaaaaacagctatctccattcgcagtgtgctgaccaactacgtcaaggcgatgcgttatctgcagggtatcgaccgcccgggacgagagaaattcaccatccgtgaatggatgaagggccaggccgataaatcgaagaatggctggttgttcatcacctctgatgagcagtatcacgagtccctcaaaccgcttataacgatgtggctaagtattgctgccactagtttgcttgcgatgggggaaaaccggcagcgtcgtgtctggtttgtatacgatgaaattccgtcactcaataagctggtcactctaccccgcatcattgctgaaggtcgtaaatttggcggctgttttattctgggctttcagaacgaggcttag

SEQ ID NO: 375060 - DNA, 798 bp, Salmonella enterica
atggaggaaatctacggcccgaaagcggcagcggggctttttgacctgctgaataccaagttcttctttcgctcaccgagcgcccagattgcgaagtttgtggaggaggatattggggaaacccgccgtctgaagttcagcgaacagaccagctttggtcatgaacaggtgcgtgacgggatttcttttggcaaggaagaagaacgtgtcagcattgtcagctactcggatgtacagtccctgaacgacctgcagtgttatgtcaccctgccgggaagctacccggtagtgaagttgacaatgaagtatgaagcgatgcctaaagtggctgactccctgctgttgcgggacgtgcagaccagtctcgaccagactattgaggacgagctggtacgccgtacagaggaggaacgccgcaacctggatgggttgtttaaccccgtgaagccggtagctgaaaactcactcccggagacaacaccacaaaccgacatccaaccgaagacatcaccatccatagctcctgcaacggccacggggaataccacttcttctaccgatacaactgctggcagccctgtcactaccggaggtacggaacgggatattgaacaggatttaccacaggatattcccccgggcctgaacagttacggtgaagtggtggatttcgcagcgtatgaggcctgggctcagacctcacaccagactcgcgatatgacccgcagggaagaggtcaacatcaaccatgcgacagataaaacgcatgactttgatgacgacagggaggtgttctga

SEQ ID NO: 375061 - DNA, 5298 bp, Salmonella enterica
atgctttccatttcttctataaagggtgattcggcctattacagtcatgaagacaactactatgccagcggttcgctggagtctcgctggctgggagatggcgcggagaaactgggcctgaagggcgaagtcgccaacgccgatatggatgcgatacgtcagggcaaacttcctgacggcaccgatctctccagaatggtcaatggcgtgaataaacaccgcagtggctacgacctgaccttttcagcccccaaaagtgtgtcgatgatgatcctcattggtggtgatacccgcctgcttgatgcgtggaaccgcagtgttgaaaacggcatgaaagaggttgagaagcttatcagtgcgcgcatcacggacggtggaaaaaccgacactgttctgacgggaaacatggtggccgcactgtacaaccatgatacctcccgtgctttagatccgcagatccatacgcatgcgctcgtgttcaataccacgtttgcggaagacaaatggcgggcgctggccagcgatacacgtatgaaaaccggattcggtgaaaatctgtatgcgctgcaggtggcgatcggaaacctcgtactgcaacccttcagacaggaggcggaaaaactcggttatgaaacggttgcagccggtaaaaatggtctctgggagctgaaagatgttcccgttgcgccgttttcgacccgaagtcaggctatcagcgaagcggcagggccggatgcgtccaaaaaaacccgcgacgttgccgcacttgatacccgccaggctaaagcctgggccgacccggacctgctgaaagctgagtggcgccggcggctgaccgatgaaaaattcgatatcgataactacatcggccaggtgcagacgcgggccgagccaccaggttctgctgtcggcggtacagagggtattcgggttacaggccagcctggtggtgcgtcttccgctcagatttctgagtcagacgtgcagaaagccgtcagtgacacgatttcggcgttgtcggagaagaaggtccagtttacctggtcggaaatgctggccggcacggtcagtcgtctgccgtcagcgtcaggcctgtttgagcaggcccgtgccggtattgaggccgcgattgaagggcagcgtcttattcccctggaccgggagaagggcatcttcacctctgatatccacctgctgaacgaactcagtgtccatcagctggcgcgtacggccgttgcggagcaaaccgtgctggtcttccctgaacgggcacaggagcgcgatatacctgccggggatgctgtctctgtgctgtcgcaggataaaagccctgtggccattctcagcggtcgcggaggtgcgcagagcctgcgtgagcgcacggaagacgtggccatgatggcccgcgcacagggccgtgaggtgatggtgattgcagccgacggtcgcagtggccagtttctgtcagaaagccttcatctggcaggtcatgtaatgctgcgctcgcagatgaatgctgacaccgtattgccggtgcagggcacggttatcgttgaccgggcggaaaggctgtcactgaaagaaaccgtgctgctgcaggaaaaggcgctcagcgccggtgcgcagctgatttttatggatacggagaaccggcagggaacggggaatgctttgtctgtgctgaaagaggcggatatcccgcagtaccggttttacggcacgcagctgccggaagtgcggctggtcagtgaggcggacaaacgcagccgttacagccagctggcgcaggagtatgtgcgcctgtcagcagaagggcgggatgtcgtggcccaggtgaccggtgcccgggaacagcagcagctgacggaggttatcagggatatacggcgtgatgcgggtgagctgggccgggagcaggtgacactcagggtactggagccggtgtggctggacagcaaaacccgtcatcagcgcgataattaccggcccgggatggtgatggagcagtgggacgctgagaagaaaacgatgacacggcacaccattgaccgggtggcagaggccactaacagtctggttctgcagggggaagacggcagtcgcctgaccctgaaggtgacccaggtggacggcagctggagcctgtaccgcagccggacactggaggtttctgaaggggaccgcgtcagggcgctggggcgagagctgaagggagccatcaaagcgaaagagaagttcaccgtggcggggctggaaaatggtgcggtacggctgcgcagcggcgaccgggaactgcgcctgcccactgaacgggccgtgaagctgactcatgactatgtggaagggaccggggcgggtaccagcgcgtcgcgcacggtactggccgcagtcggtccgcgagggcttaataaacagaccctgaacgcgctggcgcaaagtggcagcgacatccggatttatacgccgctggaagcccggcaggcagcacgcaaagtggaaagtgtgtctgccgtgcgactggccagtgaccaggtccgtcagtcgaccggcgaggcaaatctggataccgccatacaggccagccgtgagcgtctgatgtcggatgcagagcaggccgtcagtctggccatcccgcgcgcgcagcagggacaggtacacctcagtgaaattgccctgctgtcagaagcggtaaaatccggccagcggctggctgatgtccggactgaaatcgcccggcaggtgaacagcggggagctgattcagctggattcggtttccggggcgggaaacagggtgcttgttccgcgtgtggcgtatgagatggaaaagaccatcatccgccatattgctgagggtaaggatgctgtacagccccttatagcgctgacgcctgcctcagtgctggccggtctgacggcaggccagcgggaggccacacggacggtactggagaacaccgaccgttttatggccattcagggctatgccggggtggggaaaaccacccagttccgggcggtgatgggtgccctgaacaccctgtctgaatccgtgcgcccgcaggtcatcggcctgggacccacgcaccgggccgtgcatgagatgcgtgaggccggggtggatgcacggacgctggccagtttcctcagtgaaacccggctggccattcaggccggagaaacaccggacttccgcaatgtcctgttcctgaccgatgagagctcgatggtgggtaaccgcgatatgacagagctctatcagctggttgccgcaggcggaggacgaatggtctccagcggggactccgcgcagctgcaggccatctcaaccggtctgccgttccgcctggtgcaacagcgcagtgccatcgatacggtggtgatgcaggagattgtccgccagactccggctctgcgcccggcgattgaaagcatcatcgcaggtcaggttgatacatcactgcgccaggtggatgatgtcagcccgcaacaggtaccacgtcaggaaggagcctgggtgcccgggaattccgtcatggaaatccgtgcgccgaaaaaggaccaggagcaggacactcccgctgccgatggacagacactgacaccagagcaattgtcactggtccggactgacatcattgaagccatccgggatgactggatggggcgcaccccggaggcgcagcagcagacgctggttgtggcggaactcaacgccgatcgtcatgccatcaatgatgccattcatgtcgcccggcatgagaaaggcgatacaggtgctgaagaacgcacgttcaccgtgctggaaccgctccgggtgcctgacaatgccctgcgtgcggctgaaacctttgcggagtataccggcgccgtggccatgatgaacgagcgctactggactgtggcggaggtggatacgcaggacgccgtggtcacgttgcgtaatgctgacggggagtcggtgctgatctctcctcagcagaacactgcacaggatatttccctcttcacgcaccgcgacctgacgcttagtcagggagaccgggtgcgctttacccgctcggacaccgaccgcggctatgtggccaacagcctgtgggaggtggccgggttcactgacgacggggccatccgcttccgccagggggaccaggagaaaatcgtcgacccgcaggccacgacggaggaccgtcatattgaccttgcgtatgccctgacggtgcatggcgtgcagggggccagcgagcgttttgctatcgcccttttcggtgctgaaggtgggcgaaaactgatggcatcactggaatctctttacgtgacgctgtcacgagcaaaagagcatgttcaggtatttacggacaacctggagcgctggcggcagctggttcagcagtctgacggcggaaaaactgctcacgacctgctgcaccaggagagtgaccgggatgccgccactggtaaccgtctgctggccaccgcctcacgactggataaaacagcgctgggacgcagggttctggcggaaaacggtcttgagggtgaaacgatggcccgctttatcgcggcaggtaaaaaatacccgacaccgtatgtggccctgccggcgtggacccgtcacggaaaagaagccggggcactgctgaccgaaatccgcattgaggatgacgggatgcgcgtggtgctcagtgatgagtcccgactgcgtggcggtgaagatgcgcaattcgccggactgcaggcgagccggaatggtcagacactgattgccgacagtgcggaagccgcgctgcagctggcgcagcagaatccggaaagtggggtggtgatacgcctgcacggcgaagaacggttgctcaatgccgctcgtctgaccgggggacgtatcacggagcctgacgaggtggcacggacagtgcgcagtgtggcggaggttgaatcggcggcgaaagcggaagaccccattacgctgcctccggacgagcagcagaaactggcagaggcacaggaaaaagcggcccgggagctggcggagcaggcccggcaggaactgctgccggcagtgccgggtgaggagagcaccagaccagaacccctgttgtctgctgatgaagaacgtcgcctgcgtgacggtacagcgcggggagaacgtgagctggatgaggccattcaggaagcggtggcggacggtcggggtatccgccagcaggtgcacgaacagatgctgcgtaccgagcgtgagtggggggtgaatgtaccggaaaaagacattgagctggaaaaaacgctcggtggggactga

SEQ ID NO: 375062 - DNA, 567 bp, Salmonella enterica
atggttgccggaataatcatcattgccattttgctcgccggatttgtggtattgctcaggcaggccggttcagcccggtatccacttttgcagagactgcgtgagaaagggattcgtccgggcagtactgtactgttgccgtgtggccgaccgtcttttgtcagtgccgggcggttaatgactgaacgcgagcagcgttttctgcgccggctcgacagggtgaccgatacccgccagtggcggctgtgcccgcaggttcgagtggccgatatcgtcagagttgcgcccgaccgtaagtccggaagccgtgaatggtggcagttgttccgcctggtatcgcagtggcactgcgatgtggttatcacggaccgcgccgggcgaatcattgcggcagtggagctggacgaccgttcccatcaggcgccgaaacgtcagcggcgtgacctgctgctggaagaggtactgaaacaggcgggtatcccgctgctgcgcggcgatgatgagcagcaactggctgagcgcgtcagggcacacctttgcgcacaacgaccggaggctgcagcatga

SEQ ID NO: 375063 - DNA, 732 bp, Salmonella enterica
atgagtccggggaaatctgttgccctgcatcctttcaggccgctcctgaatttctccgcgctgcagcgcgatgtcatccggatggccgcatttatggcaatggtgggggaccacatcgccactgcctttcagctggatatgcccttactgaacatggccgggcgttgtgcattccccctgtttgcgctggtcagcggctgtaacatggcaggcaaaaccctgcgtcagcacagcctcaaccgcctgtggctgatggcactcctggcccagccgggttactggctggccttcagggaagccggactcatgtggtggcaactgaatatcctgttcgccttcgccgttgtcatgcaggtgacccgcttcctgcaggcggcaaccgtgcttaatggcgttgcagcgttcacggccctggtgggatacctgccgcttagctccgccagttacagcatacctggtctactgatgctagccggtgcgctgcttatctggcaggtccgggactcactgcagccagccctgtttgctgtctggctattgctggtcgccctgcttaatgcccggcacggtgatgtgatgatgctctccggcgtactgctgacgttgactgtgctgttttgtgtgcacgggctggtaccggctctcggacgacgcctgcaggccggacggtggtttgcaccagcgtatgccctccatctgctgtgtattgattttctggtcagtattctctga

SEQ ID NO: 375064 - DNA, 564 bp, Salmonella enterica
atgcaaacaatgcctaaaaaacatatgtgccgatggcttctgcccggcctgctcggtctggttctgtgcacgccagtaccgaatacttacgcagccaccgttgaggcaggattttctccagaaggtacagctctccagctggttcttaagacaattgagaccgcgcaacaggaaatccgtctgatgggctattccttcacctctccggaggtggccagggcacttgtcagggcaaaacgtcggggtgtagatgtgggcgtggttctggactggaaagctaataccggaaggaacaacaacgccagtaaagcagccatgaacattctggttggtgctggtatcccggttcgtacagtcagtgcctacaaaattctccataacaaagtgatcgtcgttgatggccgcaacacccaggtcggctcatttaacttcagccgggctgcagaccgttcgaattcggagaacgtgcttgtcgtctgggatgacccagtcttagcccgcagctacctgaaccactggacatcccgctgggcgcagggaacggactggaaacagacgtactga

SEQ ID NO: 375065 - DNA, 1041 bp, Salmonella enterica
atgcgcgcgcttatttcgttcttttttttgataatcattgtctcgaatgtagaaacggcgttagccggaaccgggctattgcactggacgcgcgccgatcgggcgattccctggcgacaaacggcaattagtgcgattaaaccctggaaactgtgtgcattataccccagcctgaaagattcttactggctgtccgtcaactacgggatgcaaaaagcggccaaattttatggcgttgatttaaaagtgctggaagcgaacggctatcggcaactggcgacacaacaacagcaaatgatgcagtgccgggagtggggcgccgacgcgattctgttggggagtagcaccgatcgttttccggagctggaacggtatgccggtaatgtgccggttattgaactggtgaatatgattcacgatgccagtgtcgcaacccgtgtcggtctgccgtggtttcagatgggctatctgccgggacgctttctggcgcagtggagcaaaggaaaaacgcttaacgttttactctttccggggccggatgaagccggcggcagtcaggagatggttgcgggttttcgtcaggcgattaaaggcagcgcaattaacattgtggatatcgcctggggcgataacgacattgaagtacagcgaaacttactccaggagatgctggagcgccatcccgacgccaatgtaatcgccgggtcggcgatagcggcggaggcggcgatgggcgaagggcgaaattcgacgaccccgctcacgaccgtctcattttatctgacgcatcaggtctatcgcggtttaaaacgcggccatgtcctgatggcgctcagtgatcagatggcctggcagggagaattagcgatagcgcagtcgattaaggttttacaggggcaaccggtgcctgaaaatatcagcccgccggtgcttattttgacgcataaaaatgccaacagcgcacacgttcgtcgatcgctatcaccgccgggatttcggcccgtctatctgtatcaatacacctccgaggctaaaaagtag

SEQ ID NO: 375066 - DNA, 402 bp, Salmonella enterica
atgaggtttattaattttgttggtgtgactatctttgtaatgtctttttctacattctcacaaaatgtgagtgaatatagtaaagagtacactaattgtatatttaagacagtaaataaccccatgtcaacgcagtgcattgacgcagaaataaatgcacagaacaagtcaatagattcattcattggtaagcatagcgatataacctctccagaggatggtaatattgtagaacttaagttatttactgataaccagcgtaaatacatcgatgggaaatgtgacttatggctgaagactggagggcaaaacggaatgcttttaaataaacagtgcgttttggatgaaacaatttcgcttaaaaagttgttgtctgactttgttagttctgttgatggttaa

SEQ ID NO: 375067 - DNA, 141 bp, Salmonella enterica
atgaaacgcacttttcaaccgtctgtactgaagcgcaaccgttctcacggcttccgtgctcgtatggctactaaaaatggtcgtcaggttctggcacgtcgtcgtgctaaaggccgcgctcgtctgaccgtttccaagtaa

SEQ ID NO: 375068 - DNA, 960 bp, Salmonella enterica
atgaagaaatccataaccagtctcgaccttaatctgctgttatgtctacagttactgatgcaggagcgtagcgtcaccaaaacggcgaaacgaatgagtgtaacgccctctgcggttagtaaatcgttggcgaaactccgggcatggtttgacgatccgctgttcgtcaatacgccgctgggcctggcgccgacgccgctgatggtcagtatggaacaaagtctggctgactggatgcagatgggtaatcaactgcttgataagccgcatcatgaagcgccgcgcggtttaaaatttgagttggcggcagagtcgccgctgatgatgattatgtttaattcgctgtcgcaacagatttatcagcgttatccacaggctaccattaaggttcgcaactgggattatgactcgctggaggcgattacgcgcggggaagtcgatatcggatttaccggacgcgaaagccatccccgttcgcgagaattgctcagcctgctaccgctcgcgatcgattttgaggtgctgtttagcgatttgccatgggtctggctgcgggaagatcatccggcgctgcgcgaaacatggaatctggacatttttttgcgctacccacatatcagtatttgttgggagcaaagcgatacctgggcgctggatgatgttctgcaagaaatgggacgcaaacgccatattgccctgagtctgccggggttcgagcagtcgctctttatggccgcccagccggatcacaccctgatagcaaccgcgccacgctattgtcagcactacaatcagctccaccagctaccgttagcggcgcgccccctgccttttgatgcgcaacagcgggaaaagctaatggtgccgtttaccctgttatggcacaaacgtaatagtcataatcccaagatcgtgtggctacgacaggctatcaacgcgctctgccgtcgcctaatctga

SEQ ID NO: 375069 - DNA, 915 bp, Salmonella enterica
ttgaaggcgacatcagaagaactggctattttcgtagccgtaattgaaggtgggagttttagccgcgccgcagaacggttgggacaggccaattccgcgattagtcgttcagtaaaaaaactggaaatgaagctgggagtcaatctgattaaccgtacgacacggcagcttagtcttacagaagaaggggaacgctattttcgccgcgtacagataatattgcaggacatggccgccgctgaaacggaaatactggaaacccgcaatacgcctcgtggcttgctgcgcattgatgccgccacgccagttatcttacattttctaatgccagtgataaaaccttttcgtgaacgctatccggaggtcaagctatcactggtatcctcagaaacatttattaatcttatagagcgaaaagtcgatgtcgcgatacgtgctggtacactgaccgattccagtttacgtgctcgtcctttatttaccagctaccgaaaaattattgcgtctcctgattacatcgatctttacggcgcccccaaaagcgtcgaagaattgaaacagcatgtatgcctggggtttacagaaccacttttactcaatacctggccagttgcctgctgcgacgggcagttgtatgaaattcatagcgggatctcctctaacagcggggagacattgaagcagctttgccttagcggaaatggtatcgcctgcctgtcagactatatgatcgataaagagattgcacaaggcacattggtagagttgatgacagataaacggttaccggtagaaatgcccttcagtgccgtttactacagcgatcgtgctgtcagcccccggattcgggcctttgttgatttcctcagcgaacacgtaaaaacagcgtcaaaaaatacaaccaaagggagctaa

SEQ ID NO: 375070 - DNA, 378 bp, Salmonella enterica
atgcttgaggtcgccgccggggcggcggaagaaaggcatttaagtaatattattttccggcatggctatgcagaaaaactgccttttgaagatgcgtcgtttgaggtggtgattaaccgctattccgcgcatcactggtacgacgttggtcaggcattgcgtgaggttaatcgtgtattaaaacccggcggcgcgttgattatgatggatattatgttgccaggacatcctgtacgcgatatttggctgcaaacggtggaggcgttacgtgatacatcgcatgtccgtaactattccagtggtgaatggctggcgatggccaataaagcgctgctggtgacgaataccatttattgctggagtttcactcatggataa

SEQ ID NO: 375071 - DNA, 852 bp, Salmonella enterica
atgtcagaactcaccatcaccaaacccgaagttttaaccgatcacaccgacgtgatttgctccaccagtattgaacgcatcatcaccggacgtaatagcgcacttaaacaaattgagacactgatacaacacgttgccgatatatcgacgctgaccagcagtatcggcggtaaaactgctctggactgggccatgaagcaggacttccgctgtggctgctggttgatggaaaaaagagaagcggcaatgaaagccattacccgcaatcgcgatcgcgatatatggcgtgacttaatgaagcgttcagggatgctttctatcatggatgcccagactcgtgaccagtggtacaacagtctggagaaagacgatattcccgctatcagtgaagaaaatatccttagcacatttaagctattgcatctgaataaaggtgaagtatttgaacgtggtgtgattaacgtgtttaagggtctgagctgggattacaaaagtaatagcccgtgtaagtttggaaagaagatcatcgtaagcgggctggtcaaatacgacagatggggatttggtctgaactggaactggggctggcagcgtgaccgcctggctgaccttgagcgcatgctgatgctcctggatggaaaacctgtccccgacaaccgcgccgatgtcacccgacgcctcagcgatcatattcatgagaacaggcacagcaaccgatatgaagatgagatgtttgcgattaagtattttcagaagggaaccgcacatatcacgttcaaacgtcctgacctggtagacaagatgaacgacatcatcgcgaagcactatccggggatgctggctgcgttatag

SEQ ID NO: 375072 - DNA, 363 bp, Salmonella enterica
gtgattattctgaccggatgtgttgcagagaccgcgcagcagaatgggcaggcgctgtcgccactcagcacgcatgcatttttactgcgctggttaacggtggcgtataagcgtaaacggtttccgcgtactattgcttacgatattgaagggttactgacgctggggcgcaacaaaggccttgctgccagtttgcttaatcgtcttgaatatctttggaactcctgcacaggccctgtttccgttcaatcggatctgtatcaactgacttacgctattgaacagcttaaaccacagggctggggcaaggcggtggtgagtgacggggactggaacaatgaagcgcttctggtccaggaataa

SEQ ID NO: 375073 - DNA, 498 bp, Salmonella enterica
atggccgacagtttccagaatgaagtgccaaaggcacgtattaatctaaaacttgacctgcataccgggggagccagcaagaaaacggaactccctttgaaattactggtggcgggcgacttcagtaacggtcaggagtctgcaccactgtctgagcgaaaaaaagttaatttgaataaaaataacttcgactcagtgctttccgaatattccccaaacgtcaatcttaccgttaaaaacacgctggctgatgacggtagcgaagacaatatcagtctgaccttccggagcatgaaggacttctcgccggaacaggtttcccggcaaatccctcagttgaaggccatgctttccatgcgcaatttactccgtgacctcaaggccaaccttttagataaccaggcgttccgaaaggaactggaaaaaattctgctcgacccggcgttaagtgcagaactccgcacagagctgtctgctctggccccgaaacagccataa

SEQ ID NO: 375074 - DNA, 1542 bp, Salmonella enterica
atgtctgtaaaaaatgagaatgcggccggtggcgagagtgtggtgctggaacgtcctgctgcaggtggcgtttatgcgtccctgtttgaaaaaatcaacctgaacccggtctctgagctgagtgcgctggatatctggcaggacgcgcaggcgatgtcggatgcgactgcggatgaacgtttaacggccggcatgcaggtgttcctggagtgcctgacgaaagcgggctcaaaggttgaaaaactcgacaaaaacctgattgaccaccatattgctgagctggactaccagattagccgtcagctggatgcggtcatgcacagcgaagaattccaggcggtagagagtctgtggcgcggcgttaaatcgctggtcgacaaaaccgattttcgccagaacgtgaaggttgaactgctggatatgtccaaagaagacctgcgtcaggacttcgaagacagcccggaaatcatccagagtggactgtataaacatacctatattgatgaatatgacaccccgggcggtgagccgattgccgcgctgatttctgcttacgagtttgatgcctctgcgcaggatgttgccctgctgcgtaatatatcaaaagtggccgctgctgcccatatgccgtttatcggttctgcgggtccggcgttctttttgaaaaattcgatggaagaagtcgccgccattaaagatatcggtaactactttgaccgcgctgaatatatcaagtggaaatccttccgcgagacggacgatgcccgctatatcggtctggtgatgccgcgtgtgctgggccgcctgccgtatggcccggacaccgtgcccgtacgcagcttcaactacgtcgaagaagtgaagggcccggatcacgacaaatacctgtggactaacgcctcgtttgcctttgcatccaacatggtacgcagtttcatcaacaacggctggtgtgtgcagatccgtggcccgcaggccggtggtgccgttcaggatttgcctatccatctgtacgatctgggcaccggcaatcaggtcaagatcccgtcagaagtgatgatcccggaaacccgtgaatttgaatttgcgaatctcggcttcattccgctgtcctactacaagaaccgcgattttgccgcattcttcagtgcaaactccacgcagaagccagctatctacgataccgctgatgccacagcaaacagccgcatcaatgcccgtttgccgtacattttcctgctgtcgcgtattgcgcactacctgaagctgattcagcgtgaaaacattggtaccaccaaggaccgtcgtttgctggagctggaactcaatacctgggtgaaaagtctggtcaccgaaatgaccgatccgggcgatgaactgcaggcgtcacacccgctgcgcgatgccaaagtggtggtggaagacatcgaagacaacccgggcttcttccgcgtgaagctgtatgccgtgccgcacttccaggtggaagggatggacgtcaacctgtcactggtttcccagatgccgaaagccaaatcctaa

SEQ ID NO: 375075 - DNA, 1338 bp, Salmonella enterica
atgaaaatttaccgcccactttgggaggacggggccgctctggccccgcaacagttccaacagcagacccgctggaatgagcacgttgccagcatggtcgcccggatgggggtttcttatccctggggtgtggtggccgcagagtttgatgatgccgcgcttgcgctgtctcgcctgaatgccacccgtctggtggtacgtttccaggatggcacgattgttgatacagatctggcagataatcttccgccagtctgtgatttatccacggcaagcggctctgagtctgttgacgtggttgtcgcactgccgctgctgagcgctagcggcggcaatcttgatagcgggcaggacagtgaacgcccgcgtcgctggaaagcggaacgtgtgatggtccaggagctggccgggcatgaaagcggtgaactggccattctgcgtaatgccatcacactgcgtttgtccactcaggaaaataccgcatacctgacctgtccggtcacccgtctggtgcgtaatgcgcaggggcagtggagccgggacccggctttcattccgccgatgctttccgtttctgcgagcccgttgctgaccactgaactgggtgatctgctggttcgtctgcaggcccgtcgccgtcgcctgatggccatgcgccgggaaagcaatgagcggatggccgactttgcggtcgcggatgtctccctgttctggctgctcaatgccctgaacagcgccgagccggtgctgacggaactgcttcagacgcctgagcgtcacccggaactgctgtaccgcgaactgacccgtctggccggcagcctgctgaccttttcgctggagcacgatgccggtgatatgccggtgtatcagcatgctgcacctgaacgggtcttcccgcctttactggccttgctggataagttactggaagccagcctgccatcgagggtggtcagtatccagcttgagcatcaggaccaaatctggaaaggctcccttcatgatgcgcgcctgcgcgaaggtgctgatttttatctctcggtgcgttcctccatgccgaatcacgagctccagacccggttcccgcagctgtgtaaggcgggcagttttgaggatgtctcggatgtggtgaacgtggcgctgagcggaatagagatcaaacctctgacgcatgttcccgccgcgatccctttgcgcttggagaaccagtacttctcgctggacctgagttctgacgtggcccggaccatgcttgaaatgggcagttgtaccttctataccccgcgttctctgggagaggtgaaacttgaactctttgcggtgctgcgcacatga

SEQ ID NO: 375076 - DNA, 651 bp, Salmonella enterica
atgaatacatcagaaatgagtcaaattgagcgtacgttctaccccggctggctgatggtcagtcagctccggggcggacaggaggtccgcgacggggaagggctctaccgccgggcgtgccgcctggtgcaggaggtgaaagccacgctgacggaggcgggctacagcgatatcagccgggatcacatggtctatgcgctgtgtgccctgctggatgagagcgtcctgaatcgcgggtcgacagatgacggttacctgacgtggcggcgcgatccgctgcaggcgcatttttttggcaccctgaatgccggtgaagaactctgggagcgtattcgcaacctgcttaaagaaacggcaccggacatggcggtgctgacctgtatgtaccgtaccctgcagctgggctttgtcgggcagtaccgggctgaagacgatgaacgacgtgaagatgtggtacgggcactgggtgaacgtgtgcctgcctttacgctttcgcaggatgcgccgattgtcgcaagggcttcccgtctgcgcagcggtcgtctgtactgggtttcctggattatcggggcggccgtactggtggtgctgtggttcttcctttcttcctccctcaccgaactggtgagtcagacggtcagtccggggtaa

SEQ ID NO: 375077 - DNA, 1725 bp, Salmonella enterica
atgcgtgatgtttaccggagtctgttaaccgccctggcgggcgtactggcactgtggcttatcctgggcttctggccgctgtcggtcgggagccgtgtggcactcagcctgctggtcattctggtgtgcggggcgatgctctggcgtcagcgccgggcttctcaggcacgagcaaccgctgtccgggaaattgtggatgaaaatctgccgccggaagattttcagggtgcggtgatccttgtttgtggcgacaacagcccactgtttgtgtccggctcccgtcaccgggaaacccgacagggctggtatctgtgggtgaaggatgcggagcagttgccactcctggcacaacacctgagcctggtgcgtccggcgctggcgtcacaaatctccgtcatgctggcggtggtacctgaacagcacacctccggcgatgattttacccagtctctgcggagctggcagcgtgctgtcgtccagtgccgtgcggcatttggcacgatccccccgctgtggactgtgacctgggtatcgccgtcggcggcctgtgtggaggctgagcctgtctggtttaccacggtcagtcagcggaccggcattcaggtatatcagccctgtcagggtaatgtgtcactgacggaatggatccgggagaccggatcagacggacgtctttcccgtctgagtcaggggctgtggctggacggtctgcttgcctggcagaacagcgcagtcaatgacctgctgtcggtacgacagggcgagctgccggtaatgaagccctgcgttcagggtatgtgcatggtgccggtgagcggtatcgcgggcaatctctggcaacagcacatcaccgctgtgacggcgctgccaccggatgccgccgtaaccaccgggccactgccgctgcctgaactgctgctgccggcgttaccgcgccgacggggtgtcagccgcaggatggtgttctggcgttatgccggattactgggcgggatttttctggcactggccatgctggcgtcctggatgaataaccagcgtctcatccgtaatgttggcgatcaccttgcgttgtatcaccagctgacggggaagcctgttgccccgaaactgcgggcgcagcagcgcctcagagccgatggtacattgctggacgactgggcgcgtcgcggggagccactgtgttatcgcctgggtctgtatcaggggctgcgcctggtgccgcctgttgaggccgccgtcagcgactgggcacctccgccaccgcctcctccggtcattaagaaaatcattcagggtccgaaaacccttcgccttgacagcatgtcgctgttcgattcgggcaaatcggcgctgaaagccgggtccaccagaatgctggtcaactcactggtcggtatcaaagcgaagccgggctggctgattgtggtgtcaggtcacaccgacaacaccggcaacccaaaactgaaccagacgctttcacttaagcgtgccgaagcggtgcgcaactggatgcgtgataccggtgatgtaccggaaagctgttttgcggtgcagggctatggcgagagccgtccgatcgcaaccaatgacaccccggaaggccgtgcgctgaaccgtcgtgtcgaaatcagtctggtaccgcaggccaatgcctgtcagatacccggcaaaaccccagcgtcatcgcaggatgatggcgcatcacaacacaatggagagtaa

SEQ ID NO: 375078 - DNA, 492 bp, Salmonella enterica
atggcaattcctgtttatctttggctgaaagacgacggcggcgcggacattaaagggtctgtagacgttcaggatcgtgaaggcagtatcgaagtggttgcccaggagcacaacctgtacatcccgactgataacaataccggcaagctgaccggtacccgtattcactcgcctttcctgttcaccaaggaaatcgattcgtccagcccgtacctgtacaaggcggtgaccactggtcagaccctcaagtctgcggaattcaagtggtacaaaatcaacgacgcgggccaggaagtcgagtacttcaacaccaaactggaaaacgtgaaggtggtgaaagtgaatccggtgatgcatgacatcaaggatccttctttcgagaagcataaccacctcgaaaagatcgagctgcgttacgaaaaaatcacctggacctacaaagacggcaacatcattcattccgattcctggaacgaacgcgccaccgcgtaa

SEQ ID NO: 375079 - DNA, 2649 bp, Salmonella enterica
atggaaaatccagccgttctgttacgtcgcctgaatccttactgtgcccgtgcgatggaaggggcggcctcgctctgccagacccgcgcccatgcggaaattctgcctgagcactggctgctgaaactgctcgaacagggagaaggtgacctgacggtgctggcgcgccgttatgagtgggatatagatgcgctgtggcaggatttgctcggctggctggattcacttccccgctctgttcgcagtcgcccgcagctttcagacagcattcagacgctgatgcaggaagcctggctgattgcttcgctcaacagtgaagagcagatccgcagtcatcatctgctgatggccttggtcgggaaacaaaatctggtgcgctgtgatggtctgtggccgctgctgacgctcggtcagagccaactggggcgtctgcgaccactgctcgatgtgcagtcagatgagcgtccggaagtgcaactggagaaggaactggcgcagagccacggtggagaggtggtgtttgttggccgccctgcaggtgcagaacttaaagacggtgagctgaacccggcgctacagaacgcgctggataagttcactctcgacgttaccgccaaagcgaaggaaggcaaaatcgacccggtatttggtcgcgatactgagatccgtcagatggtggatatcctctcccgccgccgcaagaacaacccgattctggtcggtgagccgggtgtcggcaaaacggcgctggtggaagggctggcattacgaattgccgagggcaacgtgccggaatccctcagacctgttgttctgcgtaccctcgacctcggtctgctgcaggcgggggcgggcgtgaaaggggaattcgaacagcgccttaaaaacgtgattgatgccgtacagcactcgccggcccccattctgctgtttatcgacgaagcacacaccattatcggtgcgggaaattcagctggtggcgcggatgcggccaacctgctgaaacctgccctggcccgtggtgaactgcgcactattgccgcgaccacctggtccgaatataagcagtattttgagcgggatgccgcgctggagcgccgcttccagatggtgaaggtcgacgaaccggatgacgacaccgcctgcctgatgctcagaggcctgaaatcacgctacgccgaacaccataacgtgcatatcactgacgatgcggtcaaagccgctgtcaccctgtcgcgccgctacctgacgggccgccagctgccggataaggccgtcgatttactcgacaccgccgctacccgcgtgcgtatgagcctcgataccgtacccgaacagttgacccgcatccgctcgcagattacctcccttgaaatggagaagcaggcgctgctggaagatattgccgttggcaatcagatccacggcgaacgcctgagcgggattgaacaggaggaggtacgcctgatagtcgaactcgatgatctggaatcccggtatggtcaggagctgaaacttactgaacagttactggaatgccgccaggacatctctcgccagagtgagactcacgcgctgcaacaggagctgaacggcatgcaggacggcaacccattgctctccgttgatgtggacgtgcgcaccgtcgccactgtcattgccgactggacgggcgtgccactgtcttccctgatgaaagatgaacagaccgaactgctgattctggaaaacgaaatcggcaaacgggttgtgggtcaggaagtggcgcttgcagccattgctcagcgtctgcgtgcggcgaaaaccggcctcacttccgagaacggtccgcagggcgtgttcctgctggttggcccgagcggcgtgggtaaaaccaagaccgcgctggcgctggccgatgtaatgtacggtggtgaaaaatcccttatcacgattaacctctcggaataccaggagccgcacacggtgtcgcagctgaaaggttcaccgccgggttacgttggttatggccagggcggcattctcaccgaagcggtacgcaagcgtccgtacagcgtggtgctgctcgatgaagtggagaaagcgcaccgcgacgtcatgaacctgttctatcaggtgttcgaccgcggctttatgcgcgacggcgaaggacgtgaaatcgacttccgtaacaccgttattctgatgacctccaacctcggcagcgaccacctgatgcagttgctcgctgagcagccggaagccactgaagccgacctgcacgaactgctgcgcccgattttacgcgaccacttccagccggcgctgctggcccgtttccagaccgtgatttatcgtccgttagcagagaccgccatgcgcaccatcgtggaaatgaagctcgctcaggtgagtaagcgtctgcaccgtcactacggcctgaccaccaaaattgacgaaagcctgtatgacgcgctgactgccgcctgcctgctgccggataccggtgcgcgtaacgttgacagcctgctcaatcagcagattctaccggtgctgagtcagcagcttttaacgtacatggtggcgaaacagaaaccgactttactgacgctggggtggagtgatgaagaagggattgggcttgaattttcaggtgcggctgaacgttaa

SEQ ID NO: 375080 - DNA, 570 bp, Salmonella enterica
atgaccattcatgatgccagcaaaaagaaaaagaaggacgacaagaagcagaacgatgattccgtcagaaaactgaccaccggggaagtcgccttagccagaacggtattcggcaaccggatcgattacgagaaggtgaaaattcatcatggcagttatctgccatttggattgcagaacgagaatgtggcaatgacgcctaatggcgaactgtattttcgtaccacgttatacagagaggatttttctcagacgctggatgaccttcagcatctcttcattcatgagatgagtcatgtctggcaacgtgccaggggaatgaacgtcatcggtagaggtctggtgagttggttggtcagctaccactacacccttgacggtcgtctgttgagtgattatccaatggaacagcaggcgcagataattgccgatcatttcaccttgcaggcgcatggttataaagcatggattacattacgaagatcgaatgacgttactttggatggagatatttcagaaagtgctatccggcaacattacaaagaggcgctaagagggtttccatggtga

SEQ ID NO: 375081 - DNA, 465 bp, Salmonella enterica
atggtgataaaaagatatagtgctctattttttagggggttaaccgtgcccttcgtttttctgctggcagggtgtcccggtaaaggggatcaacttcagcttgatgaaacgacacaggttaaattggttagtgatagcatttgtttccgcattacaaatccgcaggattatcagcctgcaattatatcgataaatctcagagggacgcccccgaagaaacaagggtttattgataatccatcactatcaatcagatcagagcaactatgtatccctccatcgttttatcaatttgcagataatgggaaatacatcgttgattttgttttgacctctgccggaaatgttgatgaaccaaggaagttcgttgttggtgtagggatagaccatggccaagtatataactttcccctgacggataaagaaatattaagaccatatggctcaattgaagtttctgaatag

SEQ ID NO: 375082 - DNA, 228 bp, Salmonella enterica
gtgccccggcataaagtcatgaagatttttatctttttaattttagtgatgacgggagtgctgtttcttccggatacgtgtttttacacattcgtaaagcgctttatccccattagtggcgacggcgaatacggcatgaacaattttgaaatgaccgtgttgctgatgaaaacccttgcctgcgccctcggggctggagccgtaatcacgctttttcgtactcgctga

SEQ ID NO: 375083 - DNA, 2514 bp, Salmonella enterica
atgagtctgacagatacgcttaagaacaccctgtctgcgctaactgaaggcggactgaaccgctaccgcctcgatattccgtcctgcacagcttcactggatgtggaagagtttaacggtagggagttcatgagtgagctctactactacgaagttatctttaccagcagcgaccagaatatcagttcagcgcaactgttgaccaggcctgccacgctgaccatgggaaccgggccactgatggggctgactgggcagaaagtggtgcatggtgtggtgacgcattttaagcgtatcagtggttcacgtgaccaggcgacgtaccagattattattgagccattcctgtctttgctgcgcaagcaattccgtacccaccgcttttttgtcaataagtctgtaccggaagtcgtcaccgaggtgctgcaggaacatggcctgaaaggctgggaatatgagttcactctcaaagctgactatccgaagcgtgaacagattaatcagtacaaggaaaatgacctcgccttcattgagcgtctgctggctgaagtagggattttttacttcttcactttacagcccgatacccagaccgaagtggtgcactttgcggataagcaaagtgcctggacattcggaaaatcgctgccgctcagcagcccatcgggaatgagtgataatgctgcggactcggtgtggggtgttaacgtccggcagaacgtggttgagcgctctgtcatcgccagtgattacaaccaccgtgaagcccagaatatcctgacctctgtaccggcggacatgacccgtggcgacggtgacggtgttacctatggtgaagtttatcactacctgccgcgtcatcttgaacgcggcgacaaaatcgcaccgtcagcggaaactggcaacttctgggcacgccttgaacatgagcgttttctgtctgtacagacgaccatcagcgggtgcagcaatgatgccctgctttttccggcccaggtgctgaccatcagtgaacgtgtggtaccgccgacactgccatcagaaacggacaacggcattatcattacccgcacgggctatatcgccagtcgtaaagatgccctgatcgtgatgtgggaggggatgccgtattacgagaaccgatgctggcgtcctgctgctaaaaagcgcccggtggtcagcggtaccctgatggcccgcgtcaccagcgccaaggagaacgatatttacgcctggcaggatgcatccggcatgtaccgggtgaagtttgatgccgaccgtgacgataaacgtcagggcatggaaagtatgccggtgcgcttcgccaagccttacgggggagacaagtacggcttccacttcccgctgatacagggtactgaagttgccattgcgttccatgaaggtgacccggaccggccgtatatcgcccatgccatgcacgactcccgccatgttgaccatgtcacggagctgaacagcacgcgtaatgttatccgcacagcgggtctgaacaagctgcggatggaagacaaacgcggcgaagagcacgttaaactcagtacggagtacgggggtaagacgcagcttaatttagggcacaatgtagacgcttacagggatcttcgtggtgagggggcagaactgcgcaccgaccggcatgtttccattcgtggtggtgccggggtgttcattaccgccgataaacagccgtttgccggcgataagatgctgtcgatgcgggaagcgatatctcaactggaaaatgcattgagtattgccagaagtctttctgatgctgctgaaacggcagaggcattgccagcagatatccagagccaggttaagctgacggagtccctgaaagagctggcccggccaggtatggtgctgaatgcgccggaaggggtgagtatcaccagcccgcaggcagttcgtatggcatcggggagtgcaagcgtcgggattatatcccagcagaatacggacatcagtgcgctgaagcgctttacggtggcggcgggtgaagccgtgagcatgctggcccgaaaggccgggatgaaactctttgcggctaagggcaaagtggaaatccaggcgcaggatgatgcgctggaggccattgccaaaaaggatgtcacggtgaccagtacggaaggacggattgagatcactgcggcgaaagatatagtgctgaaaaacctggatggctcatttatccagataacgggtaagaacatcatacttggctgtgaaggtaatgtgctgtggaaatgtgctaatgcgcagaaaatgggaaccgcaaactatacctcttctgtaccggaatttcccggtggatacagtgaatattttgttgcgcatgacgaaaaaacaggacagcttgctccgaatacgcgctatcgcattacgaccagtaaaggcgatgttttttccggcataacggattcagacgggaatactgccgaaatattcacggctttatctgacaagatcaaagttgaacttggataa

SEQ ID NO: 375084 - DNA, 2226 bp, Salmonella enterica
atggggaatacagcaaccgttcatggcagtggcaaaacagggatgcaggcaaagggcattaaagccagccatgtatcaggtacccgtctttattttcatgctgacagtgaaacatttctggctgttgatggtgatgaattggaacaggaaagtaatgccctgaatagcctgttaggccaccaagttgatacgcagatgcgtattgatgatttaactttgcagtgcaccagactaaactgggggcaaattagtgaacgtaccgccctgcaaactcaaatacaacaggaagcccagcgacttgatgatctgaataaacaattgaaagttaaattgacgacgctttcagcaacagaggaacttccgaagaccacactccttgataatagcagcaaaagtgctgttggcctgatggagttaatcgaagtccggggtggcatgaaaggtgctcgttacatttatgtccgttcagatcaaattgacagcaaatggcgacgttatccgcttgaagatagcgataaaaagtccggtggtaagagctttgttatatcagagtcatatactgacaatgagggaaatacaagggcaagagaaaagatcgattacgataagctgaaaacgcagataagcaaagtaaaacccaaaatgctgaaggctgagcaggatttattagaacagcacacaggtgttcttggacaatgggcgagggatattaatgacagcctcaaacattccccttatcagggagagagattgggttttgatgctcagtctcagcttatgcgctggacttatggagcaggtctgacggaagaattaaatccgtttgaagtagattttcgtaatcaaggtaaaaaggtaaaaaaagaagctgtcaccagcggaaaagcaagtgcatatgcaagtctcgctctcgctgagtctaaaagcaaattaaccctgtcacttccagacatgcatggtattacgatgacttatcccctgaagcccgaaatgggcggaggaatgggaagcctgggggtattacgttttgattttgaactgactttggcgggcagtgttggtgcaagcttaggcgttgagttgggtgtatcggtgaaaagtaactgggcaaaaggcgtcccaggctcttcaggtgatggaactgctcccgctcccggacaacgtaaaattgatattagccaggtggtgaaagagccggaagcaacaggggaattaaccgtctttgccggggcccaagcatcagcaaacctttcaggggcaatcaaatggtgcaacccggagaaaaacaaagaatatacctatcttgcgaaagtatctttgggagcaactgcccaaatcggagctggctggagtggcacgttcagattcagttatgaagatggaaaagtacaggttctggcacgtggcgggatgtgctggggcggaggagggaaaggaagtgttgcttttgatatcgatggaatagcgataattaccgattttcttccttgcttaacatatatgctacgcaatgctgactacattaaactgtctagtactgtgatccgtgatggggatttttatgcgttctgtgcacttccattattatccacaatgtatggggttaatcttttggtggatagcgcgtggagtcaaacagacagacttctcgataatcttcgagatagttgggaaataaaagaacaaagagtgaggcttatgcaggagattatcgacactcagggagagtgtttgaaattctcccctcctgaaagcaaaggcgcagcaattgcttctttaatagaacatggtttttgggatgaattcgctagccctgcctcgaatgcacaaactgattgtgagggattagttatgtttagcgccagaaaacgtgccgttttattgtgccttcgctgggttcaatccaaacgtgagtacgaaaatgtaatgcagcacctctctaaaaattttgtagctgttggttcatggcaaggaaaccaacaaagtgttgcggattttcttgctctgggggaacagtcgcgagtttacggctctaaaaacatcgtgcctaatgcatccgaaataaatatattacccagccattatgctaaaaatcttatggatatttggtccagtttaccaagcacagaggaagttaatgggactgaattgcataaattaaaagaagtttctccagtgctaatgcaaagttgtactcgtgtaattgtgggtagtcaggagttgtga

SEQ ID NO: 375085 - DNA, 855 bp, Salmonella enterica
atgaataaatatagagcattgattactttgtcactcattggaactattcttgttggatgtgataattctaaaaatgatactaataaacaacaattagccaacgatattgtcaattccatggtgacagttaaaggggggcggtttcaaatgggggattttgggccgcttgttggcgaaaaactaccttttagtcctggattggataataaaccattgcattgggtcgagctttctgattttaaaataacaaaaaacaaagttacttggagggagtttaatgtttggttgaatttaaataaaaaagaatataataaatactataaaaaaataaagggtagaaaggttgaagatgaatatgataaaaaaattctacgcaatattggtgataattaccctgcatcagtgagttgggatgacgcaagcgctttctgtaaatggattgggaaagtatcagggaaatctattactttacctaccgaggctcaatgggaatatgcagctcgtagccgaggtaagttttttcagtttgctaatagtgacaatcaatataatcctgacgatccagatgataaacttaacttcactcatgacatggctcctgtcggttcgtatcctccaaatcccttaggtttatatgacatgatggggaatggaaatgaatgggtgaatgactggtatgctgaagattattataaaaactcacctgaaaaaaatccgcaaggaccagataaaggtgacaaaaaagtgattcgaggttatttgggctccatgtttggattgtatgatattacacgagggaaaagtgaacatgattatgaaggtcctggtgatggttttcgttgtgtagagaattaa

SEQ ID NO: 375086 - DNA, 267 bp, Salmonella enterica
atgtccaaaggatttgtattactcggagataaaacaacacatggtggcgaagttatttctgcctcttcgaccatgatcgtgaatggaaaaaaggtagcacttgttggcgacgagattaattgtcctgtcgaaggacatggtatcaatgccattatcgaagggtcaccggaatggatatctgatggcaaacaagttgtcgtcgatgggtgcgaatgtgaatgcggctgccatgttatctccagtgcgccggactgttcagtaggataa

SEQ ID NO: 375087 - DNA, 1158 bp, Salmonella enterica
atgagctgggaacgccagaaagccactatcatcgcagagccggaagagccatcaaccatgttgtggttgatggcctgtctcgttgcaataatcaccggagtgctcctttttgttctccatgccaatcagtttctgggaacactgcaaaaatttaatctctggatcgtagcgggaagcccactctttctctggttagtgatgatttgcttacgaagctggctgtataaccatgcgatggacaaacatcagtttgagtccgatgaagcggaatatgcgcagcaacaatggactgactgggcaggacgctatctggcggttctgtacagcagggtgatcctgcccgctgaactcacgcccgcgcgctttatacagtctcctgctgatcttgaacagagcaatgcgcttggcaggcgtatcgcgctccccccgggagaaaatgtgttttcggcccttcttggtggccttgatgaatcactcatacaactctgtgctgatttgccatttggggtaacactgctcactgatgcttcggatcccgaagagcatttgcagaaggctttttctgccgcctggatccaacatttcggcctcacgctctcagcacctttactgacgatcctgaatacccgctccttttcgtcggttgaagagcggatcaaaacgccgacgctggatgtcgagttgttgttggtccatcagacgcaggggggcgacgtttacagtgatgcgctggcagccctgttactgacctctgacgatgtggccaccaaataccgcttcgatcatcacgcccgtctgctacggcccatgtcgatcgagccgacagaagatctgagcctggcctttgatacctttttatccactcagtcgcaggctatcaaaacagacgtgcttctcggggacggtaccgcgtggggcaaggtattttccacgctgctgggcagcgctaaaaactacgaaggccactggaaacctcaacagtgtcactggctggaagagtacgcaggacgcagcggccccttctcgccgtggattatggccgctgtcgccagtgatactgtggcactgacggggaactgcctgatgctttctgataataaaaaacagcgatttatgaatatcgtcacaacaggagagcaggcgaatggcaaaggatag

SEQ ID NO: 375088 - DNA, 3408 bp, Salmonella enterica
atggcaaaggatagttcagcgtggcgtggtagttggggaggtctcggctttaccgcgataatcgctgctatactggcatgggccatctggtcgcatggggatgcaattggcctgaacagcgaaggattaaaaacattgggtattgtcggggcgatgatcctgttgttgttaattcgtcatggcagggctatcggattagcgctcaaacaacgctggtcacgttttcaggctgaacgtaagaaagaactgccaaccagtgaaggtcgcgttgagcagaccctgccgcgcaacgtcacggtcgacaccatccgtgaagccatgcgtaacctctacggtcggcgctgggggcgtaaaactcgcatcctgctgataaccggtacggccgctgaagtggagcaactgactccgggccttacaactcagctctggcaggaagaccgcggcacactgttgctgtggggcggtgacctcaatacgccaccggacagtgcctggctgaccgcgctgcgcaaactgcgccgtcgcccggtagatgggctggtgtgggtcacctcggcctttgaccagctctcagcaccagggctggcgccgccgctgccggtaccgtctgaaagcaccatggattccctgtctcacgccatcagcgcacgtatggaagcgcttggctggcagaccccgctatatgtctggtccctgcacccgcgagctggtaagccggaaggacgggttgtacaggcgaccggctgtctgttgcctgccggttgtctcaccgaagggctggcagagcaactctccgccctgacgccagatctgacctcactgggcctgcagcagacctgcggtgaagtgaaacataacttcttactgacgcttgccgaccagctcattcgtgagccacagagcgtgaccacaccgctgtcggtgatgctcaatccgtaccgcccgctgccgctggccggtgtggtgttcagtcagccctccgccggcgctgaacgtgccgtggcgcaccactggggcatggataaacgctgggatgttttacctgagtctgtccgcacgcttgctgccgggctgcgcccgcgcaagccgggcattccatggcgtaaagtgtttgtgtcagtcgctgccctggcgatggtgggctgggctgtgtggatgggcatcgcgtatgtcactaaccgcagccagatagatggcgctaatgtacaggcctcgacggctgcccgacagaatcagcccctggcgcagcgtctgcatgcactgtctgaactccagaaaaccctggctcgtttgcaataccgttcagagcatggcgtgccgtggtacgaacgggccgggctgagtcagaataacgccctgctagccgcactctggccacgctatcaggacagcgcactgccgctgttgcgggatgcttctgcaaaccatctgcaaagacagattaatgcctttaatgcactgccgccggacagcccgctgcgtgagcaaatggcaaaaaacacctatgaccagcttaagctctacctgatgctggcgcgcccggaacacatggacgccgcctggttcagttctgcgctgcagcacgactggccaaagcgtgatggcgtgaaagacggcgtctggcagggcgtggccccgtcgctactgtcgttttatggcgcacagttggtgacgcatcctgagtggaagctccgtgccgatgaaaacatggtcagccaggcgcgctccctgctggttcgcctgatgggcgtacgtaacagtgaatcaaccctgtaccagaagatgctcgctcaggtggcgcacctgtatgccgatatgcgtctcgaagatatgaccggggatactgatgcatcccgtctgttcagcacccccgaaatcgtaccaggtatgtttacccgccaggcctgggagcaggccgttcagcccgccatcgaaaaggtggtgaaggcgcgccgggacgagcttgactgggtgctgactgacagcaagcgtcaggtgaataaacaggatgagacctcgccggaagcgctgaaaaaacgtctgacggagcgttacttcgccgattttggcggtgcctggcttgagttcctcaacagcctgcactggaaccaggccgctacgctgtcggattccattgaccagttgaccctgatggccgatgtgcgtcagtcacctctggtggcgctgatgaacaccctgaacgcgcagggacgtaccggacagaccggcgaggcgatttcggattcactggtgaaatcagcgaaaaatctgctgggtggtgacaacaaggatgccattgaccagagcgtcggtgttcatggtccgctggatgcggcctttggcccggtgctggcgctggtggacaaaaaccgcacaggggcacaggaactgagtctgcagtcctatctgacccgtgtgacacaggtgcgtctgcgcctgcagcaggtgaccaatgccgctgacccgcaggcgatgacccagaccatcgctcagaccgtattccagggtaaagccgttgacctgaccgaaacccgcgactacggcagtttgattgcagcaggcctgggtcaggaatggagcggttttggtcgtacgatgtttgtgaacccgatggagcaggcctggcagcaggtgctgaccccggcggctgacagtcttaatgctcagtggcagcaggcggtggtggctgagtggaacagtgcctttggaggccgttatccgtttaacaattccagcagcgatgtgtccctgccactgctggccaaatacctcaatgcggattccggacgtatcgctcagttcctgcagaaccgcctcaagggcgtgctgcataaagagggcaaccactgggtaccggacagtatcaattcgcaggggctggcgtttagcccggcattccttaacgccatcaacaccctgagctatatctcggatgtggccttcaccgaaggcaatgctggcgtaaacttcgagctgcgtccgggtaccgccgacggcgtgatgcagaccgacataattatcgacagccagaaactgacctatgtgaaccagcttccggcgtggaagcgcttcacctggcctgcggatactgaagcgccgggcgcgaacctgagctggattagcacgcaggcaggcacccgccagtacgcggatattccgggcagttggggcctcatacgcctgcttgataaagcgagggtgaaggcgtatccgggcgtcggcagcagttacagcctgagctggaaagcccaggatggtcgcacactcaattacaccctgcgaaccgaagcgggagagggacctctggtattgctgaaactgcggaatttccgcctgcctgagaccatcttcagcactaccggcgtcgcagtcgtcagtgcagccagtgatgcagaggaggtctactga

SEQ ID NO: 375089 - DNA, 984 bp, Salmonella enterica
atgagcacccttaatactttgctgaacgcctgccagactgagcaggtgccactgcttgcggcgacccgtgagcgcgtggcgcagtgggataactggctgcagccgctgtccggttcatcgcccgctggtgaagatccgggctatgatgatgacttccagcagatgcgcgaggaggtcaacaagctctccggagcagacacagagcttatctgtcggctggctgaaaagctgctgactaccaccgccaaagacattcgcgtcgtgacgtactactgctgggcgaaactgcaccgggaaggcgagcaggggctggccgaaggactcgaactgctggccggtctgctggagcgctttggtacacaactgcacccgcagcgtgaccgcagccgtaaggcggcgctggaatggctggcgggttcgcgtatgatcgattcgctctccctgtacccggaagtggtcaggatcgatgcgatgcgcaccacaggggcgctgttgctgattgcgcagcttaccgaagatgagccggatgaaatacgccctgagctgaacgcgctatacggcgccctggaaagccgtctgcagaaagcgggtggtgtggatgcggtcgtgccgcagaacgccagtaccagcgaaacaccttccgcggcagaccacagcgatgccccggcaatcgggcgaatcacttccggccaggatttgctggcacaggcccgcaccctcactgaatacctgcgcgagcagcccgacggctggctgtcagcgcaccatctgatgaagagtctgcggcacgataccctacgggccattcccgcgccggatgcacaggggcgtactcgtatcgaaccgccaagagcagaccagcgcgcgttgctcaaacgtttgtatctgcaacagaactgggctgaaatgctggacgcggccgacagcaccttttcccgcggtgccaatcacctgtggctggatttgcagtggtatatccactag

SEQ ID NO: 375090 - DNA, 486 bp, Salmonella enterica
gtgacgctgaactggatccagcagagcgtgcttgataccactggtgggtgggacaacgatacgcaatcagtcccggtaaccgccggtaacgatgacattctggcactggagccggaagcggtggcgctggctgacagcgaaggcctggatgcggcgctgaattggctgcaaaaccgtccggggcttacaacaacacgtcagcgctggctgttgcgtctgctgatggggcgtatcgcggagcagtacgggaagaatgagctggcgatacatctgtttgccgaactgggagagcgtgccgaagaggtaatgctcagcgactgggagcctgagctgttgttcgaggtacaggcccgccatctgaaactcctgcgcctgaaggccggtcgcagtgaggctgacaaagtgcgcctgaatcctctgatggaacagttgctggctggactgattgcggttgatccggttcgtgcttctgtcttgtgcgcgtaa

SEQ ID NO: 375091 - DNA, 732 bp, Salmonella enterica
atgagcaaaaaatatttagctgtactgctatttttatcaaccgtgatattaagtgggtgtacttcaattctttgggccttgaataatccaaatgataacagcagacattctgaacgagttgaagcatatagtgatgaaatccagtctgcttttgaatacaaaaatgtcaatctgagtactaagtcgctctcaggcgcaacaggaagtattgagcttccatctgaaggtgtcggttttattggtaagaaaaatgtgtattttgtcactcagaatggcaatgctttgctatcactcaataaactaatgaaagatattccgcttaaggcaatcggaagcagtaagtatatagatattagtcttgtcagcgattatcagggctatggtaacgccggatttaatcagttcattcatgtaaaaactcgacaacccgcatcattattaacggttaaagaaagaacccagcttacggatgcctcttttcgattaaaagacggattctaccaacggtctgttgagatcagaggtgtgattatcaataagtcaagattcggaggagccataccgggtgaagcatctctcaatgacagctatcaggttcgtttttataggtacacatccagtgcaggtatggacggagggaagcttgcattcaatgtattgatgaccccagtcactctgaccggagacatcctgctgcttcctttatatctcctaatgatgatgaatggatga

SEQ ID NO: 375092 - DNA, 531 bp, Salmonella enterica
atgccagagaatctttggggttgctactggtctgcgtggaaaaaaagtttcatatatcaaggaggagctacccggcaggagttttggtcatttattattatcaacctgattgttttctttcttatcggtgcagggagctatttcctgctcgttgatgtcatggctgataaaaccagtgccggaggcatggtattggtttgggcctattttatttatcttcctttgcgcacatttggacctttgattttactctttccttttcttgcgcttggtgtacgtcgcatgcacgatactggaaagtccggatggtggtttgggggcctgatgctcctggaaatttttattttaccaatgttagctgtcctgatgtattacgtcctcaggcattttctggatgaggtttcaagccagcaggtagttaaaggtttcaccataagtgccagcattatggttgcttttgccctggtctggttatgtagtaaaccaacaaaaataaaacacccgatctcatcttctgattcgatgaattaa

SEQ ID NO: 375093 - DNA, 1764 bp, Salmonella enterica
atggaagatttaaccctgcgctatttcgatgcagaaatgcgctacctgcgtgaagccgcgaaagagttcgcgcaaacccatcccgatcgcgcggcgatgctcgacctggataaggccggcacacccgatccgtatgttgaacgcctgcttgaagggtttgccttctcaatggggcggctgcgcgaaaagattgacgacgacctgccggaactgactgaaggtctggtcagcatgctctggccacactacctgcgaactattccgtccctctcggtggtggcgctgaccccggcgctgcatgccatgaaaatggcggaagtggtgcccgcaggccttgagatatattcccgtccagtagggccgaagaacacagtctgtcgttaccgtaccacccgggatgtgatgcttaatcccctgggggtttcggacattaccatgaccactgagcctgacggtcgttcgctgttacggatgcgttttgcctgcagcagccaggcagactggtccggtgcagacctcagccgtctgagcctgtatctcggggcggatgcgccggtcagcagccagctgcatcttatgctgaccaaaagacaggccgcgctgtacatgcgcctgcctggccagcccgaccgtattcagcttgacgggtatttctcaccgggaggatttgctgaagaggacggtctgtggccgaaaggcgataccgccttcagcggctaccagctgctgctggagtacttcaccttccgcgacaagtttatgtttgttcaccttaacggtctggaggggatcacaccaccacacggtacggagtactttgatattgaagtcgtattcagcacgccgtggccatcagacctgccggtcgccgatgacgcggttcgtctgcactgtgtaccggtaattaatctgttcacgctggaagcggacccgctcactatttctggtcttgaaagcgaatacctgctgcgtcctaaacgtctgcaggacggacatactgagatttactccgtagattcggtaaccggctcaaaccggaccagtgacgcggagtatgtgcctttcagcagcttccgccacaagggagggatgatgcgccgtcatgcgccaccccgctattaccacacccgcattaagcggggtgtcaccgggctgtatgacacctggttgattctgggggggcaccagtgggaagaggaccggaagtttgaacgcgaagccgtgtcgttgcaaatcaccggcaccaatggacagttaccgcgccgggcgctgcagagcacactactcgaccgctgtgaacaggtagtcagtacatcactgacggtgcgcaacctctgcaaaccgacgctgccggtttacccgcctgcggaagaccgtttccactggcgggtgctgagccacctgggatccggtttcctgaacatgatgagtaccgccgaagtgctgcgagggacgcttgcgctctacaactggcaggaagatgaactgaacacccggcgtctggaggcgattcagcaggtggcgcatcaccgcctgcaacgttttgaacagggttacctgctgcgggggctggatatcgaagtaaccctcgacagcaacgggtttacgggggagggcgatatccacctgttcggcgaaatgctcaaccggttcctggcgctgtatgccgatatgaaccagtttaaccagctcaccctcattgttcagccagaaggaaaatgcatccggtggaaagagaatcacagtccgcgtctgcccggctga

SEQ ID NO: 375094 - DNA, 1095 bp, Salmonella enterica
gtggaaagagaatcacagtccgcgtctgcccggctgatagcgcaactgggggaccggctgccatatatcaacttttaccgcttctgccagttgctggagcagagccagccggacaaaccggttacgggcagtacctggcaggtacgtcatgaaccggtacgttttcggccacacccggggatgggctttccggcatctgaagtgaaagggattgagcagtctgagcattcgcatctgctgccgacggtccgcatcacgtttatggggctctacggcgtggagtctccactgccgacgcactatatcgatgacatcacccagcggcgggaagggtatgaagccacagtcgattttcttgatatcttcaaccaccggctgattacccagtactaccgcatctggcgtaaatattcatacccggcgactttcgaagaaggcggtaaggacaaaacctcgcagtacctgctgggactggccgggctcggaattgacggctgcacggacagtatcgcgactccggcgtcccgttttctggcgctgttgccggtgatgttgttgccggggcgaaccgcagaaggtatggcctcgctggtgcgtctgctggcacccaacacgcaggcgaagatctggcaccacgacaaacgccgtgtgccgctgaagagccccctgaccatgagtgtgcgtcagcctgtcaccctgacaaaccgtccggtgatgggcaattatgccactgacgcgaacagccaggtactgatgcgtctgaccacctccgaccctacggaagtacagggctggctgcccggcggtgaactgcacggtgacttaatggcgctgctgcatgtgtatcttgggtcacggcttaatgtgcgtctgcagctgtgtgtcgaccgtagcctgctgccggacgcgacaatgagcgctaagcctgaagctggcgcagtgcaactgggtcgtacagccgtgatgcgaccgctgaactcggcgaatactgccactcaccccaaaaccataaccatcaatcttggccgctatgagcgggtacaggaaaatattcaccgcagggagaccgatgaagatggcgattaccgctggtaa

SEQ ID NO: 375095 - DNA, 537 bp, Salmonella enterica
atggcgattaccgctggtaaatttcccttggctgcgctggccgcaggtatcactctgatactggcgggctgtgggctgactcaaaaagtcacggacggtacggttgccgtgactaaatcgattttttataagcaggtaaaaaccctgcatcttgatattcgcgcccgggaagccgttaacagcaatgccggcggcgtggcactatccacggtagtgcgtatttaccagctcaaagaccgcaaaacattcgacacgacggactacctgtcactgtttaaagctgacagtcaggctattaaagcagacctgctagctgagaaagatatccgcctgcagccgggcggggcggtgacggtcgatataccgatggaggacagtgcgcagtatgtggcggtggccgggatgtttatgtcaccggaccaggagaacaacacctggcgggtagtgctgagtcgtgacgaccttgacccggataaagcccgggtgattgaggtcggtaataaccaactaacgctaaaggcgctgaaagatgagtga

SEQ ID NO: 375096 - DNA, 453 bp, Salmonella enterica
atgagtgagtcaccccgtccgtcactgtatgaaacgctctacggcaatttcactggcggcctcgatttgcatcaggtcagcgagcagaaccaggtcatattgtcagtgcttgacaatatgcagcgcatcctcaactgccgtgccggcacgctggcgcatctgccagactatggcctgcccgatatgactaaaatcctgcaggggatgccgggtactgcccatgagctgatgggcaccctgtctgctgttctgctcaaatatgagcctcgtctgaaaaaaataatggttgtcctgctggagcagaacgtccccggcgagttgcgttatgccattgatgctgagctgaagggcattggcctcgtacgctatggcaccgagtttatgcccgaagggcgggttctcctgcgacacctgaagcaacagcagtatctcgataccacaacccgtctgtaa

SEQ ID NO: 375097 - DNA, 255 bp, Salmonella enterica
atgtcagtaaaattacagtttctcgaaaaattgcagaccagacagtctgcttcggctgcatctgtcagcaagattcaggccgatatcgcagactttcgcctgcgaatgacacagcttcaggagcagatggacgcgtggttggtgggtaccggactgaatgtggagacgctcaatacacccgttacggacctgctggttgagggggagcatttgatattgccaccctcgttctgcgtatcgacgaccggtctgtaa

SEQ ID NO: 375098 - DNA, 399 bp, Salmonella enterica
atgagaaaattaatcttccttgtggtctcaggaatgctgtttacggcacaggctgatgctgcgcgtggaaggcagccctgctcaggttcaaaaggcggtatagcgcactgcacatcggatggtcgttttgtctgtaatgacgggagtctgagtcagtctaagcgattctgttcaggggatggttcttctggcaccggcaatcagggaaaaccgtccaattccacccgcaaaacacagacgaataaagtgacagcggcgaaaaaacagaaaccgcaaagtgttgcagaaaacgacgaaccggtcagtgcacaaccccgacagccaacatgtgctcccctctacatggccaacaagcccggatacacccatttaccaatttgctcagggaaccagtattaa

SEQ ID NO: 375099 - DNA, 1245 bp, Salmonella enterica
atggcacgaagaaaaaaagatgacaatgcagcgggtattattctggttattattggcgtcattgcctggggtgtttatgtcgcggtaagagcattaattaatcttaatgagcgatttattgaatcagtgtcgaatcctgcaggagtcatcggtctgttctttggcttactgatagccactgcattgataatacgggtttttatttaccggggttttacgaagaaaacagcagagctcgaacgggccgtgtcggacctggcgcagaaagagaaagcctttgaagaaacggtcagtactgaagtggctcgtagaatataccaggaaaagaaacagctttccggtcagtgggatgactttcacaatgccagaaataaagcctcccgggcactgcagcgtattgtagattccgcgtataaattcaaagtcaaaacactgctttccggcactacggtaaataactggcaaagcaagtacgaccagctcaggaaggaaagagaggcttacgcgggcatcagcgagaaaatcacctttctggagcttgaagataatgccgactgggaaagtgtaaaacagcagtttctggataaggtcgccctgctggaaaaagcgcaggaagaaaaagaataccaggctgagctcaagcgtcagatgcgggaggaaaaacagcgacaggatgagctggaccagcagcagcgcgaggcggaagaggaggagcaacgccttgctgagcagcagcgtttactggaagaagctctgctcgccgctgaaggtgctcaccgggaagagctggaaagacagcgtctggagctggagcagaaaatccaggacgtgcatcagcagtatgaacgcgccaagtctatggcccagctcacgaagcagggacatgtgtatgtgatttcgaatattggctctttcggtgaaaacgtctttaaaatcggcatgaccagacggctggagccgatggagcgcgtgaaggaattaagcggggcagccgtgccgtttgattttgacgtccacgccatgatttcctgcgatgacgctcctgcgcttgaaaagacacttcacgactatcttgaaagctaccggattaaccgggttaatctgcgtaaggagtttttccgggttgagctcagcagaattatcgatgaggttgagcgtcaccatgggcaggttgaatatattgccgacccggtggcgctacagtatctgcagagtctcaaatatgcagaaagcgaagccgcataa

SEQ ID NO: 375100 - DNA, 1383 bp, Salmonella enterica
atgaatgacatcaccccgcataaaatcaagaccggcggcgacccgcgcacgctaccggattatgccgccctgcgtgatgaactgaacaaactgacgcatccggctcgcccagatgtgaactggcgctatgcggaaaaactctgtctctcactgtttgagcagaacggcgtagaattgcaaacggcagcctggtatacgcttgcgcgtactcaactggccggcttattcgggctcaatgaagggctgacgatactcgatgccctgataagccatcagtggggagcgctgtggcctcagccagtccatgcccgcatggaaattctcagcagtctgagtcagcgtctgcagcaacggatgcgctcgctcccgctgaattacagtgacctcagccagttgtaccgggcggagcaactgcttaccggactaggagaagtactgcagcgcctggagcttaagcatctgagccagctcgatacgttgcgtactttgatgcacaacagcgctgtccggctggaaaacagcgatggcataaacagcaccgggtcgaacattcagcctggtgttgtgttgcctgccaccatgatgaatgatgcgacaacatccacgagagactatgctggtggtccggatgaagatacgccagagagtagtgcagtgaagtgggtttacgttgcgcaatcggaacagcagccgaatgtggaagtgctggcagctgtgcccactccggtaaaaaaatggaaatccttcgtcgccggtatgtgtaccatgctggtaataggtattgtcgcagtgtggggctggcagtttcttcaccggccagacccgttacagactcagcttgctgcttcgctggttccgttccctgcacctctctcgtctgaacaactggatatgttgcgtcagcagactccgttaccggaggatcttattgcccagtcacagcagcagcttgcatggctggataaattacctcctgactggaatatcacttacgcaagaaaacttacagaacaggttcagtcgctgtggccggaacaggctaagcccctggtacagcagtggcagcaacagattaatatctcagtacttcctgtcgatacaatgaacggctggcatgaagggatgacacagcttcgggcacttgccgataaactgaatgcgctagatggtcagagaggaaaatacattaccgtcagtgagcttaaatcgcaggtctttggcatgctgacaagcttccggcagaccgtgccggtggaagaacagctacggcagttgaagttgctccctgaagactcgttgcagcgtcagcagcaggtccagcaggctgagcagcgactccgggcgcaaatatctactctggcacaggaaaaacagcgtgactga

SEQ ID NO: 375101 - DNA, 153 bp, Salmonella enterica
atgtcagataaaaagggagccccccgaaatcactgggtacagtggacggtcgatgaaattacgtttgtggaacaacactatggtcagctgtctgcccgtgaaatcggggagcggcttggccgatctgccaatggggtggcccggattgtttag

SEQ ID NO: 375102 - DNA, 1053 bp, Salmonella enterica
atgaaaaagagcactctggcaatagcggtgagtatcatcgcatcagcatctgttcacgccgccgaagtttacaataaaaacggtaataaggttgatgtgtatgggaaagttaaagccatgcactatatgagcgattatggcagcaaagatggcgatcaaagctatgtccgttttggttttaaaggtgaaacgcaaattaacgatcaattgaccggctacgggcgctgggaagctgagttcgccggtaataaagccgaaagtgattcgtcccagcaaaaaacccgcctggccttcgctggcctgaaattaaaagatatcggttcttttgactatgggcgtaacctgggcgtgctgtacgatgtggaggcctggacggatatgtttcccgaattcggcggcgactcttccgcccagaccgataattttatgactaaacgcgccagcagcctggcgacttaccgcaataccgatttcttcggcatcgttgatggtctggatcttaccttacagtatcagggaaaaaatgaaggtcgggatgtgaaaaagcagaatggcgacggcttcgggacatcattgagctatgatttcggcggcagcgattttgccgtcagcggcgcttatacccattccgatcgtaccaatgagcaaaatcagcagcgccgcggaatgggcgataaagccgaagcctgggcgacgggtttaaaatatgacgccaatgatatttatatcgcaaccttctatgcggaaacccgcaatatgacgccagtttccggcggatttgccaataaaactcaaaactttgaagctgttatccagtatcagtttgattttggtctgcgtccatcattaggatatgtgctgtcaaaaggcaaagatattgagggcgtcggcagtgaagatttggtgaattacattgacgttggcgctacctattacttcaacaaaaatatgtccgcgtttgtggattataaaatcaaccagcttgatagcgataacacgttaggcattaatgacgatgatatcgttgcggtaggattgacctaccagttctga

SEQ ID NO: 375103 - DNA, 1425 bp, Salmonella enterica
atgtctagtgatggcgctatcatcggaaacaataagagtattaccgtcaggcctttcgggattagagataagtttggttatttgtgtggtgatctggggacctgttttattcttgggttagtaaatagttttttaatgatttattacactaacgtacttggcatttccggagctattgtcggctcgctctattttgtgactaaactctttgatgcgtttatcgatgttggggtggggcgtttatgtgacacctccaggctgacggctcatgggcgctttaacccttgggtgcgccgtatgaagtatccgttctgcatcattgcggtcgtcctgttcctgccgtttgtgcaggatttttcgtatacggcgaaaattatctacatctgctgctcctattttatctacggttcgctgttatcgaccgtgagtattccgtatggcgcgatgtctgcggcgattagctctaatccggaagatcgtgtatcgctctcaacctggcgcagcgttgggtctgcaatcggcggcggggcaactggcttttttattcctatcctgatgtatactactctggtggacggaagccaggtgatttccgggcaacatttcttctggatcgccattggttgcggtgtgctgggtttcatcttcttatcgttgacctgccagctcacgacggaacgcgtgcgtgtggagagaaaagcgagtatgcccgtgtcggtgctgctgaagggattggcgcgtaataaagcgctgattgttttagtggttgtggatctgctgattgtgattaatcagggattgtctggtactaacatgacttacctgtttaatgattatttccacaacaaagaggccatgtctgtcgcgctgctttttacctttggttccctggttttgctggcgccatcggcatcctggctcacgaagcgctttggtaagaaggaagccagcgtcggcgcgctgctctttgcagtggcgatgtatctgattatgtttttcatccacattatcgacgcgaaagtctatttggttttcctgtttctggcgacgctgggggcggggttatttaacttgatgatttgggcgtttatgaccgatgtgtgtgactatcaccagtatgttactggcactcgtgaggatggcaccgtttatggtgtgaacttcttcgctcgcaaggtgggtcaagcgtgcgcaggagccattggcggttttatgctggccatcattggttatcaatcctcgtcaatgggcggcgctgtgcaaaccagcgccgtgcaggaaaatatttatacgatggcgaatctcttaccggcttcatgcctgtttttggcggcggttattctgatttatttctatccactgaaccgtaaagaaacgcttaaaatggaagaaacactgaataaattcaatggtattagtcagtaa

SEQ ID NO: 375104 - DNA, 681 bp, Salmonella enterica
atgaaattaaaatttttattattacttattccattactctctgcggccacgcacgcgggttatgttgattaccgtcatgaatattatgatgatggacgtaactatgatcgtatttatatgtcacaccgttttgctacaggttttggggtagcagtcgaagccatttctcgctccgatgacgcgcaatctaacgacgcgtggaacaatatggaaagtaacggcaacgagtatacagcaagctatcagtttacctggcaggggcttgtctggcagcctggcattgcgattgaaacgggcgataacatctcgatttataagccttatatccgcgtacagtataacatcaatgataactggtggaccgcgttccgctatcgccaggagtacatgcgcagaaacagcgatggtaaagatgaccgcatggtctaccgtcctgaagcatggcttggttataacgtcaataactggatgtttgaactcaacggtatttataaaattgccgatagcgaagatttatataacaacaaaaaagaagattacgaatataacttccgtgtagcttataagattggttcctgggttccttttgttgagatgggtaacgtctcttcgggctataatacgacgactacggacgatcgtcagacacgttaccgtgttggccttggatataatttctga

SEQ ID NO: 375105 - DNA, 126 bp, Salmonella enterica
atgaaaattgttgcaaaccacgatctatgcggtatgtcgctggacagcgagagcggggcttcatacaatcggcactatattgtgcgcgtttacgtgaagcgtcgccttgcaattcaggagaggtaa

SEQ ID NO: 375106 - DNA, 1473 bp, Salmonella enterica
atggacagattgacccccattcgctgttggcctgccattatttcgctcgtgattacgctgactatctggtttgttatcccttgtcctgcggatgtgacaccacaggcatggcagttgctggcgctgtttatcggtactatcgcggcgattatcgggaaagccatgcctattggcgctatcgcgattgtggcgattatgctggtggcaatgaccggcgtcacccatcccggtaagccttcagcggcgctgaacgatgcgctaagcggtttttctaatcaacttatttggctgattggcttatcgatcatgctgtcgcaaagtttgttgaaaaccggcctgggcgcgcgtattggctatagatttattgcgctgtttggtaaaagaacgttggggatcgcctgggcattaacgctggcggaaaccctaattgcgcccgtgacgccaagcaataccgcgcgtggcggcggcattattcatccggtgatgcgggcgattgcggaaagcctcggctcgcagccgggaaactgtgaaaatggttccacgggacgctatctcgcgctggtgaactacaacataaacccgatcagttcggcgatgtttgtcaccgcaaccgcgccaaacccgttaattgtcagtttcctgaccaaaggaacggacggggtcctgaatatgacctggggcatgtgggccattgccgctctgcttcctgctataatatcactggtcgtgatgcccattgtaatttggtggctctaccctcctgccgttacgcgtacgccggatgcgccgcagttcgcccggcaaaagttaaatgcgcttggtcctctctcgctggcagagaagattaccctggcggttttcattctgctgctttgtctgtgggccggcgttcctgcgatgctaatggggagtggctggaccgttaaccccaccagcgccgcattaattggtttatcaattctgttgctgacgggagtattaagctgggatgacattcttaaatgtcgcggggcgtgggataccattgtctggttcgccgcgctggtgatgatggctgattttctcagcaagctggggttggtgggctggctggcgaccagcgttggtagcgccatcaaccatctcggcgttcactggagtattgcaacgctactgctgatcctgctttacgtttattcacactacttttttgccagcaccacggcgcatattacagcaatgtttgccgcgttctttgctgcgggattgggtctcggcgcgccaccggcgctgcttggcctgatgctcggtttctcttcctcgttgatgatgtcgctgacgcactatggtacgggtaccgcgcccattatctttggttctggctatgttacgttggcggagtggtggaaaacgggactggtgatgagtgtgcttaacctgattatctggggtgttatcggcgctttctggtggcactggttgggatactggtaa

SEQ ID NO: 375107 - DNA, 1305 bp, Salmonella enterica
atgtcgctctggctttcacaccctctgtttcttccttcgctggttgttggcattactgtcctgctttgggccacctcattgctgccggaatttattaccgcgctgctcttttttaccgtagcgatggcggcgaaaattgcgccgccggatatgatcttcggtggttttgcctcttcagctttctggctggtattcagcggattcgtgctgggaatcgcaattcgtaaaaccggactggcggacagagcggcgcgtgcgttatcggccaaattaacggactcctggctattaatggtaagcagtgtggtgttactgagctatgctctggcgttcgtgatgccctcaaatatggggcgtattgcgctattaatgccgattgtcgcggcgatggcgaaacgtgccggaatcgcggatggcacccgcgcctggtatgggctggcgttggccgtcgggtttggcaccttccagctttccgccactattttacctgcgaacgtacccaacctggtgatgagcggcgcggcagaaggatcttatggtatccatctgaactatgtaccgtatttactgctgcatacgccgatactggcatggttaaaaggcgccgtattaatcgccctgatttgttggctatttcccggcgcgccctgtacgccgcgcgaggcagaagcgtctgcgccaatgagccgcaatgaaaagcggctggcgtggatgctgacggtggtgttgatgatgtgggtaacggaaagctggcacggtattggcccggcctggaccggtctggcggcagcggtagtgacgatgttgccgcgaataggttttatcagcggggatgagtttgccagtggtattaacattcgcgcctgtatttatgtcgccggaattctggggctggcgctcactgtaacgcaaaccggtattggtaatgcggtgggggagacattactgcatgttatgccattagatacgcaaaaaccgtttaccagcttccttgcgctcacggggatcacgacggcgctgaattttattatgaccgctaacggcgtaccggcgctctatacgacgctggcggaaagctttgcggctgcgaccggttttccactgttatcagtcattatgattcaggtgctgggctattccacgccgatattaccgtatcaggcgtcgcctattgtcgttgcgatggcgctaggaaaggtaccggcaaaggcgggaatgctactgtgtctggcgctggcggcggtgacgtatctggtactgctaccactggattacgcatggtttcgggtactgggcaaattatag

SEQ ID NO: 375108 - DNA, 753 bp, Salmonella enterica
atgttaaacatcagagcctttacgtatttttcgagaacgcgtcaaggctataatttaacagataaaaatagcgcttcacttgggacgaaccttgctgaaagggtgaatttatgcagttacagaaatattaaagaagagtgtcatgaggtaaacattaatttcatgctttccacgcagcagtgcgatgaactcacaaaactgggttgctataactcgcatgatatcattcgggacttatgcaatatctgtacttcgctggcaaacaaactaataatccaggcaactgcggtatcccacctttacaaggaggcgaatatcaggttagcacaggatatcgagacctatgtagcttcgagaatcaatgcagtactcgatgacgttcgtaatgaaaaacaaaaaaatattccatctaaagtgcgggctgagctggtgaggacagccatggtgaaaggaggctatgaaaaaatagtggaagggatgagtgatgaaaaattactcagttttgccaggcctggcctgacagccgaggttaacactttagctgatcagatgttacccctgaacgccagggtggttaactatttaaacaaagcaatcaagccgtcaatctgcgatcaaacctatgatgcgattgtttcacaccctgaaattaatcaaaggcacttgcaacaagaacattatatgccagttttagacatattgaatatagccaggctgcaggcagaagattggcttgaagagggcagagaataa

SEQ ID NO: 375109 - DNA, 321 bp, Salmonella enterica
atggccggtgaggccgataacgtgctggcgctgacgacggtctacgcttcaaaggctcaggcgatgcgtgccgctcaggcaaagtgggataagttgcaacgaggtgttgcggaattttcaattacgctggcgtttggtagggctgatttattccctgagacacctgtgcgcgtatcgggctttaagcgcgtcatagatgagcaggcatggttaatcagtaaggtgactcacagcctgaataatagtggcttcacgacgggattagagcttgaggttaagctctctgacgtagagtataaagcggaagatgttgatgggtga

SEQ ID NO: 375110 - DNA, 135 bp, Salmonella enterica
atgggcattataaatgatggccggcaggcaaagtatttgcgtatggtacggattacggtgacgaatgccagcacgttttacagcggcgttccatcggatgcccagcctgctctccgggtcatgcgatttttgtaa

SEQ ID NO: 375111 - DNA, 1374 bp, Salmonella enterica
gtgaccgctttttcaaccctgaaagttctgcccaccgcccagctcaataacctaaatgagttgggctatcttgagatgacgcctgtccaggccgcatcattaccggttattctggcgggaaatgatgtgcgtgtgcaggccaggaccggcagcggcaaaacggcggcgtttggtcttggactcttgcatcgaattgatgtcagcctgtttcagacgcaggcgttggtgttgtgcccgacgcgggaacttgcggaccaggttgccggagagctgcgtcgtctggcccgttttctgccgaacaccaaaattctaaccttatgcggaggacaaccatttggcgtgcagcgcgactctcttcagcatgcgccgcatatcattgtcgcgacgccggggcgcctgctggatcatttacaaacaggaaccgtgtcactggatgccctgcatattctggtaatggatgaggcagaccgaatgctggatatgggcttcagtgacgccattgatgaggtgatccgctttgcgcccgcgacacgccagacgctgttgttttcagcaacctggcctgagaccatcgcggcgattagcggtcgtgtacagcaacagccaatgcatattgatatcgatacggtagatgcgctaccggctatcgaacagcaattcttcgaaacatctgcgcaggaaaaaatttcgctgctgcaaacgttgctcagccaacatcagccagcctcctgcgtggtgttttgcaataccaaaaaagattgccaggccgtttgtgatgcgcttaatgcggcagggcaaagcgcgttggcgctccacggcgatctggaacaacgcgaccgcgaccagacgttggtgcgttttacgaatggcagcgcacgcattctggtcgccaccgacgttgccgcgcgagggttagacattaaatcgctcgaactggtggttaactatgaactggcctgggacccggaggctcatgtccatcgtattggtcgtacggcacgcgcaggaaacagcggtctggcgatcagtttctgcgcgccggaagaggcgcagcgggcgaatattctttcagaaatgttgcaactcaagctcaactggttgaatgcgcccgcccggcagccgttgctccctctggccgcggagatggcgaccctatgcattgacggcggtaaaaaagcgaaaatgcgtccgggagatattttgggcgcgctgaccggcgatattggattagacggggcggatatcggcaaaattaacgtgcatccaatgcacgtttacgtcgctgtgcgacaggcggtagcgcaaaaagcctgtaagcagttgcaaaacgggaagatcaaaggcaaatcatgccgggtacgactgttaaaataa

SEQ ID NO: 375112 - DNA, 183 bp, Salmonella enterica
atgagctgtcttttaaccttattgtatctgcattcgtccctgtcggacccggttcccaccgatcctgtcccgattcccgatccgcgtcctcatcctcaaccgatgcccgatccgccgccggacgaagaaccgattaaaatgtcgcatcaaacgcgcggatctgcgaggatacgcgcctgctga

SEQ ID NO: 375113 - DNA, 285 bp, Salmonella enterica
atgcaggtaaaagagtatagtgaccgccttaaatcagcgggcagttactcaaattgggcagagtatgtgttgagtatttcccaggcccgttttatttgtgaccatgatattcatcccggcataatctttgtctctgacttcacttgccgccagtttttggataattcaggactgaaaattaatgagctcaacattttttccagagcgttgattgagtgcgatgaaaataatgtggtcacgcgtgccatcgtaccgcaggatatcactcatattcctgtctgttaa

SEQ ID NO: 375114 - DNA, 135 bp, Salmonella enterica
atgatgccaatattaacgcaggattatatctcattgggtcagcaatatgctgtgacatttgggaacactccactcactcttaaacttgcatgttggatgaaggtaaaacgttaccctgcacaaagggactggtaa

SEQ ID NO: 375115 - DNA, 825 bp, Salmonella enterica
atgacgaaatataattttataatttatagcctccttctggcagttgtaccgataagcgtctcggcggattcgtcaacaacatccgcggcacctgtcgggaggctttctcctcctacagcaccgagtgttggacatagaccgccaaaaaatcttagtggtgtagaattgacttttaatggagttgttttttctatttttagttataccccctttccaggtatgactcttaagagagagagtattcatcgcgccccagatcctgataataattatcaggctgctgagacctatactgtagtatgtacgtactatcaagttaataaagataattctcaacatatacttaaacgggaaagcccttgtcaatataattttaatattaagaaagaacattcaggctcaaggataaagctagaagtttataacgaaacggatataacttcagcgtcagggtatatgcctgtgccatcggtctctgaacctcattacatcgagacacaacctatatctaatacgccaagcccagatttaacgcttataaatatagataatgctgtattgtcacctggtgaaagtgctactataacaactcttgttaaggatgttgatggaaatcctataaatgatgtgatgataaacgtagctacagcatatcagaatggtaatggcctatgggatatagggcctgttaagaaaggagttggtcctggtgaatatacgcaagttataacttatcttggaaatcatagtgaaacgcttggtgttgaatattcgtacctgggagatttttttaaaaagtatctccctattatagggaggttataa

SEQ ID NO: 375116 - DNA, 1983 bp, Salmonella enterica
gtggttttttctaaaaaacccattactaaatatataacctgggccattattaccagtcagatttcactgccggtcattgctgatagtgataatgaaattctgtcgtggattgcgggtacggcatcgtctatttctccgcatctgcaggaggggacactggaggattatgccaaagggaaaataaaggcgttacctggacaagccgctaatcaactggtgaacgaggggatgaagagcgcttttccggagattatttttcgtggcggcgtcaatcttgaagatggcgcgaaatatcgctcatcagagttcgatatgtttattcccgtccaggaaacaacgtcatctttactctttggtcagcttggctttcgcgaccacgacagcagcagtttcgatggccgcacctttgctaacgttggtatgggctaccgtcaggaggtcaatggatggttgctcggcgtcaatacgtttctggatgccgacatccgttattcccatttacgtggcggcattggcggggaagtctataaagaaagtctggccttttccggcaattattatttccctctcaccggctggagaacgtcagcagcgcatgaattccatgatgagcgtccggcgtatggctttgatctacgaacaaaaggaacgctccccgattttccctggttcagtggcgagctgacatatgaacagtattacggggataaagttgatctgttgggtaacggtacgttaagccggaatccccgcgccgcaggtgcggctctggtctggaatcctgtccccttgcttgaagtcagggcaggatatcgggacgccggtaacggcggatcgcaggcagagggcggtctgagagtcaactattccttcggtacgccgttacatgaacagcttgattaccgaaacgttggggcgccgtcaaatacgacaaatcggcgtgcctttgtcgatcgtaattacgatatcgttatggcgtatcgggagcaggccagtaaaatccgcattacggcaatgccggtgtcaggcctgtccggtacgctggttacattaatggcgacgatagatagccgttacccgattgagaaggttgagtggtcgggtgatgcggagcttatcgccggactccagcttcaggggagcctgggcagcggccttattcttccacaacttccgctgacggcgaccgacggtcaggagtatagcctctatttaacggtgactgacagccggggtacccgcgtgacctccgagcgtatcccggtaagggtgacacaggatgagaccagcttccgttcctggataaatattatcaatgacgatgctcaggttgaggacggcaactttgttatcagtacgccgcttcctgccggagaagaggggaaggttattgagtggcactacgtgcgcgagcgttctgaagaggagtgggcgtcgctcaaaccacgtaatattaagtatcaatcagatacgccgggtttgtcatttaaagcgctcggcggtacagagcgtgacggccattgggttgaacgggttctggttacccatgtcggcgatgatgcccgctcgtttaaattgcatattgaagcaagcggaccagacgataaacatccggtgaagggtagcgtactactacaagcgcagtcagacagtattgcgcaaaaggtcacttctgtggaggtgctttttacgccgggtactgatgaagccaacggaagtgtcacagcgccagtcgtcggaacagaaatgcgggccagaacgctttgtataaacaatacagactgtaccgatgcgtttaattatcagtgggaaatctcagatgaaatgaaatcctggaaatccgtacctggtgcgacaaaggccacctggcttcttccgtatagccttaacggggaatcgttacagaataaatatatccgggtcagaattatttctgataaagaaaatgctgagagtaataacgcaacatctgctgcgaattaa

SEQ ID NO: 375117 - DNA, 237 bp, Salmonella enterica
atgcaaaaatatattcttaccaccctacttagattatcagcgttgatacttaccggatgtacaacaacctacaccatgaccacccggacgggagaggttattgaaacgcagggtaagccggaggttgacgccacaagcggaatgacgaaatacgccgatgcttatggttatcatcgcattgttagcacaagtgaaatagtactgacgacagaaggggcatcgaagctggagtggtaa

SEQ ID NO: 375118 - DNA, 576 bp, Salmonella enterica
atgaaaaaaaatataataatgctatttttctttaccagtatcctgactggttgtggctcgtcggttaataatgagagattactttctctgaatcctggagaagacatatcgggtgctgaaaatggatcgttgtttagtattcgtaatatacaaagtggctttatgataactaatattcttgatcaacagggtcgggaacagagtggctgggaactgatacaacaggaaacaccaatagaagtattggcaactacgcctggggggtggattcaatttcgtgacccaattaccagacagtgccttaatgctataaacggtgtcgctttaaccaaagggacatgtgatttaaaaaatcgagaatcgttattcgtgttaataccatctaccacaggagcggtgcaaattcagtctgtaaattcgaaaacgtgtgttattgatcaggataataccgatcattttttatttggtcgttgtgttgctgatatccagaaccaacaacaagtagtccatgaaaaaaatctttggatgctcaatccaccagtcactgcatcatccatggctcccatcaatatatag

SEQ ID NO: 375119 - DNA, 828 bp, Salmonella enterica
ttgaaaaatatactacttttcttcgtctgtcttcttacctttccagtacacgctgcattaactgattataaagttgctacatggaatttacaggggtcttctacaagaagcgaaaataaatggaatgtgaatgtacggcaacttgttagtggcgctggagctgttgatattttaatggttcaggaggctggacgtcctccagcaagcgcggttgatactggaagaattattaattcacccggtattccggttcgtgaacttacctggaatttaggaagtaacagtcgtccccaacaagtttttatttatttctcacagcttgatgtttttgctggacgcgttaatcttgctatcgtaagtcatcgtcgcgcagatgaggttatcgttcttccccctccttcgacagcatcgcgtcctataatgggaataagaataggttcagatgcgtttttcactattcacgccttggcaaataggggagtagatgctccagcggttgtaaatagtgtttttgagtttttccgtaatagcacaaggccagatatgcaggctacaaactggatgattgcgggcgatttcaatcgtaatccagataacctcagaatggcgatcgaaactcctgtaagaaataatactgtcatattagcaccttcagatcctacgcagcgcagcggagggatactggactatgctgttgtaggcaatgcgattgcatttattccgccagtgctgagggccggattattattcggggaaagagcgactcagatatcatcagatcattacccggttggtattttcttaccacctcctggagaaccaagatga

SEQ ID NO: 375120 - DNA, 813 bp, Salmonella enterica
atgaaaaaatgtagttggctaatcattattgctactctgacgggatgttcttcctctcctcctttggtgggtggcaatgagttttatagaatatttccatcacctggcggtaatggccctgtccctccaaccccggaagaacccggattgccaatacctggaccgggaggcgtcaatagacaaacaatctcctctaatgcacctcttccagtgccaaaagataatcctagcgtatctattatgagtatgagcggggccgtactgacagtatgggggcgccatagaaactcatggctatggggctacacgccctgggattctaatagttttggtgaattacgtaactggaaaataataccggggaagactccgggaacagtacgcttcgtaaatcagggaaccggaacatgcatgacatggggagttggcataagcggtgacggtggatttatacacaccacttgcgatccacgctctgctgtgttcgattttcacttaattccgacactcaatggcaatgtctttattaagtcagtagatctcaatcgttgtattcgggcaagatttttagacagaacagcaagctccccatatgcttttgaaatattacaggcagaatgtccaaaacctggggagaaaaatattgagttgcaatggtctattagtgaacctttgaggcctgctcttgctgccatttctaagccggaaattaggcctgcccctccgtcactcccacttgctgatggttcaataataaataattcagattcaaataatatatcagccactcaaattcagcctgtaatttattaa

SEQ ID NO: 375121 - DNA, 1011 bp, Salmonella enterica
atgcctccaactatttatgatatcgcgcgtattgctggtgtatcaaaatcgacggtatcccgcgttcttaataaacaaacgaatatctctcctgaagcccgcgagaaagtgttgcgtgcgattgacgagttacagtatcagccaaataagctggcccgcgcgctaacctcctccggctttgacgccattatggtgatctcaacccgttcagcgaaaaccaccgccggaaatccttttttctcggaagtgttgcatgcgattaccgcgagagcagaagaagaaggtttcgacgtcatattacagacttcgcgaagtacggaagacgatctgcagaaatgcgttagcaaaataaagcataagatgattaaaggcattattatgctaagttctccggctgatgaatccttttttgcccgccttgacaactacgatattccggtggtcgttatcggcaaagtcgaaggacagtatcaacatgtctactcagtagatactgataactatcgcgacagcattgtgctgacagatgctttaatcaataatggacatcagcatattgcctgcctgcatgcgccgctggattatcatgtttctgtcgatcgcgttaatggctataaagccagccttgaagcgcaccttcttacggttcgcaatgaatggattattgatggtggttatacgcatgaaagcgcgattgaggcggcaagaatgctattaagccagaatcctttacccgatgcggtatttgcgacagatagtattaaaatactcagtctgtatcgcgtggcggcggagaaaaatatctcaattccgcaacaactggccgtggtgggttacagtaacgaaatgctgtcctttattctcactccgccacccggcggtattgatataccgacgcgcgcgctgggcgaacaaagttgcaatatattgttcaaacagattgccggaaagaccagcccccgttccatcacagtagagactcgaatttccctcaccgcttcgctggcctga

SEQ ID NO: 375122 - DNA, 906 bp, Salmonella enterica
atgaaaaccttactgtcctctactgcgctgatcatgtgcgcaggaatggcctgcgcgcaggccgccgaaaacaatgactggcattttaatatcggcgctatgtatgaaatagaaaacgtcgaaagccaaagcgaggatatggatggcctgggtgagccgtccatctatttcaacgcatctaatggcccctggagtattgcgttggcctattatcaggaaggtccggttgattatagcgctggaaaccgcggcacttggtttgatcgtccggaactggaagtgcgttaccagttccttgaaagcgccgattttaacttcggactgaccggcggtttccgtaattatggctaccactacgtgaatgaagaggggaaagacaccgccaatatgcagcgctggaaaatacagcctgactgggatgctaaacttaccgacgatttacacttcagcggttggctggcgatgtatcagttcgtcaatgatctaagtattacgggctattctgacagccgcatagagactgaaaccggcctgaactatacctttaatgaaacggttggttttacagttaactattatctggaacgcggctttaacctcgcggagcatcgtaacaatggcgagttttcgacgcaggaaattcgcgcctatttacccatctcgctcggaaatactacgctgacgccgtatacccgtctgggactggatcgctggaccaactgggactggcaggacgatcctgagcgtgaaggccatgatttcaaccgattagggttattgtatgcgtatgatttccagaacggcctgtcaatgacgctggaatatgcctatgaatgggaagatcacgatgaaggtgaaagcgatcgttttcattacgcggggataggcgtcaactacgctttctga

SEQ ID NO: 375123 - DNA, 1083 bp, Salmonella enterica
atggcacagctttcgttgcaacatattcaaaaaatatatgataaccaggtacatgtcgttaaagactttaatctggaaattgaagacaaagaatttattgtttttgttggtccttccggctgcggtaagtcgaccacgctgcgtatgatcgccgggctggaggagatcagcgatggcaacttattaattgacggtaagcggatgaacgatgttccggctaaatcgcgtaatatcgcgatggttttccagaattatgcgctttatccgcacatgtcggtttatgccaacatggcgtttggtctgaaaatgcagaagattaaccccgagatcattgatgagcgcgtcaactgggcggcacagatcctgggtctgcgcgactatctaaaacgtaagccgggcgccttatccggcggtcagcgccagcgcgtggcgttgggacgggcgatcgtccgtgaggctggcgtgtttttgatggacgagccgttatccaacctggacgccaagcttcgtgtgcagatgcgggcggaaatcagcaaactgcatcagaaactcaagaccaccatgatttacgttacgcacgatcagaccgaagcgatgaccatggcgacacgtattgtgatcatgaaagacggtattgttcaacaggtcggcgcgccgaaagaagtttataaccatccggcaaatatgtttgtcgccggatttattggctcgccagccatgaatttcattcgcggcgctatcgacggtaatcagttcgttactgaaacccttaaattaacgattccgcaggaaactctggatttattaaaaacgcagggttatgagcataaagctgtcatgatggggattcgcccggaagatatacatccccagggacataacgaaaatagtgtttcggcaaaaataagtgtcgcggaactaaccggcgctgaatttatgctttataccaccataggggggcatgaactggtcgttcgtgccggagcaatgaatgactattatgcaggagaaaatatcactattaattttgatatggcgaaatgccatttctttgatgctgaaacagaactggcaattcaataa

SEQ ID NO: 375124 - DNA, 669 bp, Salmonella enterica
atgaaacaacacccgcaagccatcattttcgatctggacggtgtgattaccgacactgcgcatctgcattttctcgcctggcggcaaattgccgacgacatcggcattgtgattgatgaagctttcaacgataccctgaaagggatcagtcgtggcgaatcattacgacatattttgcaacacggcggaaaggagggggcgtttggggaggaggctcgcgcgcaactcgcggctcgtaaaaacagtctgtatgttgaatcgctgaaacaactgaccccgcagtccgtgttaccaggtattagaccattgctcgtaacattacgcgaattacagattccagtcgcgcttgcctcggtgtcgctcaatgcccccgcgattttgcagacgctggatatccgcgattattttgatttctgtgtagatgcggcgcgaataagccgttcgaaaccagatccggaaatttttctggctgcctgtgaaggattgggagtcaatccatgtgaatgcattggggtggaagatgcgcaggcaggcattgacgctatcaatgcgtgtggtatgcgctcagtgggcatcggcggtgcgcttcgcgacgcggatttacatttgccttcgacagaatttctgacatggccgcgcttatcggctttctggcaaaacgacaagtaa

SEQ ID NO: 375125 - DNA, 2277 bp, Salmonella enterica
atgactaagccagtaatgctaaccgaatcgactttttgtccacaaaacttggataaatacgcgtcgctaatgactaccggcaacgggtatatgggaattcgcgccagtcatgaagaagcctatacgaggcaaacgcgcggtatttaccttgcaggactttatcatcgggcgggaaaaggcgagctcaacgagttggtcaatcttcccgacgttgtcggcgtggaaatcgttctgaacggtgagaatttttctctactgagcggcgcaattgaaagctggcatcgcgagcttgatttcgccaccggggaattacggcgcgcgctggtatggcaagcgccaggcggtgcgcgttttgcgatagaaagccgacgcttcgtttctgcggagaaactgcccctgttcgcacaggaagtggcgattacgccgctggataccgatgctgctattttgatctcgaccggtatcgacgccaccatcaccaatcatggccgccagcatcttgatgaaacgcaggtcagggtattcggtcaacagatcctgcaagggatatacaccacccaggacgaccacaacgatattgctatttcttctttctgtaatatcgatggtgaagcgcagcgttgctttaccgctaaagagcgtcgcctgctacaacataccagcgtccaggcgaaagccggccagcgcgttacgctgcaaaaaatcacttggatcgaatggacaagcgagcgtcaggtttccagggaaacctgggggcgccagttgctgagaaagcttgaagcttgcgtaaaacaggggtatgaggccttgctggccgaatctgcggaaaactggcgcgcctggtggcagcgtagccgcgttcaggtgatcagtacagacgcgacagatcagcaggcgctggatttcgctctttaccagttgcgcgccatgacgccaacccatgatgaacgtagcagcattgcggcaaaagggctgacgggagaaggctacaaaggccacgtgttctgggataccgaagtttttctgttgccattccacctgttcaccgagccgaaaatcgccagaagtttgttgcgttatcgctggcataatttaccgcgcgcgcgcgagaaagcgcgacgtaacggctggcaaggcgcgttgtttccgtgggaaagcgcgcgtagcggcgaggaagaaacgccggaattcgcggcaatcaatatccgtaccgggttacggcaaaaagtggcctctgcgttggcggaacatcatttggttgccgatatcgcctgggcggtggtcaattactggcacgccaccggggatatgagtttcattgcccatgaagggatggcgctgctactggaaaccgcgaagttttggatcagtcgcgcagtggcagtgaataaccgtctggagattcatgacgttattggcccggatgaatataccgagcatgtcaacaacaatgcttttaccagttatatggcgtactacaacgtggaacaggcgctctggtttgctcgctttctcaacggtagcgacgaagtctttatccgtcgcgccgaatactttctggaacatttgtggcgacctgaagttaagcaagatggcgtactaccgcaggatgactccttcctgagcaaacctgttattgatctggcgaaatacaaggccaaggccggtacacaggccattttgctggattattcccgcgcggaagttaacgagatgcaaattatcaagcaggctgacgtggtgatgctgacctatatgttgccggatcagttcagcgcgcaggagtgtctggctaatctgcgtttttatgagccgcgaacgattcacgactcttcgctgagtaaatcgattcatggaattgtggccgcgcgctgcggtgagacggaacagggttatcaattctggcgcgacggttcgcagattgatctcggtgacaatccgcacagctgtgatgacggaatacacgccgccgcgaccggcgcgatctggctgggagcgattcagggatttgctggcgttagcgttcgtcatggcgagttacatctggagcctgccttgcctgagaattggcaaacgctggcgtttccgctgcgctggcacgatagcgaaatgcatttcacgatcgagaccgctgaaattcgtattaccagcacaacacaggttcacctgtgggtttacggtaaaaaaatcagcgtacagggggaatgtgttctcaggcgacatgattatattacagccatgaatgggaccgataccacaaagagggaagctgaatga

SEQ ID NO: 375126 - DNA, 1056 bp, Salmonella enterica
gtgaaaagtgcaatgacaagctctccgttgcaggtcgccatcattggcgccggccaggtagcggataaagttcatgcttcgtactactgcacccgcgacgatctggaactggtggctgtctgtgacagccgcctgtctcaggcgcaagcgctggcagataaatacggtagcgccttagtctggagcgacccggaaaaaatgttgcacgatgttcaaccggatatcgtcagcgtttgttcaccaaatcgttttcattatgaacacgccatgatggcgttaaaggcgggttgtcatgtgatgtgtgaaaagccgccggcgatgacgcccgatcaggctctggagatgtgtaacaccgcccaccggatgggcaaagtaatggcctatgatttccatcaccgtttcgcgctggatacgcaactgcttcgtgagcaggttatgtcgggcgtgttaggggaaatctatgtcaccaacgcccgggcattacgccgttgcggcgtgcctggctggggcgttttcaccaataaggaactccagggcggtgggccgctgattgatatcggcattcatatgcttgatgccgcgatgtacgtgcttggtttccctgcagtgaaacgcgttaacgcgcacagttttcagaaaattggcacgcgcaagcacaacggacaatttggggaatgggatccgacaacttacaccgtcgaagatgcgctgtttggcaccattgagtttcataacggtggcatcctgcgtctggaaacctcgtttgcgttgaacattcctgaacagtcgatcatgaatgtgaatttttgcggagacaaagcgggggcaacgttgtttccagcgcaggtgtataccgatcgcgacggtgagctggttatgctgttgcagcgcgagaaagccgacgacaaccgtcattttcgcagcatggaagcgtttgtgaaccacgttaaaggtgaccctgtcacaatcgctgacgcagaacagggaattattattcaacaactggtagcagcgctttatgagtcagctgaaacagggatgtgtgtggaactatga

SEQ ID NO: 375127 - DNA, 789 bp, Salmonella enterica
atgaaaattggcacacaaaatcaggctttctttccggaaaatatcctggagaaatttctttatatcaaagagatgggatttgatggttttgagatagacggcaagttgttggtcaataatctcgccgaagttaaagcggccattaaagaaaccggtctgccggtgacaacggcctgcggcggttacgatggctggattggcgattttattgaagagcgccgtttgaatggcttgaagcagattgaacgcattctggaagcgctggcggaagtcggaggccagggaatcattgtgcctgccgcatggggcatgtttaccttccgtctgccgccaatgatctcgccgcggagcctggaaggcgatcgcaaaatggtaagtgactcgctgcgttacctcgatagagtcgctgaacgcaccggcactatcgtgtacctggaaccgctcaaccgttatcaggatcatatgatcaacaccctggccgacgcgcgccgctatatcgtcgaaaacgacctgaaacatgtgcagattatcggtgatttctatcacatgaatatcgaagaagacgatatggcgcaggcgctgcacgataaccgcgatctgctgggtcatatccatatcgccgataatcatcgctatcagccgggaaccggtacgctaaatttcgccgcgctgtttgatcaactgcggaaagataattaccaagggtatgtggtgtatgaaggccgggtgcgggcggaaaatctggctgaagcctaccgtcagtcgctggcgtggctgcgtacctgctaa

SEQ ID NO: 375128 - DNA, 1053 bp, Salmonella enterica
atgaaaaagttaatcgccacacaaccgcgcgttgctgcgctggtagagtatgaagatcgtgcgattttagcgaatgaagtgaagattcgcgtgctgtacggggcgccgaagcatgggaccgaggtggtcgatttccgcgccgccagtccgtttattgatgaggactttaattttgagtggcagatgtttatgccgagaccggaaggcgcgccgcgcggcatcgaattcggtaagtttcagcttggcaacatggtggtaggcgacattattgaatgtgggagtgatgtaaccgaatacgccgtgggcgatcgggtatgcggttatggtccgttgtccgagacggtcattattaacgcggtgaataactacaagctgcgcaaaatgccggaaggtggttcatggaaaaatgcggtctgctatgacccggcgcagttcgctatgagcggggtacgtgacgccaatgtgcgcgtcggtgattttgtcgtcatcgtcggcctcggcgctattggacaaatcgcagtgcaactggcgaaaaaagccggcgcatctgtggtgattggtgttgatcctattgagcatcgctgtgatatcgctcgccgtcatggcgctgatttctgcttcaatcctggtggaaccgatgtcggaatggagatcaagaaactgaccggtaagcagggcgccgacgtgatcattgaaaccagcggatatgcggatgcgctgcaatctgcgctgcgcggtctggcgtacggcgggacgatttcttacgtggctttcgctaaaccgtttacggcggggttcaacctgggacgcgaagcgcattttaacaacgccaaaattgttttcgctcgcgcctgtagcgagcctaatccggactatccgcgctggagtcgtaaacgtattgaagagacctgctgggaactgctgatgaacggttatctcgactgcgaagagattattgacccggtcgtgacctttgcctccagcccggaaagttatatggagtatgtcgacagacatccggaaaagagcatcaagatgggcgtcacgttttaa

SEQ ID NO: 375129 - DNA, 843 bp, Salmonella enterica
atggcaacaaataaacgtaaagctgggcggatcggtttttattgcggactgatcgttttccttatcatcacgctttttcctttttttgtaatgctgatgacgtcgtttaagagcgcaaaagaagccatttcattacatccgacgcttttcccgcagcactggacgctggaacactatgtcgacatttttaatccgctgatttttccgttcgtcgactatttccgcaatagcatggtggtctcggtcatgtcatcggttgtcgcggtgtttttaggtatgctcggagcgtatgcgctctcccgcttacgctttaaaggacggacgaccatcaacgccagcttttataccgtgtacatgttttccggcattttactggtggtgccgctgttcaaaattatcactgcgcttggcatctacgataccgaaatggcgctccttatcaccatggtcacccagaccttacccacggcggtgttcatgctgaaaagctacttcgacactatcccggatgagatcgaagaagcggcgatgatggatggactgaatcgtctgcaaatcatctttcgcatcaccgttccgctggcgatgtcagggctggtatcggtctttgtctactgctttatggtggcctggaacgactatctttttgcgtcgattttcctctccagcgccagcaacttcacgttgccggtgggcctgaacacgctgttcagtacgcctgactatatctgggggcgcatgatggcagcgtcgttggtaacagcattacctgtggtggtgatgtacgcgctttccgaacgttttattaagagtggtttgaccgctggcggcgtgaagggctaa

SEQ ID NO: 375130 - DNA, 882 bp, Salmonella enterica
atgaataggtttttttccggtcgctccgatatgccattcgcgatgttactactggcgcccagtttgttgctgctgggcgggttagtcgcatggccgatgatatcgaatatcgaaatcagtttcttgcgtttgccgctgaacccacagattgcgtctacttttgttgggttaagcaactatatcagcatcctttccgatcctggcttctggcattcattatggatgacagtctggtacaccgcgctggtggtggcgggcagtacggcgctggggctgggcgtagcgatgtttttcaaccgagagtttcgtctgcgtaaaacggcgcgctcattggtgattctttcttacgtaacgccgtcaatctcgttagtttttgcctggaaatacatgttcaacaacggctacggcattgtgaactatcttggcgtagatctgctgcgcctctacgatcgcgcgccgctgtggtttgacaatccaggtagcagcttcgtattagtggtgctgttcgcgatctggcgttatttcccgtatgcctttatttcatttctggcgattttgcagacgattgataaatcgctctatgaagctgcggaaatggatggcgcgaatgcctggcaacgcttttgcatcgttacgctgcccgccattatgccggtattagcgaccgttataaccctgcgtaccatctggatgttttatatgttcgctgatgtttatctgctgaccacgaaagtcgatattctcggcgtgtatctctacaaaacagcatttgcatttaatgacttaggtaaagcggctgcgatctccgtcgtgctctttatcatcatttttgccgtcatcttgctgaccagaaaacgggtgaatctcaatggcaacaaataa

SEQ ID NO: 375131 - DNA, 1293 bp, Salmonella enterica
atgctcaaaactaaaattgtgctgttatcagcactggtttcctgcgccctgatttcaggatgcaatgaccagaaaaaatcgaatacttccattgagttaatgcactcttcggtggagcaagagcgtcaggccgttattagtcaacttattgcccgtttcgaaaaggaaaatcctgacattactgtaaaacaagtccctgttgaagaagatgcttataacacaaaagtcatcacgctggcgcgaagcggctcgctgccggaggttattgagaccagtcacgattacgccaaagtgatggataaagagcaactgattgatcgtaacgccgttgcaaatgttattcagcacttgggcgaaaataccttttatgacggtgtgctgcgtattgtgcgtacagaagatggcaccgcatggacaggcgttccggttagcgcctggattggcggcatctggtatcgcaaagatgtactggcgaaagccgggctggaagagccgaaaaactggcagcagttattaaccgttgcgcagaaattaaatgatcccgcgaataagaaatacggtatcgcgttgccaacggcggaaagcgtattgactgaacagtcgttctcgcagttcgccttatccaatcaggccaatgtttttaacgctgaaggacagattactctcgatacgccggaaatgcaccgggcgctggagtattaccgttcactggcggacaacaccatgccgggctcgaacgacattatggaagttaaagatgccttcatgaacggtacggcgccgatggcgatgtactccacgtatattctcccggcggtcattaaagagggcgatccgcagaacgtgggctttgttgttcccactgaaaaaacgtctgcggtgtacggcatgttgacatcgctgacgatcaccacggggcagaaaaaagaagagacggaggcggcagaaaaatttgtcgcctttatggaacaggcggacaacatcgccgattgggtgatgatgtcgccaggggcggcattaccagtgaataaagccgtagtaaatacggcaacctggaaggaaaacgcggtgatcaaagcgctgggcgacctcccttaccagttgattgccgagctgcctaatatccaggtattcggcgcagttggggataagaactttacccgtatgggcgatgtcaccggttcgggtgtggtgagctcaatggtgcataacgtgacggtgggtaaggccagtctgtcttcgacgatcaaggaaagccagcaaaaactggatgcccttgttgaacaacgctaa

SEQ ID NO: 375132 - DNA, 1689 bp, Salmonella enterica
atgaaagtgaatcaaaaaatcgagaaatacctgtcagaaatctatggaaagacatttacgccacgacattacgaggcgctgaactcacgcattgaaaaagcacgattattaatttcaaaaaagcgtaaaacgcactgggacgaaagggatgtggtgctcattacttacgctgaccagtttcacagtgatacatcaaagccgttaccaacatttaataaatttcatcgacaatggctggcggctactttttctcatctccatctattacctttttgtccgtggtcttcggatgacggtttttcagtcgtagattattatcaggtcgcacctgaaacgggcgattgggaagatatcagtgatctcagccagagcagtcaacttatgtttgactttgtttgcaatcatatgtcggcaaagagtgagtggttcaaccattatttgcaacaagcgcctggctttgaaaatttctttattgccgtagacccatcaaccgatcttagcgcagtcacccgaccacgcgccttaccgttgctcacgccatttaccctgaaggacaagtctgttcatcatctatggacaaccttcagcgatgaccagattgatctcaactatcgttgtccggatgttttgctggcgatggtcgatgtactgctgacttatttagagaaaggggctgattatatccgtctggacgcggtagggtttatgtggaaaataccgggtaccacctgtattcatttaccacagacacatctgctgattaagctctttcgcgctattacggatgacgtcgcgccaggtacggtcattattactgagaccaatgttccgcataaagacaacattgcatatctggggaacggcgaagatgaagcgcatatggtctatcagttttcactgccgccgctggtgcttcatgccgttcacggccaggatgtacgcgcgctgtgttcatgggcgcaatctttgacgcttccctcagaaaatacgacctggttcaatttccttgcgtctcatgacggtattgggcttaatccattacgcggtcttttgccggaagacgagatactgaagctggtagaggacttacaacaagaaggcgcgctagttaactggaaaaataacccggacggtagccgaagcccttatgaaataaacgtgacgtatatggatgcgcttagcgatcgatatagtactgacgatcaacgcctcgccagatttattctggctcacgccattttactctcttttccaggcgtaccggcgatatatatacaaagtattctgggttcccgtaacgattatgacggcgtgacacaactggggtataaccgggcgattaatagaaagaaataccggcgaacagaaattgaagcggaattaatggatgagacaacgttaagatatcgcgtctatcatgccttatccagacttatcgcgattcggcgaaataataaagcttttcatccagaaagccaattttccattaaaaatatatcaccttgtgttatgcaaatagagagagtggcaaaaacgggagagtccattgtcgctttgtttaatgtcagcgataacataaataccattaatagtaaaaagtttcagggtactgatttaattagcgaaacgaatctcaccggcgaggtattaacgctacacccctggcaggttctgtggattaaaaaataa

SEQ ID NO: 375133 - DNA, 366 bp, Salmonella enterica
atgcgtcatctggtcgttctggtagaggaactgcgtgagcgtggcgttaatttccgcagtcttaccgataacatagatacttccacaccaatggggcgtttctttttccatatcatgggcgcactcgctgaaatggagagagaattaatcgtggaaagaacccgcgctggactggaagctgcaagggcgcaggggcgtatcggtggcaggcgtccaaagctcaccccggaacaatgggcgcaggccgggcgcctgattggggcaggagtaccgcgacagcaggtagcgatcatttatgacgtgggactgtcgacgctgtacagaaaatttcctgcagcatcacgaagtgaaacccgtaggcgctga

SEQ ID NO: 375134 - DNA, 552 bp, Salmonella enterica
atgacttttaaaatgagcagcaaagcgcagacaattaagatttataacctgcgttcagatacaaacgaatttattggtgcaggtgatgcatatatcccgccgcacactggattaccggcaaactgtacggatattgcgccccctgaaattccggccagccatattgctgtatttgactctgaaacccagacgtggagtctgaaagaagaccatcgcggcgagacgctttacgacacaataaccggaaatcaggtttacatctccgaacccggtccgttgcctacaaacgtgacggcaatttcccctgatggtcagtatgaaaaatgggatggcaataaatgggtaaaagacgaagcggctgaaacagcagctcagcttcgtgaagcggaagagacaaaaaaacgtcttttgcaaatggcatcagggaaaattgttccgttacaggatgcggttgatcttggaatggcaacagatgatgagaaagcgcagctcgacgaatggaaaaagtacagggtgttggtaaacctggtggatacctcaaaccctgactag

SEQ ID NO: 375135 - DNA, 495 bp, Salmonella enterica
atgcaggggcagtccttcgataaatctgattacccgttactggctatagcgtatccctccggcgttattcctgatatgcggggctggacaatcaaaggtaaacccgcaagtggtcgcgcagtgttgtcacatgagctggacggcaacaaatcacacagtcacagcgcgcgggcgcaggataccgacttagggacaaaaactacctcatcctttgattacggcacgaaatcgaccaatacaacgggcggtcatatacatgagtttggcggttatatcaactcatattggggagattcaaatcacacctcatttcaacctggaggtggtgcgtggacacaggccactggcgaccatacgcatacagtttatatcggaggacacgagcacagcatatatatcggtccacacggacacgccgttattgtggacgcagacggtaatgcggaaaccacggttaaaaacattgcatttaactacatagtgaggctggcataa

SEQ ID NO: 375136 - DNA, 906 bp, Salmonella enterica
atggatatctttatttctaaaaaaatgcgcaatttcattctgttggcgcaaaccaataatattgccagggcggcggagaaaatccacatgacggcctcgcctttcggtaaaagcatcgcagcactggaggatcaaattggctatacgctgtttacccgtaaagataacagtatcagcctgaataaagcggggcaggaactttatcaaaaactctttcccatctatcaacgtttatcggccatcgataatgagattcataacgcggggggccgttcgcgcaacatcgtgataggcatcgataatacgtatccaaccattattttcgatcagttgattagtctgggcgacaaatatgacggcgtgacggcgcaggccttcgaattcagcgaaaatggcgtaattgataatctgttcgacaggcagctcgactttattatttcgcctcagcatgtatcggcacgcgtgcaggatctggaaaatttgacgattagcgaactgccgtcgttgcgtcttggcttcctggtttcccggcggtatgaagacaggcagccgcaggcgctgttgcgtgaactgccttggttgcaaatgcgtttccagaaccgggccaatttcgaggcgatgctggatgcctacatgcgaccctgtggcatcaaccctaccgtgatttaccgtccttacagctttatggccaagataagcgcggtggagcgcggtcagttcctgacggtcgtgccgcatttcgcctggcgactggtgaatccggcaaaactgaaatatttcgatgcgccgcacagcccaatgtacatgcaggaatatctttattcattgaaaaatcatcgctataccgccacgatgctccggcatatcgccgaagatcgcgacggggacgaactaaccgagcattga

SEQ ID NO: 375137 - DNA, 1479 bp, Salmonella enterica
atgaaagtctcctggccaacaatgagcgccgatgatgcggcggaaatcattcagcataacgatatggtggcattcagcggctttacccccgcaggttcgcccaaagcgctgcctgccgcgatcgccagacgcgccaatgcactgcaccagatacggcggccttttcagattcgattattaacgggcgcgtctatcagcgccgccgccgatgatgcgctatcggaggctgatgcggtctcctggcgtgcgccctatcagacctcaaccggcctgcgccaaaaaattaatcaggggcaggtaaagtttgtcgatctgcacctgagcgaagtcgcgcagatggttaactacggcttttttggcgacatcgacgtggccgttatcgaagccacagccattaccagcgatgggcgcgtctggctgtccagcggtatcggcaatgcgccgacctggttgttacgggccaaaaaagtcattatcgaactgaaccactaccataacccgcgcgtcgccgagctggccgatatcgtcattcccggcgcgccgccacggcgcaacagcgtcgctatatttcatgcgcttgatcgggtaggtaatcagtacgtgcagatcaatccgcgcaaaattatcgcagtggtggaaacaaatctccccgatgccggcaacgtgctggataacgccaaccccatctgccagcagattgccgataatgtggtcacatttctgctggatgagatggcacaggggcgcatcccggcagaatttttaccgctgcaaagcggcgtgggaaacatcaacaatgcggtgatggcgcggcttggcgaaaacccggatattccgtcctttatgatgtattccgaagtgttgcaggagtctgtagttcatctgctggagacaggcaaaatcatcggcgccagcgcctccagcctgacgctttccgccgactcgctgcaaaagatttacgacaatatggatttcttcgccagtcgtatcgtactgcgcccgcaggagatctccaataatccggaaattatccggcggcttggggttattgcgctgaatgtcggcctggagtttgatatctatggtcatgccaactccacgcacgtagccggcgtgaatctgatgaacggtatcggcggcagcggcgattttgagcgtaacgcttatctttcgctctttatggcgccgtccgtcgccaaaggcggcaaaatttccaccattgtgccgatgtgtagccatgtcgatcacagcgagcacagcgttaaagtgatcatcaccgaacagggcattgccgacctacgcggactctctcctctgcaacgtgcgcataccattattgatcgctgcgcgcacccgctttatcgcgactatttacgccgttatctggaacatgcgcccggtggtcatattcaccacgacctcagtcacgcttttgatcttcatcgtaacctgctggaaaccggatcaatgctcggttag

SEQ ID NO: 375138 - DNA, 786 bp, Salmonella enterica
atgtcttatcaatatgttaacgtcgttatcatccaaaaagtcgcggtcattgaattcaattatgcccgtaaacttaacgctctgagcaaagtctttattgatgacttgatgcaggcgctaagcgatctcaatcgtccagaaattcgctgtattattctgcgtgcgcccagcggcgcgaaagtcttttccgcaggccatgatattcatgaattgcccagcggacggcgcgatccactgtcttatgacgatccgctacgtcagatcacgcgcctgatccagaagtatcctaagccggtgatttcgatggtggaaggcagcgtctggggcggcgcgtttgagatgatcatgagttctgatctgatcatcgccgccagtacttctaccttctccatgacgccagtgaatcttggcgtaccgtataacctggtcggcattcataacctcacccgcgatgcgggattccatatcgttaaggagctgatttttaccgcttcgccgattaccgcccagcgcgcgctggcggtcggcattcttaaccatgtcgttgaagccgacgaactggaagatttcacgttacagatggcgcaccatatttcagaaaaagcgccgttggccattgcggtaataaaagaggaactgcgggtattgggcgaagcgcacaccatgaattctgatgagtttgagcgcattcagggaatgcggcgcgctgtttatgacagcgaggattatcaggaaggaatgaacgcttttctggaaaaacgtaagccccatttcgtggggcactga

SEQ ID NO: 375139 - DNA, 1023 bp, Salmonella enterica
atgtcctggcccggattagccagcatcatgattaacgataccacgctgatggacgccgtcacacgtctgcgtcagggcgatcgcgccacgctcgcgcaggcgatgacgctgatagaaagcagccatcctcgtcatcaggaacttagcgcgcgcctgctggatgccattatgccttttactggcaatgctctgcggctggggatcaccggaacgccgggcgccggaaaaagtacgtttctggaagccttcggcatgttgttgattagcgagaacttacatgtagcggtcattgccgtcgatcccagcagcccggtaagcggcggcagtattctcggcgataaaacccggatgacggcgctttcgcgatcggatgcggcgtttattcgccccgtcccttccggcggacatctgggcggcggctgcctgcgcgcacgggagctaatattgctgtgcgaagcggcaggctatgacatcgtgatcgtcgaaaccgtaggcgttggccagtcggaaacggaagtcgccaacatggtggattgttttattgcgctacagatcgcaggcggcggcgacgatctgcaagggattaaaaaaggcattatggagatggcggttctgatcgttattaataaggatgatggcgataatcgcggcaatgtggctatcacccgtcacatgtacgaaagcgcattgcacatcctgcgtcgcaaatatgccgaatggcagccgcaggttctgacctgtagcgccctgcaaaaacgcggaatcgaccaggtatggcaaaccctctgcgatttccgcgcaacccttgccgccagcggtcgtatggagcaggtacgccgtcagcaggcccttcactggttgcaacaacaaacgaaagaacaaacgttgcatatgctgtttgcccgccccgattttacacgctatttccagaacacgttacaagccgtgaaaagcaacgatctttcgccgcgcaccggtctgcggcgcattagcgaatttctacagaatcattactttcaataa

SEQ ID NO: 375140 - DNA, 2145 bp, Salmonella enterica
atggctaatttgcaggcgtggcaaacactcgccaataacgagctaagccggcgggaaaaaaccgtcgaatcgttgatacggcaaacggcggagggcattgccgttaaaccgctgtataccgaagccgacctgaataatctggaagtcaccggtacactgcccggtctgcctccttacgtgcgcggtccacgcgccaccatgtataccgcccagccgtggaccattcgccagtatgccggattctccaccgccaaagagtccaacgccttttatcgtcgcaacctcgccgccgggcaaaaaggcctttccgtcgcctttgatctggcgacccaccgcggttatgactccgataacccgcgggtggcgggcgatgttggtaaagccggcgtggcgattgataccgtcgaagatatgaaagtgctgttcgaccagatcccgctggataagatgtcagtatcgatgacgatgaacggcgcggtattgccggtgatggcgttttatattgtggcggcagaagagcaaggcgtttcgccagaacagcttaccgggacgatccagaatgatattctcaaagagtatctgtgccgtaatacctatatttatccgccaaaaccctctatgcgcattattgcggacatcatcgcctggtgttccggaaacatgccgcgctttaacactatcagcatcagcggctatcacatgggcgaagccggcgcgaactgcgtgcaacaagtggcgtttaccctggcggacggtatcgagtacattaaagccgccctttccgccgggctgaaaattgacgatttcgctccccgactgtcgttctttttcggtatcggcatggacctgtttatgaatgtcgccatgctgcgcgccgcacgctatctatggagcgaagcagtgagtggtttcggcgcgaccaatcccaaatcgctggcgctacggactcattgccagacctccggctggagtctgactgagcaggacccttataacaacattattcgcactaccattgaagcgctcggcgccacgcttggcggcacccagtcgctgcatactaacgcctttgacgaggcgctcggcctgccgaccgacttttcggcgcgtatcgcccgtaatacgcagatcattattcaggaagagtcgtcgatctgccgcaccgtcgatccgctggcaggctcatattatgtcgagtcgctcaccgatcagatcgtcaagcaggccagagcgattatcaaacagatcgacgcagcgggcggcatggcgaaggcgatcgaggccggattaccgaagcggatgatcgaagaagcctccgcccgcgaacagtcgctcatcgaccagggcgagcgcgttatcgtcggcgtcaacaaatacaagctggaaaaagaagacgaaaccgcagtactggaaattgataatgtgaaggtgcgcaacgaacagatcgccgcgctgaaacgcatccgcgcgactcgcgataaccgtgcggtgaacgctgccctgcaagcgctgactcacgcggcgcaacaccatgaaaatctgctggccgccgccgtcgaggccgcccgcgttcgcgccacgctgggggaaatctccgatgcgctggaagcggcgtttgatcgctatctggtgcccagccagtgcgttaccggcgtgattgcgcaaagctatcatcagtccgataagtctgccggtgagtttgatgccattgttgcgcaaactcagcaatttctcgctgacacaggccgccgtccgcgcatcctgatcgccaaaatgggtcaggacggccacgatcgcggagcaaaagtgatcgccagcgcctattccgatctcggtttcgatgtcgatctcagcccaatgttctctaccccggacgagatcgcccgcctggcggtggaaaatgacgttcatgtcataggcgcctcatcgctggccgccggtcataaaacgttaattccagagctggtggcggcgctcaaaaaatggggccgcgaggacatctgcgtggtggcgggcggcgtgatcccgccgcaggactacgctttcctaaaagcccatggcgtggcggcaatttatggccccggcacgccaatgctggagagtgtgcgcgatgtcctggcccggattagccagcatcatgattaa

SEQ ID NO: 375141 - DNA, 276 bp, Salmonella enterica
atgacattgacgaatagagcaaaggctatccttagatggggaggcattgctttagtattcgccatctactctattgccttgatgataccagtgcttgattttggacttacccggaaatacaacggccccccttcaacaggtcagatggaagcccgtttatgtgaagcgatcataaatgacttatcgcggtcagtggataacctcttaattactgcatttgtcggtagcgctatttgccttgttttggccttgcttatcttcaagaaagtgagatga

SEQ ID NO: 375142 - DNA, 1158 bp, Salmonella enterica
atggctataggcttttgggtagtacagggcgataaaacaacatgcggtggatcggtactaaccggacacccgaaagggaagcagattggcccgaatctaaacagacaagcaacagtaggctgccaggtatcctgcggtaaacacccaggcattttcagcgtggttggtggataccctggagaatatattcatgggcagttagccgccagtacgatttacagccgttcgacctgcccgtgcaaggcttttttcattgccacccatacttttatgaaacacggcccttaccaggaaccagtgagagctacctctgcaccagtggaaacaaaagccgtatctgacccaatgcaagagccggaacaacacgcccaggtagcgaagaagcaaaacagctttgctgacacctgcaagccagaagataaccagctattgaacggtgtttacatctggactgaaaccacagacgcaggacatgctttcgtttccgtacatcaagacaatttgatttacgtttacacctacgggcgctttggtcgaaaaggccccgccacattaacaggtgatgggattcttaacttcctaactggcgatgatgcacgcctttactatcgtgaagaactgtacaaataccaagcgagagtttttcagatcgacgatgttactacggaagaaacccgcagaatttttgaatctctatggaactccggtaaaacaccagttttcacggaggcgatgggagatcgtactaagcggcgcggaaaggtaattgacgtttacgatctcaccgacagcaactgcacaactcacacagtgcaggtaatcagagaggcagggactaaaatcttcgataccagctacatatcaacaacaacgcaacttcgtatcgacaatgaagaagatttcactatccctgtttctttacagcgttacttgacggagaagagcggcgatctgtcttcaatgaacgttatggaagttaccagctcattcagagaacagcatgcgaacatcgaacacttcaagccgaactctgaaagcctcacaggacgagtggaggaagggcttgcgaacagtgcgtcaactgttggatcatcttcgggctattctggtggcacgattggcggcgttttaggtggttcgtatgacattgacgaatag

SEQ ID NO: 375143 - DNA, 210 bp, Salmonella enterica
atggtgatcaacctgaaacgcttaattgtgctgacgctgtcgctattaccagccctcgcccacgctgggcggatcacgttaacgctgacaaatgaacaggagacagacaacgcgaagatttgcatctacagcaacgccaattacacggagacagagacgatcagaccgttcgagcagtgcaaatacacctggacattcgaggaggactaa

SEQ ID NO: 375144 - DNA, 579 bp, Salmonella enterica
atgaaaggcattagccaggcgctaaagagtgcagacgaagttaaggcagtggcggcagagctacagcgcaataccaccaccaacctgttttattgcttgtgggtgtttatgtatgaaagcggtctacgtatctctgacgtcctcaaacttaagtatgaagatgtagaggggcaatctcacctcaaggtgaagcaggagaaaacgggaaacgtagtaaggccaaaggtgacagccgcgatgctgtcagtggtggcgcaacgcaagggagagcaagcagatatgccagtgaaaacggatttcatctttagcaagggcgatcttcgtagcagaggcaaagccgtaactcgtaacacggtattcactgaatttgggaagatgggaaggagagcaggattctctaacgtgggatgccatacaccacgtaaaagccgtgggcgcgtgatgttcgatgcagggatggctattgaaactatcgcccatttcctgggacagacagatccgcgctctaccatgtattacatcgggtatggtcaggatgtgcaggacgatttaacagaggagttttctttagaatggtga

SEQ ID NO: 375145 - DNA, 942 bp, Salmonella enterica
atgtctgttatccatcctcatgctgctggcgttgatattggcgctgaattccacgttgtcgccgttccaccggatgctgacgccgcgccggtcagaacttttcaacgtttcactggcgaccttcatcggatgtccgattggctcaaaacctgtcacattacgaccattgccatggagtccacaggcgtttactggttgcctgcttttgagatccctgaagctgcgggtttcaatgtgatccttgttaatgccagagacgcaaaaaatgttcccggtcgcaagactgatgtcaatgacgcacagtggctgcagaagctgcattcatttggccttctccgggccagtttcagacctgaacacgacatttccgtactcaggtcttatttgagacaacgggaacgcctgactgaataccgggctgcgcatatccagcatatgcagaaggcgttgatgcagatgaatgttcaattgcatcatgccgtatcggatattactggcgttaccggtctttcaatcgtcagagctattgtcagtggtgagcgcgatccttcagtattgatccagtatcgtgatgtcagatgtaaaaagacgccagaggttcttcaacaggcactgacagggaactggcagcctgaacatctttttgcacttgaacagtcggtggcatttttcgatttttaccaggaaaaaatccgtgagtgtgatgatcaaatcgaaacttcattattgcagctcagcaccggaactgaagagcctgaaggagtattgccctccgccagacatcgtacaaaacagcccaatcagctttcctttgatgtcagaccattactctggaaaattaccggagcagacctgacacagatacatgggtttggtccttatctggcactaaaattcgttgaacgagttttctcgttttattgttataatgtaacaacttga

SEQ ID NO: 375146 - DNA, 1659 bp, Salmonella enterica
atgcacagcgccctgaatcacggcgtgtttgatgatgtggtagtgccgtccgccccgctgaaagtgacggtgaaagcaggggatccggtcgggttcctcggcgctcaggatctggccgacgaagataattatccgcagattattaccacggactataaagcccatatcgagctgctgagcccagatgaacatgtgcctgatttcgtggcaaacgcgaaggctatcaaaacgggcaaacagttcattaagctgaagctgaaacggccactgtacctgcgaaacggggaggacgaggaaagtacctttgagcagatgagcgccattacccgtgccgatgctggaaaaattattccgcgtgatgccacatacccgtttacggataaaaacggcgtaacatactttcaaatccgcccacatacgtggatgcaccaggacgatgtggagcagctcagtcagcatgatttagccggactggactttgactgtattgaagctgaacacacaaccgattttacccgcacgctggatgaacgctgggttattgatgccctgaaaagcatcagctcgcactttgacagcgaaaaaggacccgcatcggcacaggcaaaaatgttttatgacagcctgatccacaatgctgaaaacagaagaccgcccgacccgtatcccgataaatcccaggacgaactgctgttcggcgcactgcataccaatcagatgaacatcccggaatatgcgcggcgactgatagtgaaacacgacagcgactggcacagtacacgcgatgatacacgctggtcatcgatatttacggtcagggatgaaagcccggttgtgaagatggccaacgggggatttctggatgcgacgcgctggatggataaggtgccgccgttcgccagtcagcgctcagtatggcattttcatccgcttgagtttctggagatgcttaagcccggaggtggcaaaatcacgctgccaatgttgcggaagatatggacaaatagccgcaaggtcagcgacgaggttctccagcaggtggcggatgagctaaacgataatctggaacgttgtcaccttaatacagaagtcaggctgtatcactttatggctcaggtttatcaggaaaccgggggtaatttttcaattactgaaaacttaaattatgcaccaacagcacttccagtttatttctcatattatcgccgccatccggaagagcaagaactcgatggtcgaacagcctctcaccctgcaaatcaagaaaatattgcaaataaagcatatggcacacgaaatgggaatcaccgtcctggggatggatggcgctacataggccgaggaatgaaacaattaaccggacgagataactacagaaaatttaccgaatacagttcgttaacatggggggagactatcaactttgaggagcaaccagatttagtctctgataacattaaatatgctgtcagatctgctttgtttttctgggatgataaaaatatgtatgttcaggctgataaaggatattctctggaagcatcagtcgctgttactaacataataaatagcggcctatctatggacgacaagaaagtaagatatgataatctggaagatttattacataaagaaatcttccaggacgtatttgattaa

SEQ ID NO: 375147 - DNA, 423 bp, Salmonella enterica
atgtttcctaaaaaattagcatgcatctttctggcattattaatgccatttgttcaggcaagcgcaaatgatttaatattcaaatgtgatgttaaaaatcacaagcaaataagtttgcatgcgaaatctggcgatgtcatatattcttttggtaggattggggaaaagcctgagtttgagttatccagaaaaaaacaacaaatcgaaacgaatttcgaaaatttatcaggaaggtatgcaactaattctataataataaggaatggtaattacagctacagattaaccacaagtatagacagaattgcagatattcaggaaccatcgacgtcattgacggtgatgaagaatgataaagacctcactactcttcaatgtattaaaggcagtgaagtcggtgcacttatagctattgatgattaa

SEQ ID NO: 375148 - DNA, 558 bp, Salmonella enterica
atgcgtctttttggttacgcacgggtctcaaccagtcagcagtctctcgatattcaggttaaagctctcaaagatgcaggggtaaaagctaaccgcatctttaccgacaaggcatccggtagttcaaccgatcgggaaggactggatctgctacgcatgaaggtggaggaaggcgacgtgattcttgtaaagaagcttgatcggcttggccgtgacaccgccgatatgatccagctgataaaagagtttgatgctcagggggtagccgtaaggttcattgatgacgggattagtaccgacggagaaatgggtaaaatggtggtcaccatcctgtcagctgttgctcaagccgagcgccggagaatactggagcgtaccaatgaaggccgacaggaagcgaagctgaaaggtgtccggtttgggcgcaggcgaatcatcgatcgtaacgccttacttgtgcttaatcgggaaggtattggggcaacagaaatttcccggcgactcaatattgctcgctcaacagtgtataaaatactcgaagatgaaaggggcttgtga

SEQ ID NO: 375149 - DNA, 855 bp, Salmonella enterica
atgtttgattttgccaccgcgtggctgcttcagaataaggtcctgctgcccggagcaaccacacttgtacgtctcgtcagtgaaatacgcgaacgggcaaatcagcggctgtggaaaaaactggccgcgttgccggacagctggcaaaccgcccgcgtgacggagctgctggacattcctgagggggagcgaatttcaccgctggagcaactgaaaaagggaccagtcaccgtcagcggtccggcatttaccgaagcgctggagcggtatatccggctgcgaaaccttgagttttcccggctgaactttaccggcctgcccgctatacagctacgtaatctggcgcgttacgcaggtatggcatcggtaaaatatatcgcacgcatgccagagcaaagaaaactggccatactcaccgcattcgttaaagcgcaggaaataacagcgctggatgaggccgttgacgtgctcgatatgctgatcctggacattacccgcgaggcgaagaaaaccgggcagaaaaaacggctcaggacgctgaaagatcttgaccgtgctgcgctactgctggctcgggcctgtacactgttgctggatgatctggctgatgatgctgaactgagacaggccatattcagctgcataccgaagaacagactggtagaatccgtcagcaaggttaatgagcttgcccgccctcagaacaataatttccatgacgagatggttgagcagtacggccgggttaagcgttttcttccggcggtattgcgagacctgcatttccgtgctgcgccagcaggagaacatacgctgaccgcgattcattatctggtcgaactgccggttcgctga

SEQ ID NO: 375150 - DNA, 429 bp, Salmonella enterica
atggaagtgggacgcgtcaacaagacgctgtaccttcttaattatattgatgatgaagattatcgcaggcggatcctgacgcagctcaaccggggagaaggccgccatgctgtggcgcgggcaatttgctacgggcagcgaggtgagatcagaaagcgctatcgtgaagggcaggaagatcaactgggtgatctgggcttggtcactaacgcagtggtgctgtggaacacgctttatatgcaggaagcactgagctggatgcgcagtaatggagaagaaaccggtgaagaggatatcgcccggttatccccgctgaggcacggacatatcaatatgctgggccattatacgttcacactatcggagaatattatgaacggtgaactaagaactttaaatttcaatttaaacaatgaattatctccttaa

SEQ ID NO: 375151 - DNA, 1491 bp, Salmonella enterica
atgatgcttttctctatcatatctgccgtaaatggtggtgtgttatcatctgcgtgcactcattttcttttagatgagagtaagttagttgagcctggtattattggcgataataaagagcgaacattgcactttgatgtgttacttaacgagctcacactctatccatatgaaacagcagatccattgttcatatctataaacgcggtgacctcatgctgcggtgagagtagtgcctaccaattggcgatatctacagggcggttccctttgtatgaatctgagattaatgagttgatgaaagattttctttatcaacatgtcgttgatgccaatggtcatgtaaaaattactttcaccgatgtatgtaagaggctgaattcattatggaggaagttcactgaagaaaatttacgcacaacttcaaaagatgaaaaggttgtgtgttcgtcttataccatgtctgtatctgtgccggaaaaagagagttctcttgacgaaaaagatgaaaagggtgtgtgttcgtcttataccatgcctgtatctgtgccggaaaaagagagttctcttgacgaaaaagatgaaaaggttgtgtgttcgtcttataccatgtctgtatctgtgccggaaaaagagagttcttttgaccaaaacaaactaactttgaaggatgtcaagaatttcaagaaaatacaatctgcctttaagcgcgaattgagctccattcagaaatcgttaaatgttcttaataaccgtaaagccgttgagcgttttagagagtataaaacggtcgaactctttctacaaacgggggtacatactgggttttgtgtcgccggtggcttgtcgagcgctgtaatcggcacggcaatttctcctggctttggtacgctcatcggcgcgggggttggcgcaggattagcgtggtcaggtaaaaagctttacgattatgccgcaggtgctgtaagcaataaaataaaccctaacccccatttaaaaaccagggaaattgaccggaaaataaaatctgccgagaaaggtttcttctgggagtgcggggcaaaaataaaatcactcgttgtggaaccctcgcgggggaccggtatcctcgcggctagccttatctcttcagtaatacaagaagtctcgatacctattcatgatatagccactgcttgttatgattatgaaatagcttgtgaaggattaacatctaaaaaagcgtctaagattgaagccttactggcaaaatatcatagcaagttgaataaagaatataaacaggtgctcaagtatcttgaggagaatccgacaccggataaccagcgacgtaaaaagaagatccttcgacgggatgcagtgattcgcgagcgattagcgactatccgcgaaagtattaaggacgctgtagaatcgcgaagattgagtattcataaaggccgcagtgtaatggcgccggatgacgaaaatcgtgccaacgaggcgatataa

SEQ ID NO: 375152 - DNA, 141 bp, Salmonella enterica
atgaaagcagcggtaaaaacgctatacgtgaaagcattcatggtgcatcaaggcggcaagcacatgaatcctcaggagcttactcaggtaagtgactggggccggtgcgcgcagtcaacgcagaggctacttgaaggatga

SEQ ID NO: 375153 - DNA, 399 bp, Salmonella enterica
atgacagaatgtcctgacagccgccgccggcaactctggagcatggcattcggcttttttatgccgtcgccagataccataatcgtcaacactgcgctgccctctatggcgaagttagccatcggcatggcggtactggcgctgaacggcagtaaaagcatggggatctcgccccaggtattagccgcacttgctgcgggcggcgcggcagcaattctgctctatctctttcatgcaaaaaaatcaggctcgttatttagcctgcgattgttccgcacgcccacgttttcactggggttacaggaccgttttgccgggcgtatcggcagcggtatgcagccgtttatcacgccggtttttttgcaaattggtcttggtttttattggtgtagacagtag

SEQ ID NO: 375154 - DNA, 3123 bp, Salmonella enterica
atgcaggtattacctccgggcagcacgggcggcccgtcgcgcctgtttattctgcgccccgtcgccaccacgctgctgatggcggcgatgttactcgccggaattatcggctaccgcttcctgcccgtcgccgcgttgccggaagttgactaccccaccattcaggttgttacgctctaccctggcgccagcccggatgtgatgacctccgccgttaccgcgccgcttgagcgccagttcggccagatgtcagggctaaaacagatgtcgtcgcaaagctccggcggcgcatcggtggtgacgctacagtttcagttgacgctgccgctggatgtcgccgagcaggaagtacaggcggcgattaacgcagccaccaatttattgccttccgacctgccaaatccgccgatttacagcaaagtcaatccagcggacccgccgattatgacgcttgccgtaacctcaaacgcagtgccgatgacacaggtagaaggcatggtagaaacccgcgtggcgcagaagatctcgcaggtctccggcgtcgggctggtaacgcttgccggcggccaacgccctgcggtacgcgtaaaactgaatgctcaggccatcgccgcgctcggtctgaccagcgaaaccatccgtaccgccattaccggcgccaacgtcaactcggcgaaaggcagtctggatgggcctgaacgggcggtgacactttccgctaacgatcagatgcagtctgccgacgaataccgcaggcttatcatcgcgtataaaaacggcgcgccggtacgactgggcgacgtcgccaccgttgaacaaggggcggaaaatagctggctcggcgcgtgggcgaataaagcaccggctatcgtgatgaacgttcagcgccagcccggcgccaatatcattgcgacagcggacagcattcgccagatgctgccccagttgaccgacagcctgccgaaatcggtgaaggttacggtactgtccgatcgcaccaccaatattcgcgcttccgtgcgcgatacccagtttgaactgatgctggcgatcgcgctggtcgtcatgattatctatctgtttttgcgcaatattcctgccacgataattcccggcgttgccgtaccgctgtcgcttatcggcacctttgcggtgatggtatttttggatttttccattaataacctgacgctgatggcgctcactatcgccacgggtttcgtggtggacgatgcgattgtggtgatcgagaacatctcgcgctacatcgaaaaaggagaaaaaccgctggcggcggcgctcaaaggcgcgggcgaaatcggctttaccattatttccctcaccttttcactgattgcggtgctgatcccgctgctctttatgggcgatattgttggtcgactgttccgcgaatttgcggtgacgctggcggtagcgattttgatctccgccgtcgtatctttgacgctaacgcccatgatgtgcgcgcgtatgctcagccagcaatctttgcgtaaacaaaaccgcttttcccgcgcctgtgaacggttgtttgaccgcgtgatcgccagctacggacgcggattagcgaaagtgctcaaccatccgtggctcacattgagcgtggcattcgccacgctactgctcagcgttatgctgtggatagtcatcccgaaggggttctttccggtacaggataacggcattatccaggggacgctgcaggcgccgcaatcatcatcgtatgccagtatggcccagcgtcagcatcaggttgcggagcggatattacaagacccggcggtgcaaagcctgaccacctttgtcggcgtagacggcgctaatcccacgctgaatagcgcgcgcctgcaaattaacctcaagtcgctggatgagcgtgatgaccgcgtacaacaggtgatttcccggctgcaaactgccgtggcgactattcccggcgtggcgctgtatctccagccgacgcaggatttaaccatcgacacgcaggtcagccgcacgcagtatcagtttacactgcgggccactacgctcgatgcgctcagccactgggcgccaaaactgctgaacgccttacagtcgttaccgcagctctctgaggtaagcagcgactggcaggatcggggattagcggcctgggtgaatgtcgaccgtgatagcgccagccgtctgggcatcagtatggcggatgtggataacgcgctctacaacgccttcggacaacgcttgatttcgacgatttatacccaggcgaaccagtatcgcgtcgtgctggaacacaataccgccaacaagccgggactggcggcgctggagaccattcgcctgacgggcaacgacggcggcaccataccgctcagcgcgattgccagcattgagcaacgcttcactccgctctccatcaatcatttagatcagttcccggtgacgacattttcgtttaacgtgccggagggctattcgctcggcgatgcggtgcaggcgatcctcaatacggaaagaacgctcgccctgccagcggatattaccacgcagtttcagggcagtacgctcgctttccaggcggcactgggcaataccgtctggcttattgtcgccgccgtggtggcgatgtatatcgtactcggcgtgctgtatgagagttttatccatccgatcacgattctctcaacgctgcccacggcaggtgtcggcgcgctgctggcgctgatgattgccggaagcgagttggatattatcgctattatcggcattattttgctgatcggcatcgtaaagaaaaacgccatcatgatgattgacttcgccctcgccgccgaacgcgaacagggaatgtatccgcgcgacgctatcttccaggcctgtttgctgcgttttcgaccgattctgatgaccacgctggcggcattgctcggcgcattgccattaatgttgagcaccggcgttggcgcggaattacgtcgcccgttggggattgcgatggtgggcggcttactggttagccaaatattaacgttgtttactacacccgtaatctatttgctgttcgatcgcctgtcgctgtacgtgaaaagccgttttccgcgccataaagaggaggcgtag

SEQ ID NO: 375155 - DNA, 135 bp, Salmonella enterica
atggaggaattatggaacacggtcgggattattctgaatggcgacctcgcgttgcgagtcgctacgcagctatcatcggtgaaaatcgttcacgcggcagagtgcggtaaagtggcggtacgacaatggaggtaa

SEQ ID NO: 375156 - DNA, 1353 bp, Salmonella enterica
gtgtttattggatttgactacggtacggcaaactgctctgtcgctattatgcgcaacgggcgtccacagttgcttacgatggaaaataacagcacgttgctgccgtctatgctgtgcgcgccgacgcgtgaagcggtgagcgagtggctataccgccattatgatgtgccgacaacggatgaagaaacccaggcgctgctgcgccgcgcaatacgctacaaccgcgaggaagatattgaggttcacgcgcaaagcgtacagtttggtctggcatcgctggcgcactatattgacgatccccaggaagtctggttcgtcaaatcgccaaaatcttttctaggcgccagcggcctgaagccgcagcaggtcgcgctgtttgaagatttggtctgcgccatgatggtacatatccgcactatggcgcacagccaattaccgggggctattacccaggcggtaattggtcgtccgatcaactttcaggggcttggcggcgacgacgcaaaccgccaggcgcaaggtattctggagcgggcggcaaaacgcgccggttttcaggaggtggtatttcagtatgaaccggtcgcggcgggcctggactacgaggccacgctgcaggaagagaagcgcgtgctggtcgtggatattggcggcggcaccaccgactgttccatgctgctgatggggccgcagtggcgtcagcgcgccgatcgtgaaaacagcctgctgggacacagcggttgccgcgtgggcggaaacgatctggatatcgcgctggcctttaaaaatctgatgcctttgctgggcatgggcggcgaaaccgaaaaaggcatcgccctgccggtgctgccgtggtggaacgccgtcgcgattaacgacgtcccggcgcaaagcgatttttacagtagcgcgaatggtcgtctgttgaatgatttggttcgcaacgcgcgtgaagcagacaaggtcgcgttgctgctcaaggtctggcgtcagcggcttagctaccgcctggtacgctgcgcggaagagaccaaaatcgccctttccggacaagcggatgtgacggcgagactgccatttatcagtgacgaactggcggtcgctatcagccagcaagggctggaagcggcgctggatcagccattagcgcgcattctggaacaggtgcaactggcgctggaaagcgcgcaggaaaaaccggatgtcatctatctgaccggcggcagcgcccgttcgccattgattaaaaaagcgctttctgaacagctaccgggcatacccatcgcgggcggcgatgatttcggctccgtcaccgcagggctggcgcgctgggcggaggtcgttttccgctaa

SEQ ID NO: 375157 - DNA, 1281 bp, Salmonella enterica
atgaaattattaatactgggcaatcacacctgcggcaatcgtggcgatagcgcgattttacgcggtctgctggatgcgattaaccacttccagacagaggcgcaggtggacgtgatgagccgctatccggtgagttcgtcatggcttttgaatcgtccggtgatgggcgatccgctttttttgcagatgaaacagcataacagcgccgctggcgtcatggggcgggtaaaaaaagtgtttcgtcgtcgctaccagcatcaggtgctgctttcccgcgtaaccgacactggaaaactgcgtaatatcgccattgcacaggggttcaccgactttgtccggctgctctccggctatgacgccattattcaggttggcggttcattctttgtcgatctctacggcgcgccgcagtttgagcacgcgctgtgtacctttatggcgaaaaagccactgtatatgatcggccacagcgtcgggccgtttcaggaggcgcagtttaatcaactggctaactacgtgtttggccattgcgatgcgttgatcctgcgtgagtcggtgagtctggatctaatgaaacgcagcaacatcaccacggcgaaggtggagaagggtgtggacactgcatggctggtagaccatcatgcgggggattttgagccgggctatgcggtgcagcactggttgacgatagcggcgaaacaaaaaaccgtcgcgattacgctgcgtgaactggcaccctttgataagcgtcttaacaccactcaggaagcctatgagaaagctttcgccggggtggttaaccggatcattgaagaagggtaccaggtgatcgcgctctcgacctgtaccggtatcgatagttacaacaaagatgaccggatggtggcgctgagtttacgccagcacatcagcgatctgtcacgttatcacgtggtgatggacgagcttaacgatcttgaaatgggcaaaatcctcggcgcgtgcgtactgaccgttggcacccgtctgcactcggcgattatctcgatgaatttcgccaccccggcaatcgctatcaactatgaacacaagtccgctggcatcatgcaacagttggggatgccggagatggcgatagatatccgccatctgctgaacggtagcctcaacgtcatggtcgctgatacgctgggacagttgccgcaggtcaatgaacgtctggtagcggcggtacgccgcgagcgcgagcaggggatgcggatggtggagtcggtattgacccgtatcggggaggcgcaatga

SEQ ID NO: 375158 - DNA, 1254 bp, Salmonella enterica
gtggtatactttacgcacatgaaaagaattgaaaaagtttttgggcccgtttatagaaatatatcatggcttatatttgaaaagctaattacgctaagcttagttttctattcagaaggaattattacgagagcgctttctgttgagcaatacggccaatggatatatgctttgaatttagttacacttatatcttcagttgccttaatagccggagcagagatcactattcctgcgctttcacgaaataaaaaaattataaatgaaattatcacatctgcgtttgtgattaggatgttattagcaatagttgcttatacattaattaatatatatacttatttttttattagtgatccatttctcaaaaaaatcacctatatactttctataataattatatttaacgaaccattttcgataataataaactattatcaatctatagttaatatcaaatcaattgcattcgttagaatgttatcgttattaggacgtgttgtatttatcattttttgggttaaattactatcatctgatatgattgcatggtcaagggtaattgaatttgtactgcttacgtgttttttgatatttttatggtataagaaatcttttattttttgtataaatctacagattttaaagaaaatatttttccgaggtctatatttttggccgtcattaatattaatgtatgtttatttacggcttgatagattttatgtagagaaatatttttcatttgaggtgcttgcaatatatgggattgcaattcaattgatggagcaagcttttatgctaataaggatggtattgcaatcaatagcgcctatttatatttataaaaaactcccgaaaactgaaatcataaaaaacttagtgtatttgatgtttggtcttgtaataatgagtataattattgcgttattaggacaattattattacctaaaatagttatttttatctttggtagtggttatagtgaggctgctttattaactgtgaaaatgttgcctgctttaatatttttttgtgtagataatgtattaatgcaatatttatttagggaaagaacaagtaagctcctttttattaaatgggcgggaggagtgattattttaactataatatattatttgttttttgacatttttcatagtaaaaacctatactttgtatataatataaattattttttgatggcgttaattaccttttttctttttatgaggaaaattagaagtgtctga

SEQ ID NO: 375159 - DNA, 165 bp, Salmonella enterica
atgaagacacatgtgatatacaattttcaagaagtatatcatcagaatctaagcacaagaaggcatcatactcttgtgataaacttacagctttattccatgccccctgttttcctgcattcttctgatagtggtacactatttttatttgatcttgacaaataa

SEQ ID NO: 375160 - DNA, 267 bp, Salmonella enterica
atggctaaacaagttgtaagtatcagtgatgcattgccttacaaggaatttgcaagacatatcggcaagtctccatacgctgttagggggatgattgaaaagaacaagctacccatagttgaaatgactgacccgcaatctgcgacgggccgagccggtgagtattgggtttatcttccggcatggaatgaaggcctgaaaaaggcatttgatagccgacctaaagaaattcgtgatggctggctgatgtggttaggccttggttaa

SEQ ID NO: 375161 - DNA, 300 bp, Salmonella enterica
atgccaacgataataggtgagaaacttgctttaatacgcgagtcagagaggcttaaccgtaagcaatttgctgaaattacagaagttccttatggttctttgacctactatgaaagtggccgtagtgttcccccggccagtgtgataatgaaaatcctacaaacccctcaattcactaaatacacgttgtggtttatgactgaccagatagcaccagaatccgggcagattgcaccggcgctcgcacactatgggcaagacgtaacaacctctcagcactcaggccaaaagactggttaa

SEQ ID NO: 375162 - DNA, 1014 bp, Salmonella enterica
atgacaatcaaaaaactcgatgatggtcgatatgaagtggacataagaccaacggggcgtaacggaaagcgcatccgtcggaaatttgacaaaaaaagcgaagctgtcgcttttgagaaacacacgcagtacaaccaccacaataaagagtggctgtcgaaaccaacagacaagcggcgtctgtctgaattaactcaagtctggtgggaactgaaaggcaagcatgaggagcacggaaaatccaatctgggaaagattgaaatctttaccagaatcacagacgacccctgcgcatttcagataacgaaatcactcattagccagtactgcgcagcacgaagaagccaaggtattaagccctcaagcattaatcgtgacctgacctgtattagtgggatgttcactgctctgattgaagctgaactattctttggcgaacaccctatcaggggtaccaaaaggctaaaagaagaaaaaccagaaaccggctacctgacacaggaggaaattgctttgttactttcggcacttgatggagataacaaaaaaatcgcgattctctgcctgagcaccggggccagatggggggaagcggcacgactgaaagctgaaaacatcattcataaccgcgttacatttgttaagacaaaaactaacaagccgcgtaccgttcccatctccggggcggtggtcaaaatgattgccagcaatagacgaggctttttattccctgatgctgattacccgcttttcaggcgaaccattaaagacataaagccagatttaccaatggggcaagcgacacatgcgctaagacacagtttcgctacacattttatgattaacggagggagtatcattaccctgcagagaatactcggtcactcacgtatagagcagacaatggtctatgcgcatttttcccccgagtatttacaggacgctgtttcactcaatccgctgaggggaggaactgaggtcacaagcgtccacacaatgtccacacctgagtag

SEQ ID NO: 375163 - DNA, 210 bp, Salmonella enterica
atggcatgtgcgccaaggtataatccggtgcatattcccatcataccaatactagccacgccaatcgatgcgcctaaaaccgtcaaggcggtattatatgcagcaccactgcttacactggcgacggctgccgagcataccccacctaaaacacctgtaaccgatgcagaggttcccagacacattaagcacctgggtttattgccgtaa

SEQ ID NO: 375164 - DNA, 1023 bp, Salmonella enterica
atgaaaagactactatttttattaatgatgatgcagtttacgcagttgggttacgcggcgtgtaatgcgaccttaaccaacacgaaggattatacgattcaatccgatagcttaatgctggggggggaagagtcagccattattacaaatggtttcactgatgccaattgttctaatagtgatgttgtgactaaattagagacatccgatcatattatcggtatggggccgaatgatagtgttaagttaaaattaaaagttgaatggcaaagcagtagtgcgataaatatgcgcaatcaaaacggtgtaatcgaagccccctataagataacgatttcagaaataaactcactggaggcggttactgtgtctgccagaggggggtactcggttacgatagataatatagcggtgatgtcgggtgcaaagaatcaatggagtagtagcgattggattatatttattttaaggtatattggctgttggggaaatagagagtgtgttgcgaacgctatcactgacctgaatggtaaaggtgtttataaagctaatgtaacgataaattacaaccgcaaagaaactacctgcgccccccagaatctcaccatcacgctggacccggtgcctatgactaaactccgcgctaaaggagaggttagtgaattttataagcagggtgatattatactggattgcgaaaatcaggtgcggaatgcgacgctgacatcacggcaaatagcggtgaatctacgtagtgatttagtctgggatgagaatgacgcagttctgaaaccggataacgataatggcgttgggtttatcttaagagattcaaatcggagcctgcttaaaataaacaaaggagcaacaataaacagtattttcaaaacctatgccaaaggcagcgcagtgaattcggtggaagctattcctgtctttgccacatattatgttctcgatcctgcaaaagttaaagcggggccattacaatcgaaagcattaatcgtggtatcttataattaa

SEQ ID NO: 375165 - DNA, 939 bp, Salmonella enterica
atgcgagtattactagctccgatggaaggtgttctcgactcgttagtgcgagagcttttaactgaagtaaacgactacgatcattgcattacagagtttttacgtgtagtagaccagttattgccggaaaaatccttttatcgattatgtcctgaattgcacaatcatagccgcactaaatccggcactttagtccgtatccaactgctggggcagcacccaggttggcttgcggagaatgccgttcgtgctgttgagctgggttcacatggtgtcgaccttaattgcggatgtccttcaaagctcgttaatggcagcggtggtggggctactcttctcaaagatccagaactgatctaccgtggcgcaaaagccatgcgtgaagctgtgcctgcgcatttgccggtgacggtaaaggtgcgcctggggtgggacagcgacgcgcggcagtttgaaattgccgatgctgtgcagcaggccggcgccactgaacttgttgttcacggacggacgaaagaagatggctataaagctgaatgcattaactggtcggcaattggcgaaatccgcaatagattaacgatcccagtgattgctaacggtgaaatctgggactggcaaagcgcgcagacatgtatggcggtcagcggttgcgatgcggtgatgattggccgcggggcattaaatattccaaacctgagccgtgtggtgaagtataacgaaccgcgtatgccgtggccggaagtggtcgcgttattacaaaaatatacccggctggaaaagcagggcgatacggggttgtatcatgtcgcgcgtattaaacagtggctgggatatttacgcaaagaatatgtcgaggcgactgcgctctttcagtcgattcgtgcgttaaaccgttcgtccgagattgcaagggcgattcaggccatcaaaatctaa

SEQ ID NO: 375166 - DNA, 861 bp, Salmonella enterica
gtggataaagccttttgtactattgatgagcaggaatggacggctgaggcatttttcgcgctgcccactgctgaaattcaatcaaaaagacgtagtttactgtgtaccgaatgtagtggagatgcatggtttagacggtctagttatggaaatgatgcaccgcatttttgtgcccatcaccaggaaaactgctcattaggtacttcatatgaagcagtgggcgagggtagcaatgataaggcattaccagtatcagatactgatagtggcttggttatagatctcgatttaactcaaagctatgatattgacgtgaaactggctgaacaaacctccgaagctacacctgtaggacagaggtttacgggtgaaaaatctaacgacggtggcagtgtaaaatatccagcacattttactttgaaacgattgctctacaaattagtacaatcaaaagggcaatgttatttagaaaagaagattggcttcaaaggtcaggattttagtgatttaccagagaatggtgctgaactatttgttgaatttgcaaatgttaagccatggatggatggagcacggaggatcttttggggattcatcagtgatgtcgggcaaacgaatgatgggaaaatttggttaaacgcgggtaatattaaatcaggtttaagtgtttgtattcagcaagatatagctagtgctttcagagaacaatttaaggtagtcaacagtctagacgagttggatggctgtcatgctctaattattggtaaatgtttgtatgcaacaactggtaaaccgattctatggtgcggcgatcttagctatgttgtacttagaaggtataaatctgatcaggaattatag

SEQ ID NO: 375167 - DNA, 573 bp, Salmonella enterica
atgactcaacgacgtgatctacaagcccttattcatgccgcgcccgtcggcaaaatgcagtgtcgcgttatcatctgctgttttctggtggtcatgctcgacggtttcgataccgccgcgattggcttcatcgccccggatactcgtacccactggcagctaagcgccagtgaactcatgccgctgtttggcgcagggttgctggagcttacggctggcgcgctgctatgcgggccgctggcggatcgctttggccgcaagcgggttattgagctttgcgtggcgctattcggcgcattgagcctgctttccgctttctcgccggatatagaaatcctggtgctgttgcgcttcttaaccggtttgggactgggcggagcgatgccgaataccatcaccatgacgtcggaatacttgcccgctcgtcgacgcggagcgctggtcacgatgatgttctgcgattttacgctggggtcggcgatggggtcgtatggcgtggatctgaactgcggctggactaagtttatgaaggatcaacttagtacaatagcttcatccaataatttgaactag

SEQ ID NO: 375168 - DNA, 1965 bp, Salmonella enterica
atgccgaggccagttggaaataaagagtatgtgcttattgatatgtccttcatgcaggatgattctgttcaaaaggtcgtcaatgtaaataaccgatctttccagacgataaatccagcggatctgccattaataggtcacagtagttcaacttcaaccttaaatgatctcctggatcacgcagaagaccgatctttccaatctgctagctcggagtatcggggtgcatcgagccgaagcagttcgacgttaacacttaatgatactctcgatagcgccgaaaaccgcctcttccaaccgattaactcagacagtttgggcttgataacgcggaatagttctacgttaacgttaaacgaccttctggatgcaatgggaacaaaagcgacagtttcagaaacggctgtcaatcaatacggtgattgtttaataaaaatccctgatgacaggatacccgctgtcaacgacgaaatcacatacaccgaaaccagggatacctgtgtcacgatccctgaagaaattctctctcctcgtgaagcagacgccagtgatgtatgccttgagattgatgctaaaattctgaagattttaacgtgttcttatcagtatcaattagatgatatcgtcggtgatatcatgccagcagagagtgataacgccgaaaaagtccgccaaataatgagaatgtacgctgaacaatacagacacgtttatgagcgctctggctatttttacaaagcatacatgtcattgcataaatgtgtggaaaatttattaccctattctttcagagcgggtgggaatattagttttcatcttctgctacaggcgcttttttttgatggaaaatataataatgcggctttaatacgcgaaacaataccaacagaaccacccgcaccaataactatgaaaccggatgctttctttaatagtatcctctcattaaacttatcgcaagttaaactctttggcgacgttatatctgcattactcttccatttcccaactattttttaccagtatcctaagttaagagatgaaataaatcagtgcatagagaaacgtgcggtgacgggatccgttgttgccagactcacattatgcctggcgagcacgctattagcgattgcaccgcttgtaatgctaagcggtgcaatgtcggtaggaacaatacttcgacatgtaggaagaggtatcagctatgtagatatccctatcgtcttaattatattaggtgaaagctggtatcaagcatacaaatttggttcatcaagtaacgagaaagcggcgcagaagtttatcgctcaagaagctgcattcaagacaacacaacgggtcctgactcaggggttaagtttgttctcatctttatctggcacaattatgcgaagtgtaggtaagggaacagctccagaaatgatgttaatgtttattataaatacattgaatcttttgctgtatcaaaatccatacgaaggtacgtcagttgacggaaaagcattaaaaaggacggcttacctggctggcaatgaggagattactgtacaaacgatagccttgttggtagatcttaagagtacgggggtcattacccagcgattatttagctgttcagacagactcgcttacgcgataaatctacgaagaacacaaccaggtgatcaagtgcatatattaaaagaggtcattagcgcttgcgcgcgcggacatcgcgctattttacaagaaaaggataaacagatatgcctgacagccatagaccatatctattatggtaattttaatcccgctttattagaaagtatccccgaagagtttgctgctttccttacttacttaaatacgttacgaaaaagagatgcgtcatgtctgagtctgggcaacgaggtaaacgaaaaaatcattgcgacactcataaaagtgctttccttccgcgaaaccgttttgcttgagagtgcctga

SEQ ID NO: 375169 - DNA, 531 bp, Salmonella enterica
atgccgaacatagcatcaatcccccgtactgaacgacgcctgatgcagaaaactattcataaaacgcatgacaaaaatcatgcccgcagactgactgctatcctgatgttacattgggacgaatgcgtcagcgatgtcgccagaacgctttactgtgcccgctcatcagtagggcgctggattaactggtttacactgtcgggtattgaaggtctcgtctctttacctgcggggcgcggacgtcagtggccgtatgaacatatctgtgcgttgctgcgccaactggtaaaacacacgctgggcgattttggttatcagcgttcccgctggagtacggaactgctggcaataaaaatcaacgagataaccggatgtcagttacatgccggaacactccgtcgctggctgcctgcggccgggctggtgtggcgaagagccgctcccacactgcgtatccgtgtcgcgcataagctatttatgccagagacgtgcgtctatgtaaataaaagcgcgttgcgtcagatacaatga

SEQ ID NO: 375170 - DNA, 771 bp, Salmonella enterica
atgtcggcgtatctgacggcctgtgccgcgcccggcccagaaaaatatcagactatcatggacagcgttacggcagaaaaagtaaacaagattattcgctcggatgtcatcccttcttcaggtgaaaatcacggggaagttatcagccgcgtgtcatctgcttttctcggtacgccttaccaggcagatacacttatcggcgggcccgacactcccgaatcgcttgtcgtgaatttcaacggcgtggactgctttaccctggcagattacgttgaggccctgacccgcagccatgatcagaaatcgttcctgcataatcttacagaggttcgttacaccggagggaacgttgactacctcagccgccggcacttcttctctgactggtttgccaccacaccacgcaatgcccgggacgtcacgccggatatcagccctgactatgccactgcggacaaacagcttaaccgtaaacctgacgggggggagtacattccgggtctgggcattcattcccgtaaaataaattacattcccggaaaggccatcagtcagcaggtgctggaccagatgagaaacggggattatgtcggcgtctactctccgcttgaagggctggacgtttcgcatgtgggtatcgtggttcgccacgacgggcaggtatggttcaggaatgcctcttcgctggccgccaacagaaaagtggtggattcgccgtttctggaatacatgcgcgcgaaaccgggcatcgtcgtgctgcgggccgagtga

SEQ ID NO: 375171 - DNA, 195 bp, Salmonella enterica
atgtcagataaagaactcagccggatcaacgtcattcagtcagttgttgaaaaacgtatgctccggcgtaatgccgcccatcagctgaataattggctcaggacaagatggatgaactggaacgaagtggaaaacgggacaggagtaaaaaaatgcctaagcgacgtgcacaggccagtgttcaggaacaactga

SEQ ID NO: 375172 - DNA, 213 bp, Salmonella enterica
atggtgatcccgctggccagagccctcctgctgtcagataaagtctcccgtgaactgtatccggttgtgcatatcggggaggaaagttaccgtctgatgaccaccgacattctaatgtcacttaacccatttagtgatgtcactttttctggcatgaaggatccaatcctcaggccatggggacatcaggatgcttgtaaccatgtcagataa

SEQ ID NO: 375173 - DNA, 540 bp, Salmonella enterica
gtggcaaaagagaccatgataccgctgctcgcgattgccgcgtggagcggcacggggaaaacaacgttgctgaaaaagttaattccggcattatgcgccagtgggattcgaccaggtttgataaagcacacgcatcataatatggatgtggataaacccggaaaagatagctatgagttacgcaaggcaggcgcggcgcaaacgttggtcgccagccaacagcgctgggcattgatgactgaaacaccggagcaagaagagttggatctggcatggctggtgagtcgaatggatgcatcaaagctggatctggtgctggtagaaggctttaagcatgagcccgtggccaagatcgttctgttccgtaacgacgctgggcacgatgtgaatgagttggctatcgatgagcatacgatcgccgtagccagcgatattgcgctgaatattggcgttccggtactcgatttgaatgatgttgatgggattgtggcgtttatcgtagcgaagttaggcttaactgccgccccggagtgggcgtaa

SEQ ID NO: 375174 - DNA, 4113 bp, Salmonella enterica
atgaaaggaatacaaataacacccattgctttactggtggtaaatactatcagtatgagctctgcttatgcagatataccggtaacttgtcatactacaggcacaagtgaaagtgatttattttgtggtagtgttagcaatactaacggggcagtaaaaagtctggcgatcggaaacaatgcgtttattccaaaagccattattcctggtaaaacgggaattgaacaggctattgctataggaagcaatgttcaggcgacaggagataactctctggttattggtaatgacgctattaccggaaaaacgggttctgttgctattggaggagatgatgcggcagggacataccatgcaaaaggtaagggatatatattgagagccgctggttcgaatagtgcggataataatctcacaaattttagagccaatgccgctattggcaatggtgctgtatcgttgggtgctaactctcaggctctgtctgatggtgctgtttcaatcggcgcagcggcaacggcaggtgcaggaactcaaaacggaacgacctggaatagtacttctggaagacaatcaattgcagttggtgcagaaagttcggcgttgcaggataattctatagcattaggctatcgttccgaggcaacaggtaattcaagtacagctattggtaataatgcatcggcaaaaaataataatgcattggctatgggacgggaggcatcagccaccggggaacaaagtatagcactaggtatgaactccggtgctgaaggttctgatgcactcgctttaggaaatagtgctcatgcagatgcggcaggagcaatacttataggccgcgatgcaaaaaatacgaaagacacgttgtcggctgttggtctgcccgcagataacggtataaatgccataggcattggtagctcggtgaggagtgcggcaaatggaatcgctattggtcgaggggcagaggccaaaatctctgaggctacgacgattgctatcggcaatggtgcagttagtgcaggcggtatcgctattggacagggggcttctgttgtcaagggaaacaacccttcgggaacagccagtgcatctgtttctgttggtcgtcaaacggtggtagctgactatggcgtggcattaggatccagagcttctgttggaataactcttactggcgatggcaaccctgaaagagtaaccactggggggctctatggtacagctgtcggtataaatagcggcgtttattcgaattcggcactggctgtaggacataatgcgaaagtgagtgaaaatgcgaatgcagcactggctataggatataattctctgtcttcagcacaaaatgcgatagccatcggaaaaggtgccaaagcctctgctgataatacaattagtattggtacaggaaatatagtaagtggtactaattcaggtgcaataggagatccaagtaccgtatcaggtgtgaattcttactccattgggaataataatattatatctgccagtaatgcttttgtactgggtaacgctgttaataatgccgtagataattcagttgtacttggtaatgactctacggtttcggctgccattgcaacgcctggctatagcgttaatggtgtgtctcacaaatttgcgggctcttcgccgatatctactgtgagtatcggagattccggaaaagagcgaaccttgacgaatgtagctgccggtcgactttctcctgtcagcacagatgctattaatggaagtcagttgtttgcggttacatctgaagtggaaaaaggcaatctgtttgccggtaataccgggacattcaaccgtcgtctgggtgaaaccaccacgatccgcggcggcctggccgcagatgcggctgcgagcaataaaaatatcagaaccgtggcgaaggacgggcaggtggatatcctgctggcagataatctcgatgttacgagcgtgaaaacgggtgatacactgcttaatactgatggactgcatattaccggcggaccttctgtcaccacgggcggtattaacgcgggcaacagggttatcagtaatgtgggcgatgccgtgaacgacacggacgcggtaaacaaacggcagctggataatctgtccaccaccgtcagcaggggctggaatatacaggccaatggtggggataccgagacggttgcgcccggggacaccgtgaacgttacccagggtgataatattgaggtaacccgtgctggtaagacactgaatattgccacctccagaaaggtaaactttgataatgtcgtgatcggggcgattacgcttgataaagactcgggaaaaatcagcggccttgcagatggggcactggcaccagatagcagggatgcggtaaccggcagtcagttattctcgaccaataagaacgtctcgacaaacagccagaatatagccgccaacaaagctcaaatagacagtgggctgaattttgccggtaataccgggacattcaaccgtcatctgggtgaaaccaccacgatccgcggtgggctggccgcagatgcggctgcgagtaataaaaatatcagaaccgtggcgaaagacgggcaggtggatatcctgctggcagataacctcgatgttacgagcgtgaaaacgggtgatacactgcttaatactgatggactgcatattaccggcggaccttctgtcaccacgggcggtattaacgcgggcaacagggttatcagtaatgtgggcgatgccgtgaacgacacggacgcggtaaacaaacggcagctggataatttatcatctattgttgggcagggattgacatttgcagctaatgaaggtggtgatcttacgagaaaaccaggggatacgctggtccttaaaggtggggctacaacaaaaggtgattacagtggtaaaaatattaaaactgttactgatgtttctagcggaatgatttcgattcaaatcgctgaaagccctgtgtttggaagtgtggtcgttaacgacagtaatagcgggaaaattacaggcgtcagtaatggaattattgctgcagagagtagagatgttgtaaatggaggacaaattcatcgtattacaacctctatcggtaatgttattggaggtaatgcttatgttgatcaaggaggagcgctggtagccagtaatattggtaacacaggtaaaaacacaattcacgatgccattgactctgtaagaagtactgctgaaaccgccagcgcaggatggaatttatccgtaaatggacagcagtcaagtgcagttaaacccaaagagacagttgatctcaataataatgatggcaatatccatctttctaaaaaagataatcaggtcacttttaatctgtctgactcagtgaaagtaaaagaaagtattggtattgtaaatggaccttcgctgaataaaacaggtatagacggtgcaggtatgaaaatcacaaatgtggctgatggtgtaatagctgcaggaagtaaagatgcagtaaatggcggacagattcatgattttgtgagtggcgaagttaccaggccgattacatttgcagccgatagtggtactccttacgatgcaaggttgggctcgacagtaaatatcaaaggtgatgataaaaatattcgcacggtagtgaacggaaattctcttagtgtcagtctgaatgagagaattaatgttaagtctgttacagcaacagaatcactgtctgtggcaaatggcgcaaatgtcgatatggggggaaataccattcataatgtaggtaatgcaacccgtcctggagatgctgttaattatgggcaattccagcaggcatttagtagcctgggaaatcagattaatcgtgttgaacgcagagccaatgcaggcgcagccgctgcgatagcgactgcaggtttaacccaggcatatattccaggcaaaagcatgatgtccatgagtggagggacatttcagggagagagcagtctggctattggcttatctaccatttcagataatggaaactgggtattaaaaggctcattttcctcaacgacaagaaatcagaccggagcatccgtaggtataggattccagttttga

SEQ ID NO: 375175 - DNA, 828 bp, Salmonella enterica
atgaaaatatatgctggtaaattattgatattggctggagtaataactctgttcggttgtcaacaaaatccgagtcaccctggaaaagatggtagtattaaagaaattatctggccagcgcctgcaagagcaaaattaggttcagggcagggtgttttcccaaccccagagaatataactctgcttgataaaggaatgacgaaggatcaggtgtatttactattaggacgccctcattttgatgaaggtcttttttctgttctggaatgggattatcttctccacttcagaacacctggttatggtcatcacggagttacaacatgccaactcaaaattatttataactcagataagcgagtgtccggtatatactggagaagcgttggttctgaaaacattatttgtccaccgattttacatgaaaaagaagagacaaacagatatacgcttaatgctgatattctttttaggcttaatgagtatcaactcaacatgtcagataagaattcacaaaataatctcgataaaataatttcctctattagagaaaggggtaaatatagtagtatcagtgtctatggttatgcagaccggcaaggtactcatcaacataatatgaaactttcagctttacgagcaggatatgtgaaaaaatacctggtatctaggggttttcctgaggataaaatatttgcgaagggtatgggggaggcagtaccggaaaccagttgtcctggattaataaacgaaaggttgactgagtgtttacatccggacaggaaggttactgtaattgttacacctgtcatcaataatagaaagtga

SEQ ID NO: 375176 - DNA, 489 bp, Salmonella enterica
atgaaaaagtatctatccttagtgggtcttggtattattttacttacattgaatgcatgtcatcagaaaccggtaaagagtgtcgtaactcctattactgcaccagtacaacatcaactcccttcacttgagttgttaacactaagtgagtccgcccataatggatggtcggaggttgaactcattggaagaaaatggtacgttgactctgacacagctttgacacgtagtgaacttaactctttgtcattaggacagaatgacaagaaagaaatgtttttgaatattattcctaatcagcaagggcaaagaaaaatcaatgaagctttgcgtaagaaagttgattatgtattgttggtattaaatgggcaagcgatctctctttcgaagattaactcctctcagaaactgccattttatgtcggcgatgaaaatacgacaataaaagtggccgaagagattacacaaaagaaaattactcaccagtga

SEQ ID NO: 375177 - DNA, 885 bp, Salmonella enterica
atggaaaaaatacgccaagcttttttgtcttcaaattcaagtattgattttattgaatactgctcgtgcccctatataatacttccatgttcacaggatacacagacgtcagaacttgattgctatatcgatgttttttatataaaaaaaggggtggctgaattaatgtttaatgcacctccatcaataaaattgtcaccaggcgaatttatcttccttaacagaaagtgcagcgattgtttttttttaacgggagggcaggatacagagatattgcaaacaagagttgtccccagagggttatataaagatttaatagtgtactatggatgttataatagcttatatgtgctggattcgggccatattgatgtcatacctgtagccagcgaaatgatcagcttgttgctaaagcttcagaaaactaagtcagaggcaattctttctctggaagtgccaatttcacttttttttatacatatttatcttaataaagttgcaaattcttcattgccttttaataacacggggcatcagttttttaagctgatcctggaaatgataaaaagtcctgattatccatggcgtgtaaaagatatggcaaaagaatacaatatgaaccctaactcttttattagtgagttcaagaagatatcaggatttacaccatgtaattttttgaaaaaaacaagactgaacagaggacgacagttactggagaatacggatattcccgtagcagtaattgcccgccagtgtggctataatagccatgcctcttttgcgttttatttcaaaaaggaatatggtttatcccctctaaagatgcgtaataatgcacagagtaaatatatgcttgagatatcagaaagacttaatcaatag

SEQ ID NO: 375178 - DNA, 417 bp, Salmonella enterica
atgaaagataattccgcctgtagcagttcggcattattatttctggatggcgataattttaaatatattaacgatacctggggacgtgcggcaggcgatcgcgtacttattgaggtcgccaaaagattagcggaatttgctggtaaccgttatcagacttaccgactcggcggcgatgaatttgcgatggtgctttacggtgtacattcagagtatgaagtacagcgtatttgcgcagcgctatcccagcagtttaatcgaccttttgaactacataacggccagcggataacgataagtctgagtattgtcttcgctctgacatgggagcacacctctgccgaaaaactaaaagaacgggcagatcgaaatatgtatcaggctaaacaccagcgtagcgaacacccgctaaactaa

SEQ ID NO: 375179 - DNA, 519 bp, Salmonella enterica
atgcgtttttctcaccgatttatccttctgttctcgctattattagcaagtttgcctctgtatactcaacgcgccacggaagaagaaaaatccgtacgcgccatcgtctccggcatcatcagttatataccctggccgacgttatccggcccgccaggactatgcatattttcatcttcacatgttgccagagtatttagcgaggaggcaggcggggatttcccttatcaacctcttatcatccgtaccacacaagaagccctgagcgcccgctgtgatggtttttactttggcaatgaatcgccatcttatcaggtggaattaacgcgtcattatccagttaatgccttgttattaattgccgaacaaaataccgaatgtattattggccgcgtattttgtctgatcattaacaataatgaagtcaacttttccgtcaatccagattctctttcgcatagcggcgtgagggtaaatccagaagtattaatgcttgcacggaatcaaaagcatgaataa

SEQ ID NO: 375180 - DNA, 654 bp, Salmonella enterica
atgaatattataaaaaactgtttttcattcctcaacagtatgttgggtatgagcggtaggtcatacgcggtctcagaaggacatatagcgagtaaattggggagtaagatagtaaatgtgaaaaatggatctgcagagttacttacgtatagaagcgcagatttatcaaaagagcgtgttattacacaggagattttgtcacgtttagacattagggaaaattttgttgctgtaagaattcaggaggataaatttacagatttaaaaaataagacaatacaagggcataaggatactgtggcaaaagtaagagactggtataatccctatcaaaattatcttggtatttctatgggaagagttgaattatcatccgagatagcaaaaaaagagtgtagaaatgccatgaatgttatgctgatggaaagaaatgactttaacaataaaattctaaattccgataatttacagaaacaatacggaggtaatgggaataaaagctgggtagttgcaccgttaaaagaacttcttgataaaggtgcgaaagtttatccagatgaaacatgttcattaagattaggtcagccgtttatcataactcttccggaaacgacaaaagtcaatgttgatatttatccagtgaacaaaaaatag

SEQ ID NO: 375181 - DNA, 300 bp, Salmonella enterica
atgagcggtaagcattatcccgaagagtttaaaattggagcagtcaaacaggttgttgatcgcggtcattctgtttccagcgttgcaacacgtctcgatatcaccacccacagcctttacgcctggataaagaagtacggtccggactcatccattaataaagaacagtcagatgctcaggccgggctccgccggctccagaaagagctgaagcgggttactgacgaacgggacatattaaaaaagccgcggcgtacttcgcaaagctgtccgactgaggtacgcctttatacgcggtga

SEQ ID NO: 375182 - DNA, 363 bp, Salmonella enterica
atgttaaaattaattatgtgtgtcaaaagacgtacccatttaacgcgggaagagtttgatcattactggcgcaaccatcatactctattggtgattaaacacgccgaatgcctcggcatccgtaagtatgtccagactacgcccattgcaaacaatgcagcgcaatcagcacttcagcagacaagaaattcagcacccgtcgattttgacggttgcgccgaattatggtgggacctggaatcgcatcttgtggcccgaaaaacaacggaaggtttaagcgcccttcgggagcttatgatgatgagggtaaattcgtggatttggaacagtcgcaactctggtacggcgaggagttgtgtgtga

SEQ ID NO: 375183 - DNA, 333 bp, Salmonella enterica
atgcaaattggaaaactggcggcgctgaccggcgtgagcatacgaatgctacggtattacgaaagtgccggcttgcttcatcctgcgcgaaccgacgcaggctatcgcagtttcacgtcagaagatgtggatattgtcagacgaatactcattctgaatggcgcaggtttcaccctaccggttgttcgtcgtttgttgaattgcgtacattcgggaatggaaccctgcgaggaactgaaaactaaagtgcgggaacaactgacgcagatagactgtcagtttgaagcgctctcggaaagtcgtaagcttcttaataaacttctcatgatctga

SEQ ID NO: 375184 - DNA, 1122 bp, Salmonella enterica
atggcgaatggtcggggcggttgggtagttctcggtgtaaaagaacaggctggaaaatttataccagttggtattgttgatcccgaaaagattaaggccgatctgtttaatcagttaaacgatcgcgatcgggtcagtgcgaatgtgctgagatcagaaaacgatgtgcaacaggtctctttgcagggaacggacgttctggcgatccatattccacaggcgatgcgcaaacaaaagccggttcacctgaaaaagtccccatttggtaacacctatcaacgtctgcacgaaggcgatcgcgtttgtgatgatatgaccgtcaagcggatgcttgcagagcagatccacgacagccgcgataatgaagtgctttccgaacactacacctttcaggacgacatcgatctggacagcctgaaagtctatcgcaatctgctatcggcaaataacccgcagcatccttatctggcctgtgagccgtttgaattatttaaaatggttggtgggtggcgtaaagacagagaaaccgggaaaaaagggattacgctggctggcgttctcatgtttggaaaatgggatgcgattattgccgcagcgcctaactacatggtggattatcaggaacgccccgaagctaaaacagaattacgctgggtggatcgggtatgcccggacggtacatggtcagggaacttgtttgatttttatcgcaaggtataccaaaagctggtcgccgatcttaaagtcccctttacgcttgaagagggtcagcgcagaacggatacgccagtacatatcgcactgcgtgaagcgctggtcaacacgctggtccatgctgattttaccgatcgggtttctattctgatcgtcaaacgtcccgatatgtttggctttcgcaaccccggcttgatgcgcctgccgctggaggatgtgattgcgggtggcgtcagtgattgccgcaacaggttgctacaccagatgtttttgctgattggtctgggtgagaaagcaggttcagggatgccgaagattttcagcggctggaaatcggctaactggcgaaccccaaactttgggaaagacgtttcctgcacagacgctattagagctttctacggctag

SEQ ID NO: 375185 - DNA, 321 bp, Salmonella enterica
ttgggaaagacgtttcctgcacagacgctattagagctttctacggctagcctgatcccgcagcatgttctggatgatttgcatcagcggtttggtgaaaccttcgatcagcttgatgattttgaacaggtgattgttgcaacggcggcgattgaaggctgggttaaccatgaacgcgcttgccagttaacaacccgtcattcccgcgaagtcacgctgacacttccccgactggaaagtaaaggttttctggtcgcaggggggggagcagaaaagcaaatattacaccttgcccggcgtatcggtcatgacgccggatga

SEQ ID NO: 375186 - DNA, 519 bp, Salmonella enterica
atgacgccggatgaagttttctcgttgggggcggttgtgagctccacacataacgaggggaactccgcatataacgagcagaggtccacacataacgagggtaactccacatataacgagaagaggtccacacataacgaggaaaactccacttataacgccggggacgatcaacccgcgtcccgggatgagtatggacgtttgcttaaccgctttatcgacagaccctatattgatgatgttgataatctcaccgaagctttcagggattcgttgtttactttagcagcggttccgcgtgaaaggctgcgtcttggggataaggagctgatgaagagtgtgatcctgaatgtgtgtcaggggcagtatatttccgttgctgcgttggggcagatccttagtcgtaaccctaatgcgctgcgtcagcagtacttgaaaccgctggtggagcaaggggaactgaaactggcgtttccgcagtataagaatgaccctaagcaggggtatagtgcggtttga

SEQ ID NO: 375187 - DNA, 2109 bp, Salmonella enterica
ttggttgaaattgagtataaaaaacatgatggtattattcgtgcatttatctcaagtcttatctggcgtaagcctgataatattgaggaaaagacgcttgaatatattaataaatatatcattccatttgataacggctttgatgcctttatgcaaatggtttataccgtatcctccgaccccgaacatatttataatgcagacaagttacacaaatttctttcaaaacattcaatggcaatcagagattcattctggacgaagtatctccataacttagattattacgaaacttcttcgatgcagcgtttaattgactgggctggcgcggaagaggataagttttatttatcggatgactcaagattactggctgctaaggcgttgtcatggctactgacgagcacgaatatcaaactacgagatagcgcaacgaaatcgttagccaatttattgaaaaatagtattaaaacgattacggcgctcatagacagctttaaagatgttaatgatccttacgtactggagcggatcctggcggcctcttatggcgcggttttaaattctgttactctggatgatttagataaactgtctgaaaatattgttgccactatttttgaagctaaagaagtatatcctaatgttcttgtcagggattatgccagaaatataatagaatatgctttatataaaaaagtatatcaaatggataatgttgatattattcggcctccatatcgaagtgattttccaacgactttcccaaccaatgaggaaattgatgcgtataaatatgattataatgctgcggattttaaagattactattggggacaaaatacaatattaagctccatggttactgagtatggacgggggatctgtagctatggtgatttcggacgttatacttttcagagtgcattatctggatggtgtgattttgaccctaatgatctaagtaactatgcctgtaaactgatttttgagaaatatggctatgatgttgagaagcatggacagtttgatcgatacgccagtgagggggatagaagcaggaacaaaaaagaaagaataggtaaaaaataccaatggattgcattgtatgaggttttggcgcgtattgcggacaatcatcaggtggtcgaagggggcagtctctggtcagagtcgaaaaattatgtctggtttcaggggccctgggaattgtttgtcagaaaaatagatccaaccacgccatcttatagcaaagagattataagacaaaaaagcttctggaataatgaaaatccatataatgactgggatagcactattaatgattggttgaagagagaggctaatttacctgatccacttgaactgatatcagttctgtctgctgatgataaaaaatatttattacttgatggcttttttacatgggatgagccacttcctcttggtgaggacgaatatggctatgcaaaaaaacacctttggtatcatattagaagttatttattaaaagaagatgaattaccaacgctaatatccaatttgaataaagatctgccattaatccgaaatttaccagaatcgcatgatcaataccgagtctttagccgagagtattactggtcgcctgcatatcaatattttgacgacccgtactacggagataagggatggcagaatatttatactgattggcaaaagcagggagaacccattgcgacgatttgtctgacatctgaaagtcatcattgggagtctgattcgtccggtgataatgaactatcatatctggcaccttgcgaatttatgtatcatggtatgaagttgaattattctgaaaatacaggagaatggttggatagtgatggcgatgttatatttttggatccgtctattcacaatgaaaataaatcagcactcattgttgataaagataaactagagcaatttttattaaaaaatgaattgaatatagtttgggttgttaccggtgaaaagaatattcactcaatgcgtcctattgatctcgatggtgataaatggctggagatatatgggatttatactttaaagaataataatgtagacgggtggagaataattaaataa

SEQ ID NO: 375188 - DNA, 462 bp, Salmonella enterica
atggctacgatccccgctcagatacacccgttactttccgttccctttaatgccaccacggacttcaccgtccttgccactcactgcgaaaacttcgccgaaaccctgatggaaagcgacgacccggcgctgcggctggcgctttgcggacggcttgccgcctgcctctcgctgctgcggcccacgctgaacgaccccatcccgccccacctgatcgaaagcctgaccgttgattttcttcctgccactcatccccgctttgaacccggttccgaattactttgcgactactcacttacgctggcgcagcttcttacgggacgggcgctactgccgaaaatggaacggacgctgaccggattactgtgtgaactggtctggtatttcgccgccgaactcaacgccccgcgctggctgcgcaccgccgacggcgtaaagtttattgacgaggtggtggcatga

SEQ ID NO: 375189 - DNA, 222 bp, Salmonella enterica
atgagcatgatgcaaccggactggcatccggcggatatcattgccggattgaagaagagaggcacgtcgctggctgccatttcccgtcggtcagggctggcctcctccacgctggcaaacgcccttaatcgccgctggcccaaaggcgaacgactgatcgccgacgcgctgggcgttgcgcctgaaaaaatctggccttcccgctatctcagaccgcgttaa

SEQ ID NO: 375190 - DNA, 174 bp, Salmonella enterica
atgttctgccacctgctgacgtccggcctgttgcagcacgctacgcagcgcggccctttcattttgcagcgtccgtttaccgatctgctgcgccagccgcgcctgaatacagcattcgatatgacgaaccttgatctgcgccacccgctggatctggatattcagcgcacgtaa

SEQ ID NO: 375191 - DNA, 453 bp, Salmonella enterica
atggggctgcgttcgcaggaggcggtacagtgctgtcagtcattaaaaacgtggaagcaggcgctggaacgcggcgaaacccgactgactgtagtgtttggcaccaaaggccatcgtccgcgtgaaaccattattcaggatactggcgcagttaaaaaagcgctggataatgccctggctgtcgcagagcaacgtaacggcaggctgattgacctgcccagcctacagcaagcgatgaattactggcgcaaagaaatcgcgcaggccgggctgacggggatttataccccacactcattacgctatgcgtggacgcaggatgcgctccgccattatctggcgcagggatttagtgaccgggaagcgctggcgctgacctcaatggatttgggccacggtgacggacgtgggtggtatgtggtgcaggtttacgggcgacgggaagaggcataa

SEQ ID NO: 375192 - DNA, 810 bp, Salmonella enterica
gtggcggagaagaaaggcaatctggagaccgccgctcggagccagcagcgcaccacggcgatcatgcgctacgcggtgcaggagagcctgatcgccagcaacccggccaacgatctgacgggtgccatcgcgccgccgccgaaaaaccactaccccgccctgccgctggagcagataccgcagttgctggaacggctggagggctactccggcaggctgttaacccggctggcggtgcagcttaacctgctgatctttatccgctccagcgaactgcgttttgcccgctggacggagatcgatctggatggcgcaatgtggacgatcccgacgcagcgtgagtccattccgggcgtgcgctattcagagcgtggcgcgaagatgaaaacgccgcatctggtgccgctgtcaaaacaggcggtgacggtgctgaaacagctaaagctgctgtccggcaacagtgagctgttatttccgggcgaccacgatcctcgtaagcctatgagcgaaaacaccatcaataaggcgctgcgggtgatgggctatgacacgaaggtggatgtgtgcggtcatggcttccgcacaatggcctgtagcgcgctgatcgaatccgggcgctggtcgaaagatgcggttgagcggcagatgagccatcaggaacgtaacaacgttcgcgccgcgtatatccacaaggcagagcacctcgacgagcgcacgcagatgatgcagtggtggtcggactatctcgacgcctgtcggcaaaagtttgttgcgccataccggtatgacagacaggttcaggtggcctga

SEQ ID NO: 375193 - DNA, 147 bp, Salmonella enterica
atggttaaaaagacaattgcagcgattttttctgttttggtactttccactgtgttaactgcttgtaatacgacgcgcggtgtgggcgaggacatctcggacggtggtaatgcgatctctggcgctgcaaccagagctcagcagtaa

SEQ ID NO: 375194 - DNA, 210 bp, Salmonella enterica
atggacaattcgccatcctacgtttggtatcttctcccacacctgactttcacggcctttagtatgttgagtttgtccattgccacggcgcaccgcagtaaaatgccagtcgaattctgcaacggcggcattactatacacatggatagcaggggagcttcctgttttaacgtgcgtttgctgaaggttttacccatagtagcgccataa

SEQ ID NO: 375195 - DNA, 255 bp, Salmonella enterica
atgaattcgggctccgtttgggaaaaggaaaatatggacggcatcaatctggggctgaccaaaatggctgagtcctgtccgggaaccacgcgagcttcgctggaaaacatgcaggcatggtatatccgcgataaaacatactctgctgcactggctgaactggttaatgcccagaagtcacgtccgctggcggcattatggggagacggttcaacctcatcttccgacggtcagaattttcgaattgagtgttga

SEQ ID NO: 375196 - DNA, 894 bp, Salmonella enterica
atgaatatgaatcagaccaccagtccggcactttcacaggtcgaaaccgccatccgggtcccggcagggaattttgcaaaatataattattattccgtgtttgatattgtccgtcagacccgtaaacagtttattaacgccaatatgtcctggccgtgctcccgcgaaggtaaagccagggacctggcgatgggccaggcgcagtatatccgctgcctgttccgagaaaatcagttgactcgcagagttcggggggccatgcagcagacaccggacaatggcacgaacctgagcagttccgccgtcggcggtattcagggacaggcagagcgtcggccggacctggccaccctgatggtggataatgatgccattaaccagcaaataccgaccctgcagctggttaatgacattctggagaataatattgccaccagtctgccgtcggagcagtcggtggatgaaacgctggcgcagacccgatatccgaccctgctgccgtatcattttccacacgaccaggtggagttatctctgctgaataccgatgtgtcgctggaagatattatcagcgagagcagcactgactggccgtggttcctgagcaacttgctgaccggcgataacagtaactatgccatggagctcgccagccggctgtcaccagagcagcagacactgccgaccgagccggacaacagtaccaccactgacctgacctctttttaccagaccaatctggggctgaaaaccgccgactatacgccatttgaagcactgaatacctctgcccgacagttagcgattaccgttccccaggtggaacagttgattgcgggtactctgcgtgccagccggcagtttagcttcccgcgctaccagagtagtgagtag

SEQ ID NO: 375197 - DNA, 1782 bp, Salmonella enterica
atgttgatactaaatggtttttcatctgccactttagcgctgatcactacccccttcctgccaaaagggggcaaggcgctgaatcagtcaggccctgacggcctagccagtataacgctgcctctgcccatcagcgccgaatgcggctttgcgcctgcgctggcgttgcactacagcagcagtggcggcaatggccccttcggcgtgggctggtcctgcgcgacaatgagcattgcccgccgcaccagccatggcgtgccgcagtataacgacagcgatgagtttctggggccggacggagaagtgctggttcaaacgctcagcaccggtgatgcccccaatcccgtcacctgcttcgcgtacggtgacgtatcgttcccgcaaagctacacggtgacccgctatcagccccgcacggagggcagtttttatcgcctggagtactgggtgggcaacagcaacggcgatgatttctggctgctgcatgacagtaacggcatcctgcacctgctggggaaaaccgccgcagcacgcctcagcgatccgcaggccgcctctcatacggcaaaatggctggttgaggagtcggtgacccctgccggcgagcatatctattactcctacctggcggagaacggtgacaatgtggacctcagtgggaacgaggccggacgcgatcgcagcgccatgcgctatctcagcaaggtacagtatggcaacgcgacccccgccgccgatctgtacctctggactagcgccacacccgcggcacagtggctgttcaccctggtgtttgactacggcgaacgtggcgtagatccactggtaccgcctgcattcactgctcagaacagctggctcgcccgccaggattccttctccctgtatgactacggctttgagatccgcctccatcgcctgtgccgccaagtcctgatgttccaccactttcctgacgaactgggtgaagccgatacgctggtttcccgtctgctgctggagtatgacgaaaatccggtactgacacagcttagcgctactcgtacgctggcctatgaaggcgacggttatagaagagctcctgtcaacaatatgatgccaccgccaccgccaccgccacctccgatgattggaggtaattcatctcgaccaaaatcaaaatgggcgattgtagaggaatcaaagcagattcaagctctgaggtactattcagctcaaggatacagtgtgattaataaatatttacgtggggatgattatcctgaaatacaggcaaaagaaactctgctctccagagactatctttccacaaatgaacccagtgatgaggaatttaaaaatgctatgtcagtttatataaatgatattgtggagggattaagttcacttcccgaaacagatcacagagtcgtataccggggcctgaagcttgataagcccgcattatcagatgtgctgaaggaatacactactgtaggtaatataataatagacaaagcttttatgagtacatcgccagataaggcatggataaatgacactattctcaacatatacctagaaaaaggacataaaggtagaatactaggagatgttgcacattttaagggggaggcagagatgcttttccctccaaatactaaactcaaaatcgaaagcattgtaaattgtggttcccaagactttgcaagccagcttagtaagctgagattaagtgatgatgcaactgctgacacaaacaggataaaaagaataataaacatgagggtactcaactcatag

SEQ ID NO: 375198 - DNA, 1152 bp, Salmonella enterica
atggcgataaagttgctaacccacgttaccttatcaacgccagccggaatttacggcgcaaacagaaagccttgtcacgcaagaaaaaaggtagtgcaaatctccggaaagcccgcatacatcttgctggcgtacacaggaagggtgggggaagatactccggtttatctgacgtggcaagccgatgcaccgttgtttgaaaagggtgagcaggggatggttgcgggcagtcgtaaaacaaagatatcgggtattgttacgcttgcaaaagtgccgggtgttgatgctgcgggaactgcactgtccgataacaaggatgcggcttattatcagatatatcaggaaggtggctggttacctgccgtcagtgttcagaaaatatcgcagtacgcgttaggcgaactgggctttgccacgctggataaagcccctgcaagctttgacctgattgatggtataaatcagccgaataatgtggtgaaagggattctggagcagttatataaagcggcgcaggaggaaacccgcaccacccacgcactcaataagtacaactacaagcgcctactggagttgattgacagtaaccaggatgggtattactcggagcaggagtaccttcaggcgaatcacaatgtttcctaccgtgaccatctgtaccgggtgatagcaaagcatgccagtgaatggtactacggcaaggacgatcaactatggaagacctatctggaagtgtttctggataagatgacgtggatgaaagcggcatctgaaaatggggttgcgctgggggcggagccgtggcatatgcatccgattgcatttttaaatgctataaagaaaggaaaagccaaaattacacgagagatgctcaggagaatttggcctgatccaagacagtatgatccagttctgaatgagccgatggccgtcagcgcggaaacgcacggtgatttctgggaagatgatatggattactcggaagccgtgagttatgaaggcattaataccaaagctggggtacaggcaaaaacagatgaaaagacgtgtgagaactgcccgccggaagggaaagtgatgccgatggtgagacgctgttcgcgctggagcatggtcacaatcagtagcaacatggccatccgctcagcataa

SEQ ID NO: 375199 - DNA, 552 bp, Salmonella enterica
atgctggggtttagacaaatgaaaactggatacacggtgatagctggttttttggtggcgtcggtcttgtgtggcacgggttatgtgatttatcaacgaggttatgaaactggttcacaatcggagcgaaaagactggaaacagaaatggtctgagcgagacattgctgataaatctgcacaactggagcaagaaaagaaacagcgcaatgaagaattgcgccgtcagaaaaaaacacaggaaattatcaatcatgctgaacaggaaaaacaaaaagccctggctgatgccattactgctaatgatgctgctgacaggttgcgcagaaaaattgccagtatcaggcgtgaactcgcagccagtgagacaagccgcgtttccgcagatgccgccagaaggcagacagccgccgagaccgcaaatttgtttgccgacctgtacgaagagtctgaccgccgcgcgggagaaatcgctaggtatgctgatgcagcagcaagcgccgggagagtctgcgaacggacatatgaagcggtaacgcgatctgttgagtga

SEQ ID NO: 375200 - DNA, 528 bp, Salmonella enterica
gtgaataaaagcaaactgagtgtggctatgctggctcttattgcagccggggcaagcgcaccggtaataatggctcaatttcagcatgaaaaagaaggcaccagccttgtggcataccaggacaaaagccggggaatctggactatttgcggtggtgtgacttatgttgatggaaaaccggtaatcaagggcatgaaattaacgcgtgaacagtgcgacaaaatagacagggctgaacaggctaaagcgctggcatgggttgataaaaatgttcatgtgccattaacagaaccgcagaaagttggtattgcttcgttttgtccgtggaatattggccccggtaagtgttttacatcgacgttttataaaaagctaaatgccggggatagacttggggcatgtgccgaaataaaacgctgggttcatgatgctggccgtgattgtcgtatccgtgaaaataattgctttggtcaggttatcaggcgagaccaggaatctgaattaacatgctggggtttagacaaatga

SEQ ID NO: 375201 - DNA, 276 bp, Salmonella enterica
gtgaggattgttaaacaaataaaggcagcattgccatctggcaaattagccgttgtagcagttttgttgatggctcttgcattgggtgtatttaagttttgggactggattaaataccgcgtaggagtgattaccgtcgcaatggcgatgttatcactgaatgaatgggcagtattaacgggtattttctgcacgataggtactttttttgtcaactggtattacgagcacaaaaagtttttacgttcaacatccaggaatatcaattgtgaataa

SEQ ID NO: 375202 - DNA, 339 bp, Salmonella enterica
atgcagccagcttactatgaaatcaatgttatcccatccatcgcagaccaggaatttacatcctcattaaatggcgtggttttaaacatgcgcttgttctttgctactaccacaaagctatggtggctggaaatttcagatgcagacatgacagttacactgtcacaaatatgcttacgtccgggagtctggcacaaactcagcgggaaaatgccgggttatgccggtgccggtgctgttggtgttgctcgtttacgccctaatgagccctttggcgatgtgaatgcttttgctggtggttttggccttttcttttatgacgaagtggagagtgaataa

SEQ ID NO: 375203 - DNA, 615 bp, Salmonella enterica
atggctgacggtatggatggggcgattacggcaccacgagaccaacgcgcagtgatagtgtttgaatcaggcgttacagtgtcactaagactaaaaaccagagagggatttgaagccaagcgcaccatagcccaggggaaaatagaaacaggctataaaatttctgatggcacagtagacgatccaaagattgtgacattcgaaggcattattactggtgctgattttccgtacacatacggacttctctacacgaatcagaacatgattcaggccatgaatcaggcgcagcaaatcatggccgcatacgaactcaaggaatttgtttcggtatacacatcatttatggcgatgccgcaaagcgtcattcagtcactcagcgtcgaagctgtaccaaagaaaaattgctacaacatcaaactcaccgcacaaaaagtcgaaacagttaccttccagcgttcgcgcaataaatcagcacaggcaaaaacttccaatccggcagggaaggggacaatagccgcaggaaagaaaagcgccacaccagtcgatgcaaaaaaagaacctcaaaaaatttatgcacttgagaagatgcggcgtgtattaggaggcttttaa

SEQ ID NO: 375204 - DNA, 237 bp, Salmonella enterica
ttgagagttaaagctaaacattttattgtcacattggtgctattgttctgtgtgttttttgcttatttcttgacccaaaaagaaatgattagctgtttttggaaaggaatagcgggtgatgttgacgctgaaaccagagaaaaaattgatgagtttgataaatcgataattccgttaggccgtgattatttttcaagattgatggacggtctgaataaggacaaccatcagcggtaa

SEQ ID NO: 375205 - DNA, 2043 bp, Salmonella enterica
atgacagaccagtcagcagatctcgtaacgaaaattgatgtaatccccgaactggagggattaaacagctttgatgcagccatagagcgagcaattgccaaagtgaaccagcttgacgccgctattaagcgcgttaacaacctgaaacctgccagcccatacgcgccaaccagtaccgtcagtatgccatcggctgcaacaacggcagcagtggctacaatagccgctacaggcgcaaatctggttaacaggacgccgttagcagatacagtaagaaaagaggctcagaaggtcgctcgcgcagccgtagagggaacggcaagcggcattacagaaaaaataagtattcctgccagcaatctctaccgactgccgcataataacgagtttggcggttttcttccgccgcccggaaccggtcgctctggaggtggcttcaacgtcccaccttcgggcgcttctggatggtctgctggtcgtgctggtgggctgcttgacccgcaatcactaaggcgtggtccatttgcggatatggacttttctccatctcgcttttctggtgaaccactggaggcaaaaaagaaacctgttgcagaaggcgttgagaaagcaactcgtagcccgtttggcgtagataacatgctggcgggagcggggctaacggctggcattattgcggcaggtaatgcgctggcagacagccttgactctgtccagcgccaacaggctcaaattgcgcgtctggctcagactaccggagacgcaaaagatgcattttttgctcttaacgcagcggcaagtgatgttaaaagcgatagcggggcgtttatatccacctataccaacatggcgacggctacccaaaagctaggtttatcacaggaagagacgataaaggctactcaggggcttgtgggtgctctccagcttggcggggcagaaactcacacaatcaatgacgcgttgtatcagatggggcaggcgttttcttctgaccgcttcggaggtgatgagtttcgctcgtttatggaagcaatagggacaatggccccgaaagtagctgaggcattcggcactgatgttaaaggtttgcgggcaatgtcgcaggcagggaaattaacgtcagagataatgattaaagcgtttcaaaaaatggctgcaactaaccttgatttgctgaaaaaacagggctggacgtgggggcaaacaatgacagtcatgaaaaatgactggcaagccttcttagcgcaggcgaccatcggcggcgagtggcaaaaatttacggattgggcggctaatacgcttattccgttggctcgtagcgctgaaaaagaagttgcggaattttggtctaccttagctgatgaaagtaaaaccgccatacttattggcattcttggcgctgtaggtgcggcatttaccgctcttgcaattccagtgatggcggcgctttggcctttcctggccattggtgcagcggtatggctcgtatatgaagcatttgtagaatggaaacattggcttgatggtgaaacaggtaacatttttgcagggttatttggtagtttcgatgaatttgaaaggcgttatccgaatattgttaaaggacttagagcaataagagatggtattgcagatgctgcaaaagcaatagcgcagggggcaacaacgcctggagaaccagagggaggatgggatcaagaatcaaaagctaaaaaagatagatacgcagcaaacgatgctggaggctttgatgttattgaaaaaatactgagtttattcaatggtgaaggacacccatacgaaacaaacgcttcgggtaaagagcagctttcaaagaaattatcgtctggattagtagacccattcactcttgagcctattaccaaaagcggtgcaaatataaacaataatgtaaataacgtaacaaacattaatgttaacagtgcccaagaagccgctgatgtaagaaacagtttggataatccaggtgtaattaattatggaagtgataaccttgcagaaggcgttggagcgaggtga

SEQ ID NO: 375206 - DNA, 486 bp, Salmonella enterica
atggatgattcaattaaacacgttgaaattaacggcaaaaaatactgcatcatccgcatgagtgcctttgatgctattcacttcaacctgcgtgtagctgagattctggcgaagcatggcatcagccaggttgaaagcatcctgtccatgtcgtcgaaaatcttcggaatgctcaatcgtgaagaccacgacgagttgttgtttacgctgctttcgaaatcccgcgcccaactggtggataacggcgagtttctggattcatgggacgcagtgaacaccaattttaccgcagcgaatatagctgatgtgtatctggtggcgcttgagtgcctgaaattgtccattcttccggtaacagcagggttaaaaaaaaatattggactggacacagcggcaacaatgcagggagccatgcggcaactgttcaacgccttgctgaaaaccttgaccgaaccgtccgcacagaactcgtcatctggcgagtga

SEQ ID NO: 375207 - DNA, 429 bp, Salmonella enterica
atgtacttaggcaatatgtcctcaaaagactggctgattaccgtaggtgttgtcccggtaattggcctggcgaaagacagcaatatcattgttgaagtgccggacgaccagattagcgtttcctccggtatcggtggtgactggtcttttattgagaatccaagcgaggaaggctcagtaacattcaccacgcagcgtaactccccggtaaataccgcgctggcgctgatgcaaaaaacaaaggccgtcatccctgtaactgtaaccaatacgcgtaatctttccgtacatcggctgggttatgcgatgtttgcccgtcagccgtctgatggtgcaaataacggcgcaggagcgcaaacgctggaatggaaactcctgacgggtgagcttgattcaacgattcttggggtgaatttaaccaatggatga

SEQ ID NO: 375208 - DNA, 1359 bp, Salmonella enterica
atggcgaatttaagcaggctttttagtgtaaaaattgggcggcaaacaaccgccgcccaatatggcgtattcggggtgggtattatccttgcgccgggagcggcgttttttggtttgaaatattcgacctatgaaagcgccaaaatagaaaattttaatgacctgtaccgggtctacaccagtgctgatgatgcggcttctgatggcatgagtggtgataacctgctggcggttcaggcgtatttttcgcaaagtccatcacctgataccctcgttgtaggcgatttttccgcagcctacagcaagaccatgattaaattgactggtgtcccggttgttggggctcctgcggcgacaaaagcaaccattggctatgtcaaaggtagtgaatatcgctacgctaaatttaatggcacagcgtggtcaggaagtgccggtgcaacagcggatatagttgccgattcaggcgcagcaggtcagtttcttgtagatgggcgcattgtttatctggaaggggcggaggttgttcataagtcatctacggccttgtcatcggcggtaagttctgccgtagctgccataaagaaccagtacaacaagttctttatgtcaatgaccacatcgcgcgacctttcgattcagaaagcaattgctgactggactgaatcgcagattgataaaatggcagtttttattgatgactattcatcgccaacatgggcgacggacagtatcaccaaatatatccacgataaaaatatggccggttcatttgctgtgtccaccaaacgggaaaagaacttccttgatgcggcgctggctggtcgttgtctggtaatgcaaccgggctcagaaacatgggcacttaaaacccttaacgccgctcatgctgatgattttaccgaaaccgattaccagaaaattcaggcgctcaacggtaacacctttgaggattatggttccggcataacggtaacgtatccgggtacgtgtggtgacggcgaatctatcgaagtggttcgcttctgctactggcaggctgaccgtatgcaaaaagacctcgcgactctgtttgtgaaccgaaacaagattggtcatgacatgccgggttatgaggttgtttgcaataaaatggaaagttcacttaaagcaggtcagacagcaggcggaatcattgagaatttcactgatgaaaatggcgacctgattcgtggctttgaagttgtccgcccaacaatggcagaagtcagcgcgactcagcgtatcaaaggcgatctgaccgttaaattcaaattttatcttcgctatgccattaagcatgttgatgctattggttcggcaatgacttacgggatttaa

SEQ ID NO: 375209 - DNA, 783 bp, Salmonella enterica
atgactgtatatacggttaaattaatgaccgtttcgggggaagttgaatatccagattatcgggaagaaaaagcaactttcacaccaggcggaaacatcaaagatattttatttacaccatataacgggcgagccccgtctttcattatttcggtcacgctggatgatggcaatggtaacagcattaccattccggctgatttccgtcttgatactggaaatgtggttaaattcccgacagggacgctaaaagattctgatacacaggcaagaccactaatactaagcggtgcaccttatctggcaatggtcagggcgcgtcaggcacttattgaactggcgggtgataaccccgtatatgcgcagcaaaagctacctgaacccgaagaaccattcaccgcgattcatttgctttcgtcaacgcgagagtcgcaaccgttcgccaaaacatgggacggtgactatcgggtatatcactataactgctctgcacagattattgtgattcgctcatcagacgacgctcaggcatttttagaaaactttctttatgaggtcgattcaactgagggggaattctggcagtttgataacaactgcgtgattgaccgctcaggcgatttcgagaatagctcacctctaattgataacctcgtttatcagcaaatggcgcaggtgacattaaccctgcaatttgttttccagcactacaaaaaagagcgctggattgatagcgcaacggtgaaagcgaacgaagtgacgttccatatcaagggtgcataa

SEQ ID NO: 375210 - DNA, 354 bp, Salmonella enterica
atgagacgattaatccaatactggcaaccactccccattgaaattgtgggcggcatggttcgccaggcatattccgaacagaaaacagcattcctcagtatgcagccagtagacggcggtagctcattcaagacctatcttgcgtcacgtaagccgcaggattacatggaggcaatcggggaaaccgatttggcagtaaccgaggaaggcgagcataacggcgctatcgtgcattgtgcaggcaaatattatgaagtggtacaacgtcaggaatggcagaacggaattattaaccactatgaataccttttatttggaatgaaagaaaaggacgcattagcgctggtggggtaa

SEQ ID NO: 375211 - DNA, 474 bp, Salmonella enterica
atgcgtggtggagcgagcttagaaacaaagggcgcagacaggataatacgtcagcgaataaaatcactggctggtatacagcttactgttggcatccaccggggaaaaaccaataacggcgttgatgtggcgctttatggggcatggaataactttggtactaaaaacgcgatgggctgggagctaataccagagcgtccgtttatgagatttgcatcagaccgcatagccgactggatgaggtctgatgagtacaaagaaatcttgcatggcgtagcgcttggaaatatcacgcctcaacaagctatagccagaatcggcgctaaagccgtgtctattacccgcaagactatagctgactccgcactatacaaacctaactcagatatcaccatctccaggaaagggagcactaaaccgctgatacacagcggggtactcatccagacagtcaattacagggctttttcatga

SEQ ID NO: 375212 - DNA, 360 bp, Salmonella enterica
atgacggtaaatgactggcttgccattctgctaccgggggtatcacttgatgagggcgctgttagcgccctttcttctcaatgtgagcggctctacgaccttcgagccgcagcaggttacggttatgacatcgagcgcctgaaagcgttgtatgttgccgctaatctggccccgatagcggtagagggactgagcgcaagtgttcgcggggtggcaagcagacgcgaagggaaggtttctgtgacctttacagactcagcgcaaaaagcaggctggcagggtacgcagtgggggcaggagtttttagacgcgatgggctcattatctggcggttgtatcctcatcggtcatgccgattag

SEQ ID NO: 375213 - DNA, 255 bp, Salmonella enterica
atggatgaattaaagaccattaacctgattaatttaatcgaagcgccaattcacattctggcaaagaatgaagaaggtggtattgaaaacgtagtaattgctccaaccgatgttgtagccgtctccggtgcaacactctctattgggggggtaaaacagtttctggatgagggaaagttgaagcaactatctgacgcagaagcaaaaaaactaaaaaaagaacatgacggtgcattaacctcagacgacgaatag

SEQ ID NO: 375214 - DNA, 939 bp, Salmonella enterica
atgaatgagaaacatttaggcgcattgatggcgcaaattttagcagaggctcaagctggtggttcaatcccaaaccttaatacagatgagcaagggattatttttgcccgtgatctgatttccatgtctaaagatgtgtacatggaagaaatgccagcgcccgtagcgttaaccatgttccagcaagagccgggagttaacgaaggatcaaaatgggttggatatcgtatgtattcggctcagggaatggcaaaaatcatggcagcatttggcactgacatgccaatgatgagcgccaaaggccgggaatactttgctcaaatgtatacttttgggcttggctatggatatacatacgacgatgtattatcggctgctatgtcagggactccacttgataatattctggcgctgaatacccgcgaagcccatgagcgtaccatttctaacttgctgtggcgtggtaataaggaatatcagattgtggggttcatcgagcatccaaacattccgatggtagcgctaaaaggtggctgggctacagccgaaggtgacgatatttcggatgatgtttccgcgctgatttctgctgttaactccagcaaaatctacgaaacaaacgaagttcatttcccgtcgaaagcttggtcaaagattcaaggtaaacgtctttccggtactctgggtactgtgctttcttttctgcgaacgtcttacccggaaatattattcaggaaaaactcagatctggatgatgaaggaatcattgtcgctgtcgccatgacgcgccgtcacttctcgcaagcgacaccaattctattcagacaattgtccgttcaacgctctggacttgatttgtctattccttgcctgtccaagtcggcgggaaccattgttcgcgcaccacttgcagccgctaaatcctcaaaggtaatttaa

SEQ ID NO: 375215 - DNA, 792 bp, Salmonella enterica
atgcagaccacaattaaaggtgattttgacgcgggattgcccggtgatttagctgtcctgccgtcttttcgttcctctgcccgtatatcttcccgccgcgctggtggtgaagtcgcgcccggtgatgcagtaaaactcaagtcaggtaacgattctacctgtgttgcattacctgatggtggtgatgttactgatgccatcggtattgcggttacggcacattccaacatgccagcaatgccgggatttggcagtaacacccgtatcggtgttgtcactatcaactgtccggttggtatcgttgaaaatggtccgatccgcgtagcggtaaaatcgggcgaatccccgaaagtgggtgatttggcagtcccgaaaggccgaaacgtcactaccggctatatggaatggggcgttgccaattctggcgataaaagtcgttttcgcttcgaatcaaacactcagcgaggcggcacagcaatagtgatggttgttgatggtgagttgctgagcacgggctttccgcatgatatgcctgtaactggtgtttcagtatccccaaaaaccgcatctaaagccgctggtggtactcagcaactgacgccaaccattacgccatcaggtgcgacaaataaaacggtaacttatcagaccagtaatgcaaatgtcgcaactgtggatgcagcgggacttgtcactgttaaagcaggggctacaaccgggcaggccgcaacaattacggtacgaactgatgacggtggtttcactgacaccgctgtaattactgttagctaa

SEQ ID NO: 375216 - DNA, 1014 bp, Salmonella enterica
ttgctgcaagaaacacaggttaacgttgacgccataaaacaatgggagataaccccggaaggttatctccagattgatatccctgtagcccgtccgggcgtactggtttatgaccgcaggcgcggtgatgcattcacggcgaaagagtaccgctcagccgatgaattgtttaaccaggactctatgaataccttaatcggcaagcctgttacggtgtcacatcctcgtaacggtctggtgacttctaaaaattaccgggctgttgctgctggtgtggtaactgccgtgatgcgtcagggtgatgagttgatagcccgtgcgctgattcaggatgagagatccatacgtctgattcagcaggataaaagtttacgcggggcgtcggctggataccagtgtgacgataaacccaaacaaacagggcgagcacctgacgggcaggaatttgacacagtgcaaaaggggattaactacaaccacctgagcattgtacgtaacccacgggtaaagacagcaacattcaatctggacggtgaaccgatggaattagaagaggcgttagcaaaaatcgaagaactggaagcggataaaaaaacactcaccagtgaccttagtactgctcgcggtgaactgcttaaagcaaataaccgccttgtaaatatggactctgccagcaacgaagcctacgagcgcggcgttgctgatggtcgtcaggagcatcggcttaaagaaacagccaggcgtctgaacatcaatatcgacagtctgggcgatataaatctggttaaacaggccatcattcgcaaggcaaacccggaagtaaatatggatagctggagcgatgaacaggttgatgttgcgttatcaatggcgctggtggcttgcggcaaaaagtttgagcaaaagccgcgtaatccacgcatcaacaacgatgaatcaggtgcaggcaaaagcaatgatgcgcacagtgattatcagtcccgcatgtttggcaaaaaagaggccgcaaaataa

SEQ ID NO: 375217 - DNA, 1356 bp, Salmonella enterica
atgccgaagagtgaaccacgttatgacgccggttatccactggctatagaactggtttacgcgcaaaagctgggtgataacacccggcttttttgtaaatgggttcgcgatgcctgtttaaaaacctacagggcaatcggtaaatccggcgcaatcctcaatactgatgcggctgacggtaaagatgtgtcagtcgatgatgtgttgggcgatttccttgctgttgcaacggttaaaaaagtgcgcgtttacataaaacaacgcgcagggaaaaactattcccgcatgacgagagagcagcaggaaaggctaatacagtctgtagctaaggaattattacctgatgcttccatttttcttaaagctattcctgcactactcaaagatggtgagtttggcgcggttccggcgtatatcgtcagtgaagtcagaagacaggcaggtataaatcttgctaaagatttcgccagggtaacaaacgtcaggccggatacttatattcgcgttatcaaccgcgccgccgatgaagttcaaagcgctattgttaatgggcgttttggttttaccgatgaatactggcaaaactattaccagcgcttccgcgttgatggtgtgagccttattgacctgaaaaaaggattgccagccacaccagatacagcgggggcagtctccgaacaggtagcaaggttatctgggtcgctacgtacatccagcgttatcccgtcactgccagcaatgaatacgacctcaacacagcttgtggattctgcacttgatgatttcagactcatcattaaagccgccgcgaatgttgaccttgcgccggggataaaaattccacatgagagcatggcagacctgatagcggtcgatatttatgacggcgataagaagctattgcagcaaacctcagactggttaaccgaaagcatggggcgcatggagaatgtttctgatgaagcgttgcagcgcgggattaacgtagttcagcaggggttacgcgaggggcgcggcgtcgattacatcgctaccaagctggctgatgagatggagatacctttccggcgagcccgtaacgttgcccgtaatgagattggcaatcaggcatggaaccttgaggaggctaatgcgcatattgcagggatgagcatataccgctggcggggcatgttagacgaacgcgagcgaaaagagcatgttgagcgcgaaggaaaggcatacacgccgaccagaccgccacgcgacgggaatccgggccagcctaacggttgccgctgttttcctgaatggttgttctctgcgtcggatgtggaagaagcggagaaagaaattgctgcaagaaacacaggttaa

SEQ ID NO: 375218 - DNA, 1374 bp, Salmonella enterica
atgacgagaaaaaccagcttaattcccactgagggaattttaacaaaagagggcttacagcctgccagttacaatattgacagctacgtaagcatgatggaaagcgtggcgcatggtgctaaaggcgctgccggaatgggttcaccaactgcaaaccgaatgaaagccagagccgcagagggaaaaataccgctggtggcggcgcttgctggtgaaacatccgggattggctggcgcattatcagtgaaccggttgcagccgcgatgcttaatggattcgatatcatcactgacaatcctgaagacgatgtaaaaattaagcaattattcgatgaaatgcgcatctggcagggagtggaacgcgccacagtgcttaaacgtcatcagggatggtctgtgctggtcatgggggatgattgggtgagaagtcacggtgcaaactggattacaccatcaaatgactggttttctgattataacgatccgcttttcggtttgccggaaggatggcgtattcagcttaaaagtccgattgggggagaggtattcattgagcaggaggattcactactgtttggcgatccagaatatcagccgctgtatggttgtgctggtgtcgaatttggcgagccggttctctgtaaaccttatgcatcgttgcagcgtcttggtctgtctcatgagttaatcatcagtattttatcgctgtcggtacaggatatttataaaaaagaagagctcgctgaggacttaaaaacagcgaaaggtgaagcacaggctgcacgccgactggctggaatagctgcaaccagacatttaaatgacatggtagctattgataaagatgaagatataacgcgtttgcagtccactatgacgggtacagccgaccttgttgatatggctattaagctggtgtgtgcagaaacgggattccccgtatcaatgctggctgagcgtcgttcaggactttctaacagcgataccagcgccgatgcacaatggcaaaaccttgtatctcacatcactaccaatgacattattccggcgctgaaaaagctggctttgcgttatctgggtgttaaagctgactttgtccctaacaagtctcaggggcaaattgaccgtgaggttgacagagacaagaaggtagcggaaaccgcgcagatttattacggcttgagagctatcaccagcgaagaggcaagggcaacagcaaaagaaactgccgccgtgacgctactgacagaaaaagcgccagcaactggcaccattgatgaccagaatgacgataatgcagaacagaacaacggaaatgtaaaccagaatcgcgccaataatgccagcgaggataccagtaatgccgaagagtga

SEQ ID NO: 375219 - DNA, 1410 bp, Salmonella enterica
atgacggcgattgaattagccccacaaagggatttagagcgtaaaagctactggctttctgaaaaaaagaaaatgtcagagtggcggcgcgtaatgcgaacgctcacgacaaaaccacatcgtgttaaatgccttcgtggtgggcgtggttcaagtaagtcatggagaattgcggaagcactcattcagatgactgtgcggtatgacctgcgaattttgtgtttacgcagagtacaaaaatcaatagatgcctcatcacacaagttgttgagcgacacaatacggcgtcttgggtatgagtctgaattcaccatcacgaataacagcataaaggctaaatccggcgctgaatttcgctttttagggttccagtcgaatctggacagtatcaagtctatcgaaggtgtggacatttgctgggtagaagaagcccacgccataacagcagaagcatgggaaacactggcgccgacactgaggcgcgaaggtgctgaactatggattaccttcaacccggctttcgcatgggatgaaacctatgttcgtttcgtacttaatgcggaggatgactggtttgtagaagaggtaaactggtatcacaacccatatttcaacgaaacactgaataaagagcgaatctatacactcaggcactacccggacagatacgacaatatatggaatggtgttccggttagtgatttaccgggggctgtagttaatcgcggcaatctggaaagacttgttgttgcgccagactcgaaattagcacgggcctgtcgaaccggaattaagacagccgttctggatgttgcagatgagggtgatgacgattctgtgttgtcgttttttgacgggcgttttttgtaccgtatggaacggttacaggcacgcgacccggtacaactggcagtacaggcgctaaaactggcagaagaagagggttgttccgttcttatttatgattccgtgggcgttggttccggcgtcaggggtgaactgaacaagcatgaagattcaaatatcgaattcagaaagtttgttgcacagggcgaggtgttacgcaaaaaatcccggtatcgcggcggtcgtaagaacgaagaagaattccataacctgcgtgcgcaagcatggtgggcttaccgcgacgcggttaatgatacggttcgctggatggaaacaggtatggtgccaccagacggattatttgctatttcagaccaaataccacgccgatatcttgaccgcattttgtctgattcgactggcgttatgtgggaaaccacgccagacgacaaaattcttatcgaagcgaagaagaaagttaaaaaacggcttggcgtgtcaactgactacgctgacgccatattcccccatctggtacgcatgaaatcaggaattattgaatga

SEQ ID NO: 375220 - DNA, 546 bp, Salmonella enterica
gtgacaataaaaatcaacaggcgtgacgatacgtttgcaaagctggtagcagaagcgaaggaagcgcctggtttcagctatgcaaagtcacgtaaccgggagtacaagggatttaatgacgattttcaggctgaaaagctactcaaaaatgaagaaatccagcaggccgtcagcatttacaaaaaacacattattgcggctgatgtggtcgggcgtcaggaggcacttattgatttatcagggcgtttccgtgcgccggatgccgcagaggtcatgcttgaacttttggccctggaaaaattacgactggaacccgaagtgtttcgtagccgtctggctgcgatagacacccgcgccgtgaagaatatcaaaaagacaaagcacggctggcaggttgaaggattggacaaatcacatcttgcagcgcgaatactgactctcgccggggtggatgtaagtaaaccaattacagatgaaggtaaacgcattgcgcgtgaaacgctgaccgaaatctatcgggacattgacggcgatgacggcgattga

SEQ ID NO: 375221 - DNA, 213 bp, Salmonella enterica
atgaaagttatcggtgtaccgttcagcgaagtaaaagccaaagcccttaacactccagaatctctcgccgcgtatgaaaaagccaaacaggaagaaagcagcaatggtgccaacttctactcagagagcaaagaagaaggcgcagaatcgcggcgtatttttctgaatgagtgccaaaaagatggtattgaccccgttataagtcacgattag

SEQ ID NO: 375222 - DNA, 504 bp, Salmonella enterica
atgaaaggggttatcgctccagaagaaagactacattttatgtttcaaacacgattaattaacattttggcatcgtgtcaatccctctctgaaagcgaacaagatttcttatacaaatccattaccgattcattacataaaacttatgcgccattttttcatagcttcatcgaaaatcagccagacatataccaagctataaataaccttcaacgccatgtttcatcagaactaagtaattatcgaattgatgcctctaccgttccatttacccgcttacttgaattaacccgaataccattcaaccagcatggtcttatgatgacgcaatcattacatgatttaggtcaagaaaagtatgaggtgataacaatacttcgacacatatccagcggtacagaacagcaatacaacacccctgtttttgtcgagaacagaaaagaatttactgcttcggttacgaaagctaaacgcacagccttgcgaggcatcctcaacatttaa

SEQ ID NO: 375223 - DNA, 1533 bp, Salmonella enterica
atgtccagcctcatcaatatgaccgacctctctgaggttatatctaacgttctcatctctttaaaagctgctggctatgccagtgcagcaatgatgcccgttcataaaaatacctcagatgaggtcgaaaaaacggaagcacaacccaccaccgcgccagaagtctatgtagcacccggcaaacagtatgccaatgcacaggaagcactggcgcatatggtgcgcgaactaaaaaacccggaacgcgacaattataacgaaacgctggactttacctttgcatcactggcgcaactgctggacatattgcgggagccgatttatcaacatggcctgatgctcaaacaggaatttcagaaaggtgatgaattgcctttggatatggtgacaacctttatacatatccctaccagtacggaagtttctttccggcttccggcatacatcaaagaagataagcgcctggacgaatgccagcgtgtgggcgcatctttcacctattttcgccgttatggtctgcgtcaggcgctggatattacagatggtgatgacgatattgaccaggctgacgcaaaacgagaacgccgtaaagcgcgcgccctgaacagtggccgtaaatggaaaccgaccaccagcacccgtacaaaacccgaatccattctcaatgtgctggttgcatcaggtgagttttctggcaatgcctccatcgctcaggccaaatcccgtaatccgtttcttcgcactccgtctgaacttgcggaagattttatcagcggtgtggatcgcattatggatgatgaaggtatggcgcgtgataccgttgcccgctttggcctgactgatacattctggcaggatttctacagcggctatcgcgttgatggtgacgagctgatagataacagaaccggtaagcatgtaacggctgatgtggcaatggcgattgccgaatccgttacgtcatgggctgtatctgctgctgacgctaacagcattgttgattcccgcgatgcggtcagtacggttacagcatctgcttttgtaccggacaaacgaccaacaacgccggaagaagaagcctttatttctgctgttgaagctggtcatgatgatgagatagcggaaatcgccgaacgcctgattggtgctgatattgctatggggctggatatcaaagcagaacgtaacgacacgcgttacgctcgtcgcaactggcttaatgcctgtagggtgttttattcaaatgcactgctttccggtaatgtgaattttgatgcacttccttccctgctttcccggtctgataaacacattgacgcgctaaatgaaatgcagcaaaaagcagatattgcgcgtgagattgccgctggtaacagcgatacagatatcaaactgcaacaacttcatgaaattgcaaaacgctgtgaccttcacacagccagctatatagacacacttatcctgcatgttgaatgtgacgggctatgcactgaattacccgtatatatccctgaatcagatttgccgtactga

SEQ ID NO: 375224 - DNA, 516 bp, Salmonella enterica
atgaaagccgtagaagaaaagttacaacgtaactttgaaagacagcgcatgtaccagcaacgcgccatagagcgccagcgggaaaagcaggccagtcctgaatggcgtcagactcagtatgataaacagagggaacggcaatcccgctacattgaacgggcaaaaaacaaaccgtttaagcgtggattaaaaggccggactccccgcgctgctgagcggtcattgatggataaaatcggcgctttaccctgcatcgcgtgctatgtgcatggtgtaattaatgaggttgtcagtttgcatcatatcaacggacgaacgattaccggcgctcatgcttttgtgctgccgctgtgcaaccaccatcatcaatatgcagcgccgccagcaatacgcgctatttatccttggcttgttcctgttcatgctgatggtaattatggaggcaggataacatttgaagcgctcaacggcactcaggagcatttatacaatctttgccttgaaatgatagcctga

SEQ ID NO: 375225 - DNA, 1569 bp, Salmonella enterica
atggcaacaataaaaaggttggttctaaaaaacttcaaacggttcagaaatcttgagcttgagttcgatcccgaactgaatatcttggttggaggtaatgaagcgggaaaaagttcagttctccaggcaattgacatagtgctaaacaccagccgaagtaaggttgagtcacttgggcttgaaaccctcttcaacacagaatgcatcaaggaatttctgcacagtgagagaagaatcgtcgatctccctgagcttttcatagaaatatacctcgaaggacttgaaggccatcacgaacttgatggccggaataacagcaagggaatagatcatcttggtatcaagatggtgtgcaaaccggtcgacgaatacactaaagagatccaggcacttcttgctgacaaacatgaaagtttccctttcgagtactatggcatccgctttctaactttcacggatgaaactatctttccatacaaaaaaccgctcaggcacttacttattgatagttctcagattaataatgagtatgccacacgcgaatatactcgcactatgtacaccagccatgcatctgtagttcagcggaatctgcacaattttgagtaccgcaaggccaaatcggaatttaagaaaagtgccttcaagacaatgaatgaggcactggacaactacaaatttgatgttcgtacaagcccgaaagctaatgtcgaaacggatatcatcattacagaaggtgagatcccaatcgacagtaagggtaaaggccgacagtgcttcataaagacggaatttgcattactaaatcgcgaacacgcgcttgatactcttctgcttgaagaaccagaaaatcaccttagccatgtccatatgcacaagcttattgagcgcatccgtggttcggttaaaaaacagctttttattgcgactcatagcagtttgattgcgacacgcttaaatcttaaaaaagtgctgataatgaatgaagaaaacccatctcagccagctaccctcaaaaacctcagtaaagagactgctgacttttttatgaaggctcctgacaataatgttctggaacttgcattatgtaagaaggcaatccttgttgaaggcgacgcagaatttatccttatggatagcctatatagaaatagcacaatgggcgtaagcgttgatgctgatggcatctatataatctcggtagacggaacaagcttcaagcgataccttgaactcgctaaactgcttggcattaaaattgctgtgattcgtgataatgacggcgactacgaggggaattgtgtcactaactatgtggatttcacttctgattctataaggatttttgccgatcctgataacgctcgtactacttttgagatttgtatgtatcaggataataagggaatttgtgacagtctgtttgctgctggccgcaaaacgcttactgttgaaaattttatgttaaaaaataaaactgatgcggcattccacttgcttgagaaaaagagtgctgagcttatcgctccaaattatattcagcaggcgatctcatggataagagcgtaa

SEQ ID NO: 375226 - DNA, 1032 bp, Salmonella enterica
atggataagagcgtaatatttgctgtcgcaggctctggcaagaccacccgtctagtcgcaagtctcaatgaagataaacgattcctgatcgtcacttatacggagtcgaattactgtaatttacgtgaaaaaatcataaatcgattcggttatttcccgacaaatattgtgctctgcacatatttcaaatttctacatagcttttgctaccgaccatttcttaggtcaaacaagaacactgttggccttacatttaaacttcccccaacatttccccgttatgcattgacagacgataggcgctacgtgtcctcccatcgtcaggtttatgcaaatcgtcttgctaaatttattgagcaatccaatctaatgagtgctgttgtagcacgtatggagaaatattttgattttttctttgtagatgaagtccaggactttgctggtcatgattttaactttcttaaaactataagttctgcaaatataaatatcacgtttgttggggatttttttcaacacacatttgatacaagcagagatgggaatgtaaacgccagccttcataatgattactccgtctataaagcagcttttaaaaaggctaaccttagggttgatacagacagcctaaaaaagagccgcagatgcagtaggagtgtttgcaattttattaccgagaagattggtatagaaattgaagcttacgatgaaagagaaagtattatcaggtttgaagatgatccaaaggctgttgctgctctctatgaagattctacaaaggtaaaactattctataaagcacattataaatattcctgttattctcaaaattggggggcatcaaagggagttgacagttataatgatgtttgtgttgttctcaatcctgcaaatgtcaaagcttggaaaagtggaagtttccgagatatcaatccagaaacacgaaataaactctatgttgcctgttcgagagctcggggggatattatttttattcctgaatccttactgaaaatttataaaaccccttaa

SEQ ID NO: 375227 - DNA, 417 bp, Salmonella enterica
atgaaaaatttcatcagcgttgtagtctttgctctggttacgttgttctcaagctctacctttgccaaatggcatgggtgtcaggaacagaaccttgtgttttttgcttataacatgaagcacactaaagcagtagaactctgccaaacagaggaaggttataaatatacttttgggccgattggaaaaccagaaattgttttagaaaaaagatatgaagatgtgactcgtgatggaggtatggcaggtggatttaacctcagaaacagcaatatcatctatgggataacggaagataaatttggtaatgctgctcttatcgtccaaaaatccgattatagtaaaatcctagctgatattgctctcgataatggagataaaacctacgtcaatagaacgcatgaatatttccattaa

SEQ ID NO: 375228 - DNA, 450 bp, Salmonella enterica
atgaaacaatcaacagaaataaaaaacaatatcattaaaaatgctattgctgcatggaaagacagatacaaatctaaagacaagaaaggtaaaatattgatggttattgcccccatatttttcttcttctgtgttctgcggatacttgcatttatatttggtgcatttggcgatggtctacccgtttgcaacgaccgggatcttattaacaaaaaacttcccactttagtactatcacatttacagaaacttggagcacaaacttatggtgcaagtattactatcagcaaacctgaagagtcatactacgatggaaaagcaggcattcgacagtgtaccgctgtaatgacgctaaagaagggtaataatgttgagcctatcgacatagagtatcagattgcctggattgataaaaaagcaggaaaatatcagtacaagattctggattga

SEQ ID NO: 375229 - DNA, 501 bp, Salmonella enterica
atgaagaaactaggtatttgttttctgtttatctctggttttttattcgcaggttcttcattcgcagatgaacagtacgatttgaaatgtacgctggatgatggtgatcaaatgacggttagtcatgtcagcgatacggtttacatcgcatttttggctcccggagatgatcccgatgaaggtggttcagtcatcaaactcgatatcccctctggagaagtaaaacaagtagtgagatataccgatggcaaaataactttgtttggtattcggggggatagccctgatgctgaaagtaccgttgttgtttcataccatcatgaaatgaaaacatttcttgaaaataaaggagcgaaactcgtttatacggatgtaatgacattcagcagtcaggataaaaataccggacgaagtacagaaaacagatgtatcactgacacaattaaaatcggcaatactttaactaagaatggcattcctggcgttagtagtattcagtaa

SEQ ID NO: 375230 - DNA, 897 bp, Salmonella enterica
atgtggatggacaacaatgataaggtaggtagcaacccgataaaggatgctgtagacattttacctgaggggatcagaaaaatcgttctcggcaggctgaatgagatcgtcggttatgaaccccgaattggcattatgggtaaaaccggctcaggtaaatcgagcctgtgcaatgccatttttaaaggggaggaatgcccggtcagtgatgtgggagcctgtacccgcgaagtaaaggaagtgcgtatcctgttcgggaaacgttctctttatctagtggatattcccggtgtgggtgaaagcgccgaacgtgatagtgagtacgaaaatctctatagcggattgatgccaaaactcgacctgattctgtgggttataaaaggggatgatcgcgttctggcacccgatgagcggttctacaaaaaagtgcttatccccgccggaggtaaatcaaaaacgctgtttgttcttaatcaggtggacaaaatcgagccgttccgggaatgggatgagcagaattgttgtccttccccccgtcagatgaacaatatcgcggagaagaaagagtacatcagtcagtaccttggttttcctgaacatccgattgtcgctgtatcagccaatgagggctacaacgtgactcatctggtggaagagatggtccgggcgctcccaaagtacgcacaaagttcagtagtggctcaggtcaaagaggagcacaaaacagaaaaggtcatcgaagaagccaccgacggtttcggagacacagtagatcgggttattgatgaaatcattgatatggctcctattcctaaacccgttgcaactttggcaaaagcggcaaaaaaagtggttgtggatgtatgtaaaaaaatatggagttcaatctttgggtaa

SEQ ID NO: 375231 - DNA, 291 bp, Salmonella enterica
atgaccacgatatgcccggaatgcggctctgaccgtataagtgaacgtcatattggcaggaagacgggaagtattgccggaggcgtggctggcgctctcagtggtgcaggaacgggcgctgcgattggctctgtagtgcctgtggtggggacagcgacaggggcggttattggtgctttgctgggacggtttgtcgctggggcaacggctggagctgttacgggttctgctatggatggcgtactgtttgacaggtatgtatgtagagactgtgagcatacattcgattga

SEQ ID NO: 375232 - DNA, 1269 bp, Salmonella enterica
atggcattaaccgatgcaaagatccgggctgccaaaccggatgaaaaaccctacaaactggcagatactggcaacatgcatctgctggttcaccctaacggctcgcgctactggcggctacgctatcgccatcagggaaaagagaaaacgctggcgcttggcctctatcccgatatctcactgtctgaagctcgctcattgcgcgatgaagccagaaaactcatcgcacagggtatcgatccctgtgaacaaaaacgggctaaaaaatcggactccgaggcatcggatacctttgaagcaatcgcccgtcggtggcacgccagcaacaagaagtggtctgaagcacaccgggccaaagtgctgaccagcctggagacacatgtatttccttctatcggttcacgagatatcaagacgctgaaaacccctgatcttctcatcccggtgaaagaggctgaggcaaaggagatttatgaaacggcatcgcgcctgcaacaacgtatctcagcagtcatgcgatatgcggcgcagtcgggcatcattgactataacccggcgattgatatggccggagcactggcaaccgtcgaacgtgagcatcgccctgcccttccgcttcatcgcctgtcagaactgattacccgcattgatgtttacaaagggcaaccgcttacccgactggctgtagaactcactctgttgatattcattcgttccagtgagttacgcttcgcccgctggtctgagattgattttaagaaatccatgtgggtgataccgcccaagcgtgagctaatccccggcgtgaagttttctgaacgtggttcaaagatgaaaacaccgcacatggttccactttccagtcaagcactggagatcctgaagcagataaaacaaatcagtggtgaatatgacctgatattcactggcgaccgcgatccgtataaaccgatgagtgaaaacacggtcaatacagccttacgggtgatgggatataacacgaaagttgaggtctgcggccacggctttcgcacgatggcctgtagctctttgattgaatcggggctgtggtcgaaagatgctgtagagcgccagatgagccatcaggagcgtaacggtgtgcgtgctgcatatatccataaagcggagtttatcgacgagcgtaagctgatgctgcaatggtgggctgactttcttgatgctaaccgggaggaaacaattagtccgtttgattatgcaaaactcaataacccaatgcagactagataa

SEQ ID NO: 375233 - DNA, 252 bp, Salmonella enterica
atgaaaaaaagaaatttcagcgcggaattcaaacgtgaatccgctcagctggttgttgaccagaactacaccgtggcagatgcagccagcgctatggatgccggcctttccacaatgacgcgatgggtgaagcagttgcgtgatgcgcggcagggaaaaacgcctgaagcctctcccattactccggaacaaattgaaatacgtgagctgagaaaaaactacaacgtattgaaatggataacgaaatactaa

SEQ ID NO: 375234 - DNA, 222 bp, Salmonella enterica
atgcacacacagacaacacaaaccaaacgatttacgcagcacgtcaaatgttgcgaatggtattacgacgaaattcaaaacatcaccaatgacgcttttcttacagatgaagagaaattagccgtactggatgatctggaaaatagaattctcactctcgcagcgcctttcctggctgctgcaaataaaattaagacgacaatggagcaaatgaaaaaatga

SEQ ID NO: 375235 - DNA, 1458 bp, Salmonella enterica
atgccatttacatttcatattggggatcataattgtcgtatatcagaaagccatttaagagatattattgagaataaaagagagcatattttttcaacatatgagaaattcatagattttttcaggagtatatttactcggcgaagcttaatttccgattataaggaaatatatgatctgctatgcccaaaaaaagaacacccagagattaaagggcctttcccgttaaaacaaaatgagaactgtacacgatggcgacctattctcggatacgttaaacttatcgatgtttccagacctgaagtgatggataaatacactgtagaagtgctggcataccaagaagatatgtcactattaaaaatgtattacgagggagtattgcttgccgaggcggagtgttctaagcgttgcctcgaatttttaaaagaaacgatgtttaattacaatacaggcgagattacgcttgcctctttggaaaatgagaattttcccctggacgaagcaaatgggaatgggcgttatgccgcttttgagcaacgattgatagattacctgtcaccgccgcccggaccggcaggtgataatggcgctactgctcaggctgcttccctgcaagcggcagagacagatgtgtttgatagcggggctattgatcagactgattcccaacaagtgccagagccagagatagataggtttattaactcggaacactttaagaaaaatatttgcatggctgatattgaaaaaaataaaataggtagcgggagctatgggacagtttatttattaaatggcgaatttgttgttaaggtcccaattaacgaacggggaatgaaagttaattttacatctccagaacatggtaattgtcatcctgagcgtgttagtaaatatttgaatcaggccaatgacgacagaaatttttctcgttctgccatcatgagtattaatggcagcgatgtcatggtcttagtttcaaaatacattcagggtcaggagctcgatattgaagatgaagataactataatatggctgaagagctgcttgaagaaagaggtctttatatgcatgatatgaatgtctttggtaatattctggtcaaagaggggaaactttactttgtggatggtgatcaaatggtgctgtcaaaacaatcccggcatcagcgggcggcttctcttgcgacaaagaaactggaagaacaaattatgacccatcataagataaaattaaagcaggccgagaccgaaggaaatgaggaagatattgaatattataaggcacttattatggaccttgatgagttaatcggagtggaaccaccggcacctgagccagcaagacaatctgagccagcaagacaacctgagccagcaagacattttaaaatagccccacctgaggaggggacccttgttgctaaagtattaaaagataaatttaaaaaataa

SEQ ID NO: 375236 - DNA, 708 bp, Salmonella enterica
atgcgctatttttttattgctgatccgataaggggaattgagggggggttacagggcattgacattagtacccgttttgcatcgtcgtccgctcgtccgctgcaccctgagtttgttatctcgtcatgggacaatacacagaagcgccgttttctgcttgacctgctgcagacaatcgctggcaaacgtcgctggtttctacgccacggccttttctgtaccgtaaatatcgatcggcatatggcgcagcttgtccttcaggacaaagacattcgcgttttactacacgccatgctatttgtggggctgcaggtcgctgaacatttttcatgttatggtaacgcctcaatcgatcctttaattagcgcgcttcataagcaacctaacccattatggctgggtgacctgggcgtagggaacatgaccgcggcgccattagtttgcgggtgttttagcggcgtaaaacttgatcgtagctttttcgcctcacaaatcgaaaaaatgacgtttccgctgcttgtcaaacatatccggagttattgtgacaagattgttgtggacggtctggaaaactcacgctatttcctggcgttaaaagcggcaggcgttttggcaatccagggcacgttgttcccttctgttgcgttagaaaaggttgaaacactgctgttggacagcagcgtgtacaccctcagagaatcgatctga

SEQ ID NO: 375237 - DNA, 1029 bp, Salmonella enterica
atgaagagcgctaccgtaatcgcgtactcgacgggcttaaacgaagggcaaaatcactgggttactctctccagcaagatcctgagttatgcgtgtgaacggggagtttctcaggaaggctaccgcgctcctgatgccagactccctgaacggttcccgataatcgggaaactcagagcgcattatccggtggccacactctgccatgtgttcggggttcatcgcagcagctacagatactggaaaaaccgtcctgaaaaaccagacggcagacgggctgtattacgcagccaggttctggagctgcataacatcagccatggctctgccggcgcaagaagtatcgcaaccatggcaacgctgagaggcttccgtacaggacgttggcttgccggcaggctcatgaaagagccggggctggtcagttgtcagcaacctgctcaccggtataaacgtggtggccatgaacacattgctatcccgaatcaccctgagcggcagttcgccgtgaccgggccaaatcaggtgtggtgcggcaacgtgacgtatatctggacaggtaaacgctgggcgtacctcgccgttgttcccgacctgttcgcaagaaaaccagtgggccgggccatgtcgttctcgccggacagcaggctccccatgaaagcgctggaaatggcatgggaaccccgtggtaagcccggcggggtgatgttccacagcgtccagggcagtcattatacgagcaggcagttccggcagttactgtggcgataccggatcaggcagagtatgagccggcgcggaaactgccgggataatagcccaatggaacacttcttcaggagtctgaagaacgaatggatgccggtggtgggttacgtaagcttcagcgaggcagctcacgccataacggactatatcgttggatattacagcgcactaagaccgcacgaatataacggtgggttacccccaaacgaatcggaaaatcgatactggaaaaactctaacgcggtggccagttttagttga

SEQ ID NO: 375238 - DNA, 231 bp, Salmonella enterica
atgcccataacattagaaaatatctcagcaagaccatcacggcagacgttaaagataaaaggtatcggaaccagggacaccatgcagtacctttcagctttgggtggaacatatcaggatgctatttttaatgagcaaacatctaatttaccagatgaatatattcggctggatgagatggccagagatgaaaaacaatacaatttaaatatttatgagttttttttttga

SEQ ID NO: 375239 - DNA, 246 bp, Salmonella enterica
gtggatttctggggtatttctctttatcagagctggcgtaacggacgcgtcaacataacgggcgatatcggatataacgccagcgatggtattagcgccaacctcattgagaagaccacgtttgcaggccagatcggcgtaaaattactgaaaggcgacatgcgctgggggctgggctatagcgttaatacttccagtcacaataacgatcagatgattaacgccacctggcaacttagcttctga

SEQ ID NO: 375240 - DNA, 243 bp, Salmonella enterica
gtgctctcggcggcggtattcacgattgccgaaattatttatgcccctgtcgaatatatgttaatcgataacattacgcctgtcggcatgaaagccagctatttttcagcgcaatcgctgggctggttgggagcggcggtaaactcgctggccagcggcgtgatcctgacgacgcttcccgcctgggcgctggtgttaaacggaatgcctattccccctgcgggacaggccatcgtccgttaa

SEQ ID NO: 375241 - DNA, 195 bp, Salmonella enterica
atgagtactaatcggcaatttccgggtcagccgcgtatgggaagtacgatgagtcttacaaaatgcggcaaggtggagacaaaaagcttcataatgccttattcaggcctggttgcgcatcgtttaatattcattgatattaagggtgctacagtcgttagcgatccgttatcctcgcaagaatttgcccggtag

SEQ ID NO: 375242 - DNA, 954 bp, Salmonella enterica
atgccagtcactttaaacttcggtaattatcaaaattatacacttaatgaaagccggcttgctcatctgctaagtgcagataaagaaaaagcaactcatatggggcgctgggataaactccaggatcactttagatcggaaaaaaaagaccatgcgctggaagtgctacacagcattattcacggtcagggccgtggggaacctggagagatggacgttaacgtagaggatatggctaaaatttacgcgtttaaacgattacaaaatttagcctgtcccgctcatcaggatctgtttaagatcaagatggacgcctctcagacacaatttctatttatagtcggcgacacggtgatcagccaaagcaagatccaggatatcctcaacatctcagatactgtagcagtagaatctatgagtagagaggagagaaagctatttttacaaatatgcgagatgattggttcgacgattacctgtcacccagaattacttcaggcatcgtcatctactttacgaaaagaggtgaccggcaatacaaaaatcaaagaggccgtttatgggatgatgcgtcccgcagaggctcccgaccaccagcttgtagaatggcaggattcactctctgaaaatgaaaaatcgacactggcctgtattaatgcaggtaactttgatcctatcactcagttttgcaaaataggttatcaggaaatacaaggagaagtcgcttttagcatgatacatccgtgtatctcctatttattacatacctattcgccgcttacagagtttaaaggaacaaatgcaggttttttaaataaacttaatcaggattataaagactatcataaaaataaaatgaatattgacccaattcttgagaagatatacttggcacatgaacattctttacatattggtaaaaatgagtgcagtcgtaatatattactggcttaa

SEQ ID NO: 375243 - DNA, 879 bp, Salmonella enterica
atgctggagtttacgtgtcgatatcactattggagaaagtcccggcggggagaaactgacggcggcgatgattatcattttttttgttggcattgtttagatgttgcggctgtgggctactggatggtgatagataatatttattttattgaccaccatctaaaaaaattaggcattaagaataaggagcagacagcgcaattttttgcctggattttattctggcatgacattggaaaatttgctcattccttccagcaactttaccgtcatgaggctttaaatgcctttaatgagcctacacgatattataaaaaaattgcgcatcccacgctgggatatgggttgtggaactcctggctaagtgaatgcccggagttatttcctccttcttcgctttcagttcgtaagagtaagcgcgttatggcgctttggatgccagtcactacaggtcatcatggacgccctccagatgcaatccaggaactggatcagtttcgtcagcaggataaagacgcggcaagagattttcttctcagagtaaaagcgctcttcccctcaacggcgaatgtgtctgtctttacgggtatagagacgcttttcccttttattcagcatctcacgccgttacaacaaaaagtgcttgaactagatattaatatggatggcgtacagttctttattcttgaagatgtcaccggggccggaaagacagaggcggcgctcatactggttcatcggctgatggcggcaggtaaagcgcaggggctctattttgggctaccgacgatggcggtaacgccatttaaacataacaacctgcgcttacttggactcagcaacaaagttttactgtgttccccgcgccagcggggataa

SEQ ID NO: 375244 - DNA, 1428 bp, Salmonella enterica
atggcatttgatgatttgcgcagttttttacatgcactggatcagcagggacaactgctgaagatcagcgaggaagtgaatgcggagccggatttagccgccgcagccaacgcaacgggacgaatcggcgatggcgcgcccgcgctgtggtttgacaatattcgtggttttaccgacgcccgcgtggcaatgaatactatcggttcctggcagaaccatgccatctcgctgggcttgccgcctaacacgccggttaaaaaacagatcgatgaatttattcgccgctgggacaattttccggtggcgtcggaacgccgggcgaatccgggatgggcggaaaatagcgtcgacggcgacgcaatcaacctgtttgatatcctgccactgtttcgtctgaacgacggcgacggcggattctatctggataaagcctgtgtggtatcacgcgatccgctcgatcccgagaatttcggcaagcagaacgtcggtatctaccgtatggaagttaaaggcaagcgtaagctgggtctgcaaccggtaccgatgcatgatatcgcattgcacctgcacaaagcggaagagcgtggcgaagatctgccgattgcgatcacgctgggtaacgatccgatcattaccctgatgggcgcaacgccgctgaaatacgatcagtcagagtatgaaatggcaggcgcgctacgtgaaagcccctatcctatcgccactgcgccgctaaccggttttgatgtgccgtggggatctgaagtgattctcgaaggggtcatcgaaagccgtaaacgtgaaattgaaggaccgttcggcgaatttaccggccactattccggcggtcgcaacatgaccgtggtgcgtatcgataaagtctcttaccgtagtaaaccgatttttgaatcgctctatttgggtatgccatggacggaaatcgactacctgatgggaccggcgacctgcgtgccgttgtatcaacagttaaaagccgaatttccggaagtacaggcggtaaacgccatgtacacccacggcctgctggccatcatctcgaccaaaaaacgctacggcggctttgcccgcgcggtgggcctgcgagcgatgacgacgccgcacggtttgggatatgtgaagatggtgattatggttgatgaagatgtcgatccatttaatctgccacaggtaatgtgggcgttgtcgtcgaaagtgaatccggcaggcgatctggtacagctaccgaatatgtccgtcctggaactggacccgggttcaagcccggcggggattaccgacaagctgatcattgacgccaccacgccggttgcgccagataaccgtggtcactatagccagccggttgttgatttaccggaaactaaagcctgggctgaaaagctgaccgccatgctggccaaccgtaaataa

SEQ ID NO: 375245 - DNA, 594 bp, Salmonella enterica
atgagattgattgtagggatgaccggcgcgaccggcgcgccgcttggcgtcgcgctactccaggcattgcggacgatacctaatgttgaaacacatctggtgatgtcaaagtgggcgaaaaccactatcgaactggagacgccctacacgtccatggaggtagccgcgctggcggattattgccatagtccagccgatcaggcggcgaccatttcctctggctcatttcgtaccgacggcatgattattatcccttgtagcatgaaaactctggcggggattcgctccggctatgccgaagggctggtgggacgcgctgccgacgtcgtgttgaaagagggccgcaagctggtgctggtgccgcgtgaaatgccgctcagcacgattcatctggaaaacatgcttacgctttcccacatgggggtggcgatagttccgcctatgcccgcgttctacaacctgccgcagaccgttgacgatattatccagcacatcgttgcgcgcgttctcgaccagtttggtctggagcatacgcgcgtgcgccgctggcaaggactgcgacaggcaacgaatttttcacaggagaatggataa

SEQ ID NO: 375246 - DNA, 165 bp, Salmonella enterica
ttgatacctactgagcgtcgacaaataattcttgatatggtggcggagaaaggtatcgtcagtatcgctgagctggccgagcgcatgcatgtatctcatatgaccctccgccgtgatttgcaaaagctggagcagcaaggcgcggtaatccaggtctccggctga

SEQ ID NO: 375247 - DNA, 204 bp, Salmonella enterica
atgacaacaggaactgattttcatgtcggcattgtggagcttggctcaatgggaatgggcgctggcaggcgcaggggatcaaagccaagctggcggttaaggattaagacgatattattagtccgggagcgcaatgttcccgaattggctacgatgatggggcgtgctccctgcaattccattgcgaacgtaaaaaatcaataa

SEQ ID NO: 375248 - DNA, 171 bp, Salmonella enterica
atgatcgtcaaaaactatgtaaggtttttggtcagggttagcttcgaaaacgacttttccagagctactgagctcaggcttaacatcgatactcaacttgttgataataaaagcctgattgagagttgttttcaaagtatcaccactatttgtagcccagagaaggagtaa

SEQ ID NO: 375249 - DNA, 207 bp, Salmonella enterica
atgactacaaatatcgttgatgttcatccagacaaaatcacacttgatggcgttgtccgtgaaggaaaaataagactcattactcaccttcacactgacctaaaacttaacggtaacagcatgcttgcaatcaaccttcaacttgaacaattaaaagcgattcacaaacaaatcggtgactatttagataaacataaaaacaattaa

SEQ ID NO: 375250 - DNA, 654 bp, Salmonella enterica
atgcaaaatagtattaacgagagtgaagcagggcaagaagctttatccatgattcaacggctgcgcatgcaaccgctgacgaatcaggggcaatatgatgctgcatgcatcattgatgacatcgagcgggaagtcaaaaaaatggccgatgagattgcagaattgaaaacaccacaatccaaagagcctggatattctgtttccacgtctattaaatcttgtgactattctttgcgtgatgcgaaaatagatgttttgtcgcacttaattaaatcaggtgttgtgcgtcttgatggcagtaatagtgagcgtcaggaaatggttaacgcgttgtgcgcatcatttgaattaattgatgcgcctaaggatgaaagactcaaccttaatggaggtgaaaataatccgtttggtgatttgcgctttggtgacctctgtattactggttgtgagccggttactggccgtaaatcgttatcgatatactcgcgttcatgttatgaaaataataaatttatagggcatgtttattatggggtttcgaaaaatgaatatgatgaaaaaagctatagtgaactggatgtgattaatgtggtacgtgctgtaaaaaataatgcgccggaagttggcgaaacctcatggcgcaagggaagctag

SEQ ID NO: 375251 - DNA, 285 bp, Salmonella enterica
atgcgggaagaacttaacccgattgaaaacacgctggttcagtaccccattgacggggttacgccagcaaagttcggggagctggttggtaagtcggccaacgctatcgatatgatgattaagaacaataagctgccatttgttgaaatgcgtgatccggcaaaacctaactcaaggggtgaaaaaatcgtttatatccccgcctataacgaagggcttaaaaaggcgtattacagcaagccaaaaccattagttagggcgtggcttgagtggcttgggatttaa

SEQ ID NO: 375252 - DNA, 321 bp, Salmonella enterica
atggcacatatgtcaagcatgggtaaaaaatttcgcttaattcgcaaggccgaaggaatgacacggcaagagttcgcggatgcaattggtttaccttacggaaccataactaactatgaaacaaagggtatacaagtaacggaaggcgctttcacgaaagttaccaagcaccccagatttaaaaagtatgcttattggttgtctacagatgaaacgatgccggaggttggtcaaatatccccctctctctcccctgatgggtccgaaaattcggaagctgctcaggtttcaatcaaaaccacagcaaaatctccccgttaa

SEQ ID NO: 375253 - DNA, 984 bp, Salmonella enterica
atggcgattaagaagctcgatgatggacgttatgaactggacacaagaactggcgggcgcggaagtaagcgcgtgcgtaggatttttaacaggaaggctgacgccgtagcgtatgaaaagtatatgctcggtaagctggggcgcaatgaatggcagattgtctctaaagctgacaggcggcctcttagcgaaatacttgaactctggtatttctgccacgggcaagcgctgaaaaacggtgaaattgaaaaccggcaactactcaagacgattaatgatctgggtaacccaggagttcatgaattgaacaagcgaatgctgattatacatcgcagccgcagactctcgcaggggataagtgcatcaaccatcaaccgcgatatgtaccggttgtctggaatgtttagcgcccttatcaaactcgacgagttttctggtgaaaacccgatgcgcggtttaccaccgttaccggaaaagaaccccggaatgacgttcctgaccacggaagaaatcagcgatcttcttgatgttctcaaaggtgattaccgtcttgttgcattactaagtctcagtacaggtgggcgatggagtgaagtcagtaccctgaccgctgcacagatagcccagcgtcgtgtcgtattccttgagaccaagaacggtaaaaagcgcgtggtgcctatttccgacgagctggaaaaggagatcacagaaaattccagcgcgtcattgtttaaggttgactatgagaacttctgccgaaagttgcgtaaagttaagcctaacctgccgcgaggacaagctacacatgtactgcgccacacgtttgccagccactttatgatgaacggcgggaatattattgcgttacagcaaattctggggcacgccactattcagcagacgatggcctatgcacatctggcacctgattacctgcaaaatgcggtgatgcttaacccactgaaaggaggaatcacggtgtaa

SEQ ID NO: 375254 - DNA, 672 bp, Salmonella enterica
atgcattatccggttgaggtattcacaggcaaaattcaggattacgcgggaagccgccccagcgctatcgcgaaggtgcaggtcgatggtgaactgatgctgacggacctggggctggaaggcgatgagcaggcggagaaaaaaattcacggtggccccgaccgcgcgctgtgtcattatccgcgcgagcattatcgttactgggcgcaggcgtttccagaactggcggaacggtttgtcgccccggcgtttggcgagaatctttccactgacggtctgaccgagcaaaatgtctatattggcgatatttttcgctggggagagacgctcattcaggtgacgcagccgcgttcgccgtgctttaagctcaattaccattttgcgattagcgacatggcaagccagatgcaaaacgtgggtaaaaccggctggctctacagcgtgatagcgcctggcagggtagcggcagatgcgccgctggagctggtttcccgtgtgagcgatgtcagcgtgcaggaggcgatcgccattgcctggcatatgccgtttgacgacgagcagtatcaccgactgctgtcggcggcgggattatcgaaaagctggacccggaccatgcaaaagcgccgcctgagcggcaggattgaaaatcagtcaagacgactgcgcggctga

SEQ ID NO: 375255 - DNA, 252 bp, Salmonella enterica
ttgcatttctttgggcaacaagttgaagcgaaaacgggcggcgatatcaaagtacagtacttcccggacgggcagcttggcggcgagcgcgaactggtggagttaacacaggtaggcgtcgtcgacatcaccaaagtgtcgtccggtctgatggagagtttttcgcctgagtacggcgctttctcactcccctacctgtttaccagcgtcgatgagtactaccgcggaagggataatccgcaggtgatgtaa

SEQ ID NO: 375256 - DNA, 1035 bp, Salmonella enterica
atgagtaacgcgattacgatggggattttctggcatttgataggggcggccagtgcagcctgcttctatgccccgttcaagcaagtgaaacagtggtcatgggaaaccatgtggtcagtgggcggcatcgtctcatggcttattctgccgtggacaattagcgccctcttactgcccgatttctgggcctattatggacagtttaacctctccacccttttaccggtttttctgttcggcgccatgtggggcatcggcaatattaattacggtctgaccatgcgttatctcggtatgtcaatgggtatcggcatcgctatcggcattacgcttatcgtaggtacgctgatgacgcctattatcaacggtaacttcgatgtgttaatccataccgaagggggacgcatgacgctgcttggcgtttttgtcgctctgataggcgtcgggattgtgacgcgtgccggacagctaaaagagcgcaaaatgggcattaaagcggaggagttcaacctgaaaaaagggcttctgctggcagtgatgtgcggtattttctcggcggggatgtcttttgccatgaacgccgcgaaaccgatgcatgaagctgctgccgcgcttggcgttgacccgctctatgtcgcgctgccgagttacgtggtgattatgggcggcggcgcgctggttaacctcggtttctgttttatccgcctggcaaaagtgcaaaatctgtcgataaaagccgacttctcgctggcaagaccgttgattatcagcaatattctgctgtccgcgcttggcggtctgatgtggtatttacagttctttttctatgcctggggccacgcgcgcattccagcgcaatatgactacatgagctggatgctgcacatgagcttctatgtgctgtgcggggggcttgtcggtctggtgctaaaagagtggaaaaatgctggccgccgtcccgttgccgtattaagcctcggctgcgtggtaattattattgcggcgaatattgtcggtttaggcatggccagttaa

SEQ ID NO: 375257 - DNA, 447 bp, Salmonella enterica
atgaccgcccttacaacgaactgcatcgatctcagtattcagggcaacagcgcttactccattcttaaacagttggcagaaatggcgttccagaacggctatatcaccgatcgtcatcagttcctgcaaacgctgctactgcgggaaacgttgcattccacgaggtacggctcaggcatcgccgtaccgcacggtaaaagcgcctgcgtgaagcatccctttgttttgttcacgcgcaaatctgaaaacgtggactggaaggccagcgacggcgagggcgtgaactgctgggcctgcctcggcttaccgctggctggcgaagacgatcaggtcaaaattatcggcaccctgtgccgcaaaatcatccaccaggattttatcaacctgttaaagcaagggaatgccgaccaggtactttctttgttaaatcaaacacaaaacttataa

SEQ ID NO: 375258 - DNA, 420 bp, Salmonella enterica
atggagtcatccttacgtttagtagcgatcaccaactgcccggcgggaatcgcccacacctctatggtggcggaagcgctggagcaaaaagcgcgttcgctcggccatactattaaagtcgagacccagggttcaagcggcgttgaaaaccacctcacccacgaggagatcgccgccgccgatagcggcgtcaagttgggtaagcaggatgtgcagcagggtagcatgatgggccatctgatggcgggcgtttcccccgcgctgccgttcgtgattggcggcggtagacggcgatattcccgccaatctggtgctctcgcttctggagctgggcgtaccggaaatggcgcagctcatcctgccattaagcctgttcctggggcttctgatgacgcagggcaaactgtataccgaaagtga

SEQ ID NO: 375259 - DNA, 240 bp, Salmonella enterica
atgcttatcccgttcgtcacgctactgttgttcggcgtgctgacgtattacgtcatcggcccggtgatgtccgacgtgatgggcggcctgctgcacttcctgaacaccattccaccgtcgatgaaaatgggcgcggccttcctcattggcacgatgctggcgtttgatatgggcgggccaatcaacaaaaccgcctggttcttctgcttctcgctgctggaaaaatatatctacgactag

SEQ ID NO: 375260 - DNA, 201 bp, Salmonella enterica
atgccgcccgtcgcggcaggtatcgctacgtatcttgcgccgaagctatttaccctgcaggagaaggccgccgccagcagcgcgattgtggtgggcgctaccgtcgctaccgaacccgcgatcccttatgcgctggccgcgccgctgccgatgattaccgccaatacgctctccggcggcattgccggcatacgtcactga

SEQ ID NO: 375261 - DNA, 399 bp, Salmonella enterica
atggcggtatatgacgctagccagataactgaagattttcagcttgtgacgcgcagcggcggcagcgcaggcgagcagcacatggtcaacgggctcattattaacttgtacggggttcgccagggtgatgaaaaatccgcggaaatggaattcctgctcgctccagcagtgggggatggcgaggtgattgataatcaggttctcgccttcgccttcccgggcgcagattcgcagcgcgtcatcctcggtgatgtgggcctggctcaccaatcggtcacaaatttgcctggtgatggtattccagtcttctctcgggagattcgggtaatgaaaacttcgtgccttagaaaagaagcgttctggctgttattgataataagtaccggatcaatctcctga

SEQ ID NO: 375262 - DNA, 213 bp, Salmonella enterica
atgaagataatcagaaattttgtcgcagttgtcgcttttactacttcttttggttctttcgctgcgcagtcagtgaccgcaacggattccacgctggaaagtgcagaagccaaaatcgctgcgcaggctgaacaggttggcgcaagcgactacaaaattactcaggcttacacgggcaaccgcgtgcatatgaccgctgaactactgaaataa

SEQ ID NO: 375263 - DNA, 141 bp, Salmonella enterica
atgagtagtaagtgttatcccggcgagctcaacattgaagctgtcaaacaggtttttaatcgtggtcattctgtttccagcgttgcaacacatctcggtatcaccacccagtctttatgccaggataaatggcggtcatga

SEQ ID NO: 375264 - DNA, 255 bp, Salmonella enterica
atgaacttattgactgaaaaagaaatcaacaatatctgtggtgccggatttggtgattatggtggttatactagtggtgaattaggagcaaaagcaggatgtgccatagactcaattctggggatccctgcatgtggacataataatggtaaaaatccagggaaactcgacccccatgctcctaatatcagtgaaccattaaaaccaaaaccttactggaaccaaccgatgaccgaatggcatggtggtttttaa

SEQ ID NO: 375265 - DNA, 636 bp, Salmonella enterica
atggaaccgatgaaatacgagctaaccaatattactcagtactataatggtgtcgccttgcgtcgcattcgcgcactacgtgatagtgaattatccggatttaaaaggggtgacattggtggatggatacaaacaaccgataatctctctcaggaaggagaatgttggattcatcatgatgcccgcgtcctgggaaatgcccgagttactggcgattgccgtatttcagactacgcagaaataagtggaaatgccagagtttctggctttagtttaattgagcattgtgcagtagttactgataatgctgtgttggaaggtgttgtcagactttctggctacagccgagtttttggccatgcacacatttgctgtggcgaggatggtccgcaaatattatccgacgtttggataaatttcgatattgattatgacacaaactacgccatttttgttgatggtcgcgatgccggcctgataatcgccgtttcacaaaacggttcaatatgtgtggctggtaactgggattttgacggattttttggcgatcttcctgcgtttaagcaatgggctcagaagcacagtaaggcggcagtaagattgttaccaggcatcagctattggttatctcagtag

SEQ ID NO: 375266 - DNA, 1275 bp, Salmonella enterica
atgttccgtaaggaagctctggaaagccgaaaaatgatatggcatgggaaggcattgctactcccgggaatacctcccattatagtaatatttttttgtctgttttttttatccttctttttatattttgttattacgaaggactatacgcgtcgtgttaccgtaagtggagaggtaacgacatggccgcgtcccgtcaatatctattccgatgtgcagggatttgttgttgaccgctttgttacggaagggcaggtcgtaaaaaagaatacaccgctatatcaaattgatgtcagtaaaagtactcgaaatggcgtggtcagcagcagacatcatgcagatatcacgacccagatccgtcaggtggataatattatctcagggctaaaggacagcaaaaaagccacactggatgctctggaaaaacagaaaatacagtatatccaggcgcttcaaagttcgtccgatatcattcgtcatgccgaagaaggtatccgaatcatgaagaaaaatatggataattatcgccagtaccagtcccgaggcttgattacgaaagatcagttgacgaatcaggaaacaatttattatcagcaacagagcaacctcctgggactgaatagccagaatgaacagaatgcattacagttaaccagccttgaaagtcagatacgaattcaggctgcagaattcgataaccggatttatcagatgatattgcagcgttatgaattacagaaagaactgatcaatacagatattgagagtgctgtcattattcgtgcgttatctgatggaaaaatagattcactgagtgtgagtacagggcagatggtcagcgctggcgacagtctggctcagattttacctgataccgtcagacactactatctggtgctctgggtgccaaatactgctgtaccttatataaccactggcgatagggttaatattcgttatgaagcattccctgcagaaaaattcggacagtttccgggagttattcagtctatatcacgtgcacccgcaaccccacaggaaatgcgcacataccagggcgccccccagaatacatcttctctctccgtaccctattacaaagtcatcactcgactggacaggcaaagtatcacttatggcggtaaatcgcgcccactggaaaacggaatgaaggcgcaggtaacgttgtttctcgaaaaacgaaaaatttggcaatggatgttgtccccattttacgacatgaagaacagtaccacagggccagttaatgaatag

SEQ ID NO: 375267 - DNA, 390 bp, Salmonella enterica
atggcaaaggcaccaattcgcgcacgtaaacgtgtaagaaaacaagtctctgacggcgtggctcatatccatgcttctttcaacaacaccatcgtgactattaccgatcgtcagggtaacgcgctgggttgggcaacagccggtggttccggtttccgtggttctcgcaaatccactccgtttgcagctcaggttgcagcagagcgttgcgctgacgccgtgaaagaatacggtatcaagaatctggaagttatggttaaaggtccgggtccaggccgcgaatctactattcgtgcactgaacgccgctggtttccgcatcactaatattactgatgtgactccgatccctcataacggttgtcgtccgccgaaaaaacgtcgcgtataa

SEQ ID NO: 375268 - DNA, 558 bp, Salmonella enterica
atggctaaattagcactgttttcggtgcgtaaaaatgagccctgcccgcagtgcggggctgaactggtaattcgttccgggaaacatggtccgtttctcggctgtgctcgctatccggaatgtgagtatgttcgtccgctgaaatcgtctgctgacggacatattgtcaaagttctggagggtaaactttgtcccaattgtggcgcagcgctagtgttgcggcagggacgatttggcatgtttatcggatgtagcgagtatccggcttgcgagcataccgaactcattgataaacctgatgaaactgcaatcgtttgtccgcaatgtcaaaaaggccatctggtccagcgtcgctctcgttatggcaaaacctttcattcctgcgatcgctatccggagtgccagtttgccattaactacaaacctatagccggagagtgtccggagtgccattatccgctactcatcgaaaagaaaaccgcgcagggcgtgaagcgcttttgcgccagtaaacaatgtggaaagccggttccggcggaacaaacaagtgaacaataa

SEQ ID NO: 375269 - DNA, 1662 bp, Salmonella enterica
atgctacattttaattctgttcctgtatctaataaaaaattcgtctttgatgatttcatactcaacatggacggttccctgctacgagcagataagaaagtaaatattccgccaaaagaatatgctgttctggtcatcctgctcgaagctgctggcgagattgttagtaaaaacaccttactggaccaggtatggggtgacgctgaagttaacgaagaatctcttacccgctgtatttatgccttacgacgtatcctgtcggaagataaagaacatcgttacattgaaacattgtatggacagggctatcggtttaatcgcccggtcgtggtggtctctccgccagcgccacagcctactactcatacattggcgattcttccttttcaaatgcaagatcagatccaatctgagagtctgcattactctatcgtgaagggattatctcagtacgcgccctttggcctgagcgtcctgccggtaaccattactaagaactgccgcagtgttaaggacattctggagctcatggatcaactgcgtcccgattattatatctccgggcagatgatccccgatggcaacgataatgttgtgcaaatcgagatcgttcgggttaaaggttataacctgctgcatcaggaaagcattaagttggtggaaaaccaacccgcttctctcttgcaaaacaaaattgcgaatcttttgctcagatgtatccccggactccgctgggacacaaaacaggttagcgaactaaattcgattgacagtaccatggtctatttacgaggtaagcatgagttaaatcaatatactccttacagcttacagcaagcgcttaaattgctgactcaatgcgttaatatgtctccaaacagcattgcgccttattgtgcgctggcggaatgctatcttagcatggcgcaaatgggaatttttgacaaacaaaacgccatgatcaaagccaaagaatatgcgattaaggcaacagaactggatcatagtaatccgcaagctttaggttttttgggattaattaatactattcattcagaatacatcgtcggaagtttactattcaaacaagctaatttactttctcccgtttctgcagatattaaatactattatggctggaatctcttcatggctggccaactggaggaggccttgcaaacaattaacgagtgtttaaaattggaaccaactcgtgcagcagcaggcatcactaaactgtggattacctattatcatgccggcattgatgatgctatacgtttaggagatgaattacgttcacaacatctgcaggataatccaatactattaagtatgcaggttatgtttctttcgcttaaaggtaaacatgaactggcacgaaaattagccaaagaaatatccaagcatgaaataacagggcttattgctgttaatcttctttatgctgaatactgtcagaatagcgagcgtgcattaccggcgataagagagtttctggaaagtgaacagaatactgataataatcccgggctattaccattagtactggttgctcacggcgaagttattgccgagaaaatgtggaataaatttaaaaaagaagacaatatttggtttaaaagatggaaacaggatccccgcttggttaaattacggtaa

SEQ ID NO: 375270 - DNA, 882 bp, Salmonella enterica
ttgaataatttaacattgtcttcattttcaaaacccagtgtgacgagtaatacccgactgtacatcgctaaagaaaatactaatgaggcacacgtcgcacctgagaaatttgcgtcaaaagtattaacctggcttggtagggttccgctatttaaaaatattgatgcggtgcaaaagcacatggaaaataccagagtacagaatcaaaaaaccttacaggtatttctcaaagcattaactgagaaatatgatgagaaatcagtcaatgcaataaccctcatggctggattaaatgattcgatcaagccttttactccagtcaggttacaacagatcacgcaaatggtgaaggatgctgaagaaagtttctcaaaagatatccggtctaagcaaaatgctagtctcccgaaagtcttttctttagttgcaaaaggcgtagagacaaaagtgacagaacaaaatggcgattttggtacaggaatgacgcaacttttactcgatatcgctttaaacggagttaagagagcaataccgcaactggaaaaagtggacggaaatagtttacgaaaaaacttccaggagatggcttcgggtaatggcccgctgcgtacattaatgacgaatttgcagaatttaagtttagttccagaggtcaaacaacttaatgattatgctataaatttaaaaaatattcaggtaggaacagccccgttctcacaatggggcacctgcgggggagaagttgcgagatggattgataaagcctccgatcaagaattaaccctggctgcaaaaaagattcaggttattgttgaaaaactaaaatacgttgcaactgaacttgaaaacataaaagccggtgcgcctatgtcacagcgttga

SEQ ID NO: 375271 - DNA, 393 bp, Salmonella enterica
ttgcggacacaccatgatattatcgctgatattggtgaggagttaggtttaccactcacttttgatgacaataatcagtgcttattacttcttgataccgatatttttatggctattgaagctaaagatgatatctggttattgaacggtatgattatacctctatcacctgtttgtggtgattctgtctggcgacagattatgatgattaatggcgaactggcaacgaagaatgaaggtacgttagcgtatattgacacagcagagacattattgtttataaaagcaattaccgaactggcaaatatgtaccatattatatcgcagcttgagtcatttgtgaatcaacaggaagcgcttaaaaagaggctgcaagaatacgctaaagtgtaa

SEQ ID NO: 375272 - DNA, 216 bp, Salmonella enterica
atggctgaaatatatgatgatatcgctgacaattcacgccttattattaaaagcaagttacgccatgttgaaaatgatccgaaagagttgctgatatgtgtcccgacgcgtagtgagtggctattttactggattaaaggagataaacattgcgcccggcgacgggcgtataagaacatcaaacattacgtttccaaaatcaaaccgaaaaattaa

SEQ ID NO: 375273 - DNA, 249 bp, Salmonella enterica
atggatatggatattgaatcaagagtcaaaaaagtgattacctcctgtattaccgttgagattaatagcatcaatggtcagaccaatctggttgaggatctttatgctgattcgctggatttaattgatattgtatttggtctcagtgaggagtttgacattagttgtaatgaaaacgatcttccggatatgacgaccattacggatatatgccgtgttgtcgaaaagagtttgcagtccaggggatag

SEQ ID NO: 375274 - DNA, 2016 bp, Salmonella enterica
atgctaccaagtgtaagtactcagaattccgttatgatgactggtttgcaaaacgagataaaagcgcaggccacaaatcttgcggcgaatatctccgcagtcaacggaaatgccgcaaagacactgtcaggggaaattaaaggcccacaactggaggattttccagcgctagtcaaacagtcgagtctggaggcgttgttcaaatgtgggaaagatgccgatgcgttaaaagaaatttttaccagctcaagcaatgtcggcgccaagagggcggtaacggaatttgcggaactctttcattcggcgctaaaagccaccagcgactcgcctgcggcgaaggagctactgatgaaggtggggaaagagtataccgagcagatcatgaacgatggtctgaaagaaaaatcggcgtttggaccatggacaccaaaaacggacaaagcggaagcgaagcttgaaatacttcataataagctgttggatatcattaaaaataacatcggcggagatttaggaaatttatctacgcagtttgttatgcatgaagtgatgccctatattaccaattgcattgaacatcaatttggttgtacgttagatccgctaacccgtagtaatattgcacagcttgttgataaagcggcgaagaaggcggttgacgcacttgatatgtgtcaccaaaaattaacgcaagagcagggtaccagcgtaggacgggaggctcggcaccttgaaatgaaagcattgatacctatgttgctacgtaatgtttttgcgcaaattccggcggacaaactgcccgatcctaaaatcccggaacctgcggctggaccggtacctgatggtgggaaaaagccagagtctgcgggtattaatatcaatattaatattgatagtagtaagcatagtgtggataacagtaagcatattaataatagtcgaagccatgtcgataatagccagcaccataatgataatagcaaccatgataatagccaacggcattacgagtcacactattcgaataccagcagtagcgtaaaccatagtcattctcgtgtggacgcaaatacgcatcaaacggagacggcacacagcgccagcaaggggatactggaccagggcatcatgggtaaaattgacgtcacggctcatgccactgcagaggctgtgaccaacgcttcagcggaaagttccggcggaaaggtggtcacgtctgaaaaaggaaccacgggtgaaacagcctcttttgatgaagtcgatggaggagacaataaggtcattattggcaagccaatgcaggccacggtgcatggcgttgctggcaataaagagcaaatccagacggcagacactgtgaatgtgaagacgcttgctagccaattgcctgatgtcgaagatgtaaaaatccatactttgcagccagaaacgacggtaaatacaggtaataaagcgggtacgactgataatgataatagtcaggcagataaggctggccaattttccggtctgaagtttaagcaaaatggcttcctttcagcaattccgagcgttacgaatatgcgttcaatgcattttgacgcccgtgagacatttttgggggttatacgtaaagccctggagcctgatacctccacaccgtttccagtacgcagagcgtttgacgggttgcgtgcggaaatattgtccaatgactctataaagagtgcagcgttgaaagcgcaatgtagcgatatcaacaagcatccagaattaaaagtaaaaattgatacgcttaaagaggctattactcttcatccacaacgagaaaaactggctgaggttgcgctgcagtttgccagagaggcggggttgacaaagttaaaaggagaaaccgactatttgttaagtacaatgctggacggcatcatcggagacgttagctggcgtaatggcccgtctttcgagtcatacctgaataaaccaggcgtagatcgggttattactactgttgatggtctgcatatgcagagttaa

SEQ ID NO: 375275 - DNA, 1023 bp, Salmonella enterica
atgcttaatattcaaaattattccgcttctcctcgtccgggacttgttgccgagcgtccacagacgacatcggcgagcgagcacgtagagattaccgccgcgccggccacaacagaacatcgcggcgcggatattattacattatctcaggcggccactaaagcccaacaggcacagcagacgttacgatcaacattgccggtctccgaagagaataatgacgaacgcactctggcgcgtcaacagttgaccagcagtctgcatgcgctgacaaaatctggtgtttcattatctgcagaacaaaatgaggggctgcggagcgcgttttctgcacctgcggtggcattatttagcacagcgcctatggcacagccgcgagtaactatttcagatgccgagatttgggatatggtttcccaaaatatatcggcgattggcgacaactatctgggcgtttatgagaacgttgtagcagtttataccgatttttatcaggcattcagtgacattctttccaaaatggggacctggttagcacctggcaaagatgggaatactgttaagctaaatgttgatgctcttaaaagtgaaatacgtagcttggttaataaatataaccaagtaactaaaaatacaattctgtttccctcgcagacaggcagtggagtgacaaccgcgacaaaggcggaagctgagcagtggattaaggagctgaatttaccaggcagttgtctaaaggcatctggttccggttatgtcgtactggtggataccgggccactgaacaaaatggttagcgatcttaatggaataggatcgggttccgctcttgaattggataacgcgaaataccaggcttggcaggcgggttttaaagctcaggaagagaatttaaaaacgacattacagactctgacgcaaaaatatagtaatgccaactcattgtacgacaacctggtaaaagtgttgagtagtacgataagtagtagcctggaaaccgctaaaagcttcctgcagggataa

SEQ ID NO: 375276 - DNA, 1071 bp, Salmonella enterica
atgtcctcgaataaaacagaaaaacctactaaaaaacggctggaagattccgctaaaaagggtcagtcatttaaaagtaaagatcttattatcgcctgtttgactctgggaggaattgcttatctggtgtcgtatggctcatttaatgagtttatgggaattattaagatcatcattgcagaaaattttgagcagagcatggctgactacagtctggccgttttaggggtagggttaaaatacctgattccatttatgctactctgcttagtgtgttccgcattaccgacgttattacagacgggttttgtgctggcgacagaggcattaaaacttaatttgtcggcattaaacccggtcgaaggggcgaaaaaacttttcagtatgcgaacagtaaaagatacggtcaaaactttactgtatctctcatcctttgtggtggccgcaataatttgctggaaaaaatataaggttgaaatcttttctcagttaaatggcaatgttatgggaattgccgtcatttggcgtgagcttcttctcgcgttggtattaacttgccttgcctgtgcattaattgttttattattggatgctatcgctgaatacttcctgaccatgaaagatatgaaaatggataaagaagaagtgaagcgtgagatgaaggagcaggaagggaacccggaggttaaatctaaaagacgtgaagttcatatggaaattctgtctgaacaggtgaaatccgatattgaaaactcacgtttgattgttgccaacccaacgcatattacgatcggtatttattttaaacctgaactgatgccgtttccgatgatctcagtgtatgaaactaatcagcgcgcactggccgttcgctcctatgcggagaaggttggcgtacctgttatcgtcgatatcaaactggcgcgcagtcttttcaaaacccatcgccgttatgatttggtgagtctggaagaaattgatgaagttttacgtcttctggtttggctggaagaggtagaaaacgcgggcaaagatgttattcagccacaagaaaacgaggtacggcattga

SEQ ID NO: 375277 - DNA, 444 bp, Salmonella enterica
atgaaaaaattttatagctgtcttcctgtctttttactgatcggctgtgcccaggtacctcccccttcctccggaagtaagcctgtacaacagcctgaagttcaaaaagagcaacaagccaatgcaaatagtattgataagtgtatgtctcttccgtacgtaccatcagaccttacggagaataaaacattatcaaaccaaaaatctgaaaattccacatcaaaaaataataccatcagctcaagcgttttttgcgaaaaatatagacaaaccaaagagcaggcattcaccttctttcaggagcatccgcaatacatgcgttcgaaagaagatgaagagcagctaatgactgaatttaaaaaagtcctgctcgaatccggaagtaataatttaagcatatatcagactttactcactgcccataaaagactgcaaaccctataa

SEQ ID NO: 375278 - DNA, 1134 bp, Salmonella enterica
atgaaaacgttcaccgaccgctggcgacaactgggatgggacgatatccggctacgcatcaacagcaaaaccgccgccgatgtggagcgtgcgctgaatgcttcacgcctcaaccgtgaggatatgatggcgttactctcccccgccgccgtcgattacctggaaccgctggcgcagcgcgcgcaaaagcttacccgccagcgtttcggtaataccgtcagcttttatgttcctctctatctctcgaacctgtgcgccaatgactgtacctactgcggtttttcgatgagcaaccgcattaagcgtaagacgctggatggggtagatattcaaagggagtgcgaggccattcataagctgggctttgaacaccttctactggtgaccggagagcatcagaccaaagtaggaatggactattttcgccgtcatttaccggcgattcgccgccagttttcatcattacaaatggaaattcagcccttatcgcaagaaaattacgcggagctaaaaacgctgggaatcgatggcgtgatggtttatcaggagacttatcatgaggcaatctatgcacagcatcacctgaagggaaaaaaacaggattttttctggcggctggaaacgccggatcggttgggccgggcaggtatcgacaaaattggtcttggtgcgctaattggtctatcggacaactggcgggtggattgctacatggtagctgaacatatgttgtggatgcagaaacactactggcagagtcgctactctatttccttcccgcgtcttcgcccgtgtaccggcggtgtggaacccgcatctgtgatggatgaaaagcaactggtgcaaacgatttgcgccttccggttactggcgccggaaattgaattatcactctccacccgcgaatcgccgtggtttcgcgataacgtgatcccgctggcgatcaacaacgtcagcgccttctcgaaaacgcagcccggtgggtatgctgacgatcatccggaactggagcaatttgcgccgcatgacaatcgccgacctgaggctgttgccgacgcgctaacggcgcaagggttacagcccgtgtggaaagactgggacagttggctggggcgcacttcgcaaacgcggtga

SEQ ID NO: 375279 - DNA, 180 bp, Salmonella enterica
atgaaatcattcccggcatataatattcctccatttattatcaatcaatgggaattgttatttaataaccaattaaattattttagctcttcttactcccatatttcacaaggaatgccgtatatcctcgttctgaacagcgctgcgattttaaagttgcgttgtagtagagaaaactga

SEQ ID NO: 375280 - DNA, 678 bp, Salmonella enterica
atgaaaatacccagcattaacaatcaaaacatttcgtttccggatcggattaatgcgatagatataataatgaaaacttatcctgatgtaactccttattttttcatggaaaaaccaaatatttatgatcagaaatacatttcaggtataaccagagaacagtctgtatttaaagttaatggatacattaataaaaaagcagaactcactcattatatgcaacgtatgtattcagactctcacattaattttaaaaccatctccagggatgaagccaacacctctgaaggaagttggttaactgttattacagggaaacgtccaatgggacagttttcagtagatagtctttattcaccggtgttgcattcattgcttgaactaccaaatattggatgtaaaattttccccaaagaggacaatagttttttatatataatagtagtatacagaaaagattgtgcgcagggtgaacaatatgcagaccgatttattgaattatacaataaaaaaagagaattaatgtgtgatatgagtaatgagtctaatgaattgaaaacaataaaatcagagcttgttgtcgcaagggaaatgggaacaattttaagttacttaccagaggaaatagataattatatctctaaaatgaatttattatttttaaaaaaaactaattaa

SEQ ID NO: 375281 - DNA, 1917 bp, Salmonella enterica
atgggtaaaattattggtatcgacttgggtactaccaactcttgtgtagcgattatggatggaatgcaggcacgcgtgctggagaacgccgagggcgatcgcactacgccttctatcattgcttatacccaggatggtgaaactctggttggtcagccggctaaacgtcaggcagtgacaaacccgcaaaacactctgtttgcgattaaacgcctgattggccgccgcttccaggacgaagaagttcaacgtgacgtttctatcatgccgtacaaaatcatcgaagctgataacggcgacgcatggcttgatgtgaaaggtcagaaaatggcgccgccgcagatttctgccgaagtgctgaagaaaatgaagaaaacggcagaagattacttgggtgaaccggtaactgaagcggttatcaccgtacctgcatacttcaacgatgctcagcgtcaggcaaccaaagacgctggccgtatcgcggggctggaagtaaaacgtatcatcaacgaaccgactgccgccgcgctggcttatggtcttgataaagaagtcggaaaccgtactatcgcggtatacgacctcggcggcggtaccttcgatatttccattatcgaaatcgacgaagttgacggtgaaaaaacctttgaagttctggcgaccaacggtgatacccacctgggcggcgaagacttcgatacccgtttaatcaactatctcgttgacgaatttaagaaagatcagggcatcgacctgcgtaacgatccgctggcgatgcagcgcctgaaagaagccgcagaaaaagcaaaaatcgagctgtcttctgcgcagcagaccgacgtgaacctgccgtacatcaccgcagatgccaccggtccgaaacacatgaacatcaaagtgacccgcgcgaaactggaaagcttggttgaagatctggtgaaccgttctatcgagccgctgaaagtcgccctacaggatgctggcctgtccgtatccgatatcaacgacgttatcctcgttggcggtcagacccgtatgccaatggtgcagaaaaaagtggctgagttctttggtaaagagccgcgtaaagacgttaacccggatgaagctgtcgctatcggtgctgcggtacagggtggcgtattgaccggtgatgtgaaagacgtgctgttgctggacgttaccccgctgtctctgggtatcgaaacgatggggggcgtgatgactccgcttatctccaaaaacaccacgattccgaccaagcacagtcaggtgttctctactgcggaagacaaccagtctgcggtaaccatccatgtgctgcagggtgagcgtaaacgtgcgtctgataacaaatctctggggcagtttaacctggatggcatcaacccggcgccgcgcggtatgccgcagatcgaagtcaccttcgatattgatgctgatggtattttgcacgtatccgcgaaagataaaaacagcggtaaagagcagaagatcaccatcaaggcgtcttctggtctgaacgaggaagaaattcagaaaatggttcgtgatgcggaagcgaatgctgaatccgaccgtaagtttgaagagctggttcagacccgcaaccagggcgaccatctgctgcacagcacccgtaagcaggttgaagaagcaggcgataaactgccggctgatgataaaaccgctattgagtctgcactgagcgcgctggaaaccgccctgaaaggcgaagataaagccgctatcgaagccaaaatgcaggaactggcgcaggtttctcagaagctgatggaaatcgctcagcagcaacatgcgcagcagcaggctggctccgctgacgcttctgcaaacaacgcgaaagacgacgatgttgtcgacgctgagtttgaagaagtaaaagataaaaaataa

SEQ ID NO: 375282 - DNA, 2085 bp, Salmonella enterica
atggctaccagcaaactgatccagggtgatacgcttactgaaaccagcaatgcagcagatggttttaatcccgcaaaagaagacagcaaatttagctatacttctgcccgcgtagcgaagcgtgtgtataacaaatataagaaagctgacaacaagccgaaagtatttggctacttcaccgattggtcacaatatgatggacgtttacagggcaatgatactccgtcagaacgcggtcgtggctacgatctggctcaagtctctcctactgcttacgataaaattattgcaggttttgttggtattgttggctttcataaaattgatggacagtctcgcgacgtagtgcaggaagcggcagatgcgtgcggcaaagtaaaatatgaaccgaccttcctcgatccgtggggggatttccagtcttatgttaacgtcggccactcagtaagcggctgggatgttgatccgaagacggtcacgcagtccaacaccaaaggttttctgggggggttgcgtgatctgcaggcgaaagctaaacagcagggccacgatctggtgctctctatgagcattggcggctggaccatgagtaacggcttccatgaaatggcctccagcgccgaagcccgctctatcttcgcgaaaggcgtagtgaaactgttcaaacagttcccgatgttcagcgaagtcgaccttgactgggaatacccgaacgtagaggccgcaggcaatccgtatggtccggaagatggtgataactttgcactattgattgctgaactgcgtaaagaactggacaaagcgggccgtagcgatgtgaaaatttctattgcggcatctgcggttgttgccaacattgcatattccaatgtgaaagcgctgatgtcggccggtctgtactacatcaacgtgatgacctatgacttctttggtacgccgtgggcagagacgctgactcaccatactaacctgaaagcgctggagaaaggggcatggggtgttgataccattatcgaccatctgttggcggaaggcttcccagccgatcgcatcaacatcggttatgctggttacactcgtaatggccgcgatgctgaaatcaacagcttctcacctttaaatggcagctacaaccctggtgccggcaccactaccggtacgtttgaatcgggtacaagtgaatggtacgacgttatctataactatctggatctggaaaatcagaaaggccgtaacggctttaatgtttacaccgaccaggttgccgatgcggattacctgtacaacccagaatcaaaactgttcctgtctctggatacgccgcgttcagtgaaagcgaaaggcgaatatgccgcgaagttggggctgggcggcgtattcacttggaccgttgaccaggacaacggcgtactggtcaacgcggcgcgcgaaggtctgggctacgagatcgaatctgaagtcattgatatggagccgttctacttcgaaggcatcaatgtcgagaaagatgaggatgaagaagacaagaccgtggttgtcaatcatgcgccgaaagcggcaattgagctactggttgttggtggttctaccgtacaactgtctggtgccggttcttctgatgaagatggcgatgcactgacctatagctggggcgtaccgaccgaaatcgatgttgcggacaaaaccgcgtcagtcattcagttcaccaccccggaagtgagcgcgaaaactactcttcagttcacactgtttgttcgtgatgagcagggtgagccatcttctcaacagcgtttcgtgttgacagtcgttccggcggcttctgaaatccagccagaacccgcggatgaagaagatgtgacgcctgaagaagataacgttacaccctctgaagacgatacgccggcagatgaaaatacgccgaatccactgtgggataaagatactgtctacggcgcaagctggggcactttcgagatcgtaagctggaaaggtcacaactaccaggtgaaatggtggtctcagggcgatcaaccggatctgaactgcggtgctggcggcgcgtggaccgacctgggcgcttactaa

SEQ ID NO: 375283 - DNA, 306 bp, Salmonella enterica
atgaccatttccattcataccagcacatttgacgtcaatagctggtaccaaaaagtcaccttaaccttcatcaatgagagcggcaatccggtcgatatgaaccatgcctcgataacatttacggcttccggacatatcgatccatggggaaatattggcggtacgctcaaagggaacctgccgcttacgctgaataatacgtcgcatggcacgctggaaactaacgacatcatcattaataacagcgacgtgttactttttcagccgggtgaacgtttagcctcgcggctacacaggtaccggtaa

SEQ ID NO: 375284 - DNA, 822 bp, Salmonella enterica
gtgcaggtgaatgcccaactgactgcggcgatacaggcattaccgactattcatggctttatcacgccttcgttgccgacgtttagcgacgatctttacggttatattcaggcggtaaactatcttgttcgtcagtttgccccggatgtggcttttggctggcagacgaatgtctgggcgacaggaacggcggattgggtgctgcgcgaagccgctgatccggtagctgaagggcagacgattgccggatttattcatgaactgggagtttatagcggaaaatatccgccagactttatcgcgtttgataaatttgaacgtgattgtttcagtcctgatgcgcttgctcactatggctggaatgcgacatgttggcttaattacctggcaatgataaaacaggtgacgaaaatgctgctgacgcccgccatgctttggcaaattactggcggccatatgcctacagtagaagagggcgtgagtaaaatccctgcggcgcactttgcatctggtgggacattttttatgggggacgcccgcattgacagcaatcctgagacactctctttgcagttactcaatacggcactaaatagcgcgacttacggcgtcctgactgtcggcgactttttgcgtaaagataaagggcatgactgtagccaaatgcagacgctgaacctgccggactttaacgtcttctctatcttatggggaggcggttccactatcagtattacgacgatccattctaacggcgaggacggcggctggctggcggataaaatggtagagtattatgccgctccacgatattttagataa

SEQ ID NO: 375285 - DNA, 702 bp, Salmonella enterica
atgcgtcctacatcccttaaactgacattaccttcgttacatctaccctcatcttcgaattcagctacagacatacaatctctggtaaaaaggtcgggtgtgagatggataaaaaacaatcagcaactttctttccacgggactgaccataaaatctaccaacaacttgaagctgctctcgataagatcgagtccacagacactggacgtattcttttgaagtgtattgaattaacatcccaactcaaatcagaaaaactggcaatacatctcaattgtgctgagttaggggtggtcgcacactgcaacacggatgctgaaaacgcccgaggaactggttccgactttcactgcaatctgaatgcagttgcatatccttgtgggcaaggaattagtctggtggactttcatgcgtgcattgttttccatgagcttctccacgttctccacaacttaaatggagagcgtctgaaagttgaaagttctcaaccagaatcacaaacacactacccatttttactcgaagaagccaggactgttgggttaggctctttttctgaggaagttctgtcagaaaataaattccgtgaagagattggggtgccccgcagaacattctatccgcgtgatccatatctcatacatgatgacaatacagtgactcagggactccaacggaaaaaactgcatccattactttag

SEQ ID NO: 375286 - DNA, 171 bp, Salmonella enterica
atggaacgcttcttcagaaacctgaaaaatgcgtgggtaccggtgacgggttacataagcttcagcgatgcggcccatgcaataacggactatatcgtcgggtgttacagtgtactcaggccgcatgaatataacggtgggttaccaccaaacgaatcgatgaagctttaa

SEQ ID NO: 375287 - DNA, 699 bp, Salmonella enterica
atgaacaaaaatgcagtccttcagttacgcgccgaacggcttgcgcgcgctacgcgcccttttcttgccagaggcaaccgggttcatcgttgccagcgctgcttgctgccgctaaaactctgcctgtgtgatacgttaacgcctgctcaggcgaaaagccgtttttgtctgatcatgtttgatactgaaccgctgaaacccagcaataccggccgattaatagccgatatcttgccggataccgccgcgtttcagtggtcgcgcaccgagccgccgcaggcattgctggagctggtacagcatccagattaccaaccgatagtggtatttcccgcttcctacgccggcgaagcgcgcgaggtcattttcaccccgcccgccgggaaaccgccactgtttatcatgctcgacggcacctggcctgaagcacgtaaaatgtttcgtaaaagcccttatctggatcatctgccgataatttccgtcgatttatcgcgtctttctgcttatcgtctgcgggaaatccatgccgaagggcaatactgtaccgccgaagtcgcgatagccctgttagatctggcgggagataccgaggccgcagtcggcttaggtgaacatttcacccgttttaaaacgcgctatctggcaggaaaaacgcaacatccaggaaacatcacagcagaaaatagcgaaagcgtttaa

SEQ ID NO: 375288 - DNA, 210 bp, Salmonella enterica
atgatgaaacttattaacagaagcaagcaatcaccagtcgatcgtcgtgcatgtgatgttgcactggcggcgcgccatgagagcttcgacgattacggcaggcaaaagcacgttacccactacatcgtggttgagcagactttagaggtcgctgttctgagcttaacgtctgttttaactgaaacgccgcattctacactacaacgctaa

SEQ ID NO: 375289 - DNA, 330 bp, Salmonella enterica
atgactcaggcggctgtgactaatgcaatacagacgtacccgtctcttggtaaaggtcagaaaatacaggatctaagagcttcgcgtagtgctgaagtcacttataccagttcaaccggtttcccgattgcggtgtatgtccgaatttctggtggttattcaaccgttttatatacgcatgtcaatggaatagagttcggtgatggtggttcaacagcgtctaatacatctatagcaatggcattctttattgttcccaatggtgccacttaccttgtggaagccaccggagcttcccctgcattacagtcctggacggagctgatataa

SEQ ID NO: 375290 - DNA, 126 bp, Salmonella enterica
atgataatgatggagtattataaagacaaaaataacgccgtatatacttatgatgcttatattacgcaagacttatatatcaaagaagggcttgtattaataatcagaagtcatggaaattattaa

SEQ ID NO: 375291 - DNA, 420 bp, Salmonella enterica
atgcgaggcgggacaatcaaggggaaacccgccagcgggcgcgcagtgttgtcacaggaaatggacggcaacaaatcgcacagtcacagcgctagcgcgcaggacgccaatctgggaacaaaaggcacgtcatcatttgattacggcacgaaatcgaccaatacaacgggcaactatactcaccagttcggcgattatatcaactcatactggggagattcaaatcacacctcatttcaacctggaaatggtacctggacacaggccgctggcgaccacgcccatacagtttatattagagcacatgaccacaccgtatatatcgctccagacggacacgtcgttattgtggacgcagacggtaatgcggaaaccacggttaaaaacattgcatttaactatattgtgaggttagcgtaa

SEQ ID NO: 375292 - DNA, 1311 bp, Salmonella enterica
atgtttgaatctaaaataaatccattgtggcagagacttatcctggccgtacaggaagaagtaaaaccagcgctgggatgtactgagcctatttcactggcgctggcggcagcggcggcagcggctgaacttgacggtacagttgaacgcattgacgcgtgggtttcgcccaacctgatgaaaaatggtatgggcgttaccgttccgggaacgggaatggtagggctaccgatcgccgcggcgcttggcgcgttgggcggcgatgctaaagccggactggaggtgttaaaagacgcttccgctaaggcggttgccgatgcgaaagcgctactggctgccggacatgtcgcagtgatgttgcaggagccatgtaacgatatcctgttttcacgggcgaaagtgtatagcggcgatagctgggcatgtgtcacgatcgtcggcgatcatacaaacattgtgcggatagaaaccgacaagggcgtggtatttacccaggccgataatgcgcaggaagaagaaaaggcttcgccgctggtggtactgtctcacacctcgctggaagagatcctagcatttgtgaatgcggtgccctttgacgccatccgctttattctggatgcggccaggctaaacggcgcgctgtcgcaggagggactgcgtggttcctggggactgcatatcggttcgacgctggcaaaacagtgcgatcgcggtctgctggcgaaagatctctccacatcgattttgattcgtaccagcgcagcgtcagatgcccgaatgggtggcgcaacattgcccgcgatgagcaactccggttccggcaatcaggggattaccgccactgtgccggtgatggtggtcgctgaacatgtcggcgcagatgatgagcgtctggcgcgcgcgctaatgttatcgcatttgagcgctatctatattcaccatcagcttccgcgtttgtcggcgctatgcgcggcaaccacggcggcgatgggcgcggcggcaggaatggcgtggctgatagatggtcgttatgccactatcgcaatggctatcagtagtatgattggcgatgtcagcgggatgatttgcgatggcgcttcgaatagctgcgcgatgaaagtctccaccagcgcgtcggcggcgtggaaagccgtgctgatggcgttggacgatacggcggtgaccggaaacgaagggattgtggcgcacaatgtcgaagaatctatttcgaacttgtgttcgctggcgtgtcgttcaatgcagcagacagataagcagatcatcgagattatggccagtaaagcgcattaa

SEQ ID NO: 375293 - DNA, 165 bp, Salmonella enterica
atgagcaaaaaatcggcgaagaaacgtcagtccgtggtaaaaccagccgtacagaaggcaatgagagccactgtgcatctgggctatgaagagatgctaaccgaactggaagctatcgtggcagatgccgaagtccggctggcagaagaaaaggccgccgcctga

SEQ ID NO: 375294 - DNA, 849 bp, Salmonella enterica
atgccgctggcggagctgctgcgcacggaactgttaagccgcccggtgcttcatgcggatgaaacgccgctgcaaatcctgaacacgaaaaaggacgggaaggcgcagaacggttacctgtgggcgtatgtcagcggagaaaccacgggcgacagcgtggtctgcttcgactgtcagcccggacgggcggcgcgttatcccgaagcgtggctggcgggctggagcggaaccctggtcacggacggttatgctgtgtatcactcgctgaaaaacggcggcagtatcattaatgcaggctgttgggcacatgcgcggcgtggcttcgcggcgttatataaggcgaaccgcgatccgcatgccggaacggcgctgaagatgatccacgggctgtacagtcttgagaaaaagatccgccacaggtcgccggagaagatccgacaatggcgacagcggtatgcgaaaccgcaactggatgcgctatgggcgtggctgacgtcgcaggcgcagaaatgcgcgccgggttcagcgctgcataaggcgataaaatatgtgctgtctcacaaaatggaactgagccggttcgtggatgatggcgcattaccgctggataataaccggtgtgagcgcgcgatccgccaggtggtaatgggccggaatacgtggctgttcgccggatcgttgcaggcagggcatcgagcggcagcggtgatgggcctgctggagacggcgcggctgaacggcgtggagccgtatggctggctgaaattggttctggagcggctaccttcattaccggaagagcggctgcacgagctgttacccttcgcgaaaaatcctctgaataactga

SEQ ID NO: 375295 - DNA, 156 bp, Salmonella enterica
atggacgacaaactgtttagtgaattacttgatggtgtgaatgaaatggtcgccatcgaaaaaggcgaaattcagccgtctcctgaccgcgtttacagccatgacattcctgatgtaaaggagaggagcattaaggttagaagcggatccgattag

SEQ ID NO: 375296 - DNA, 219 bp, Salmonella enterica
atggtcgcaggtgaaaatgcgaccattaaagaattacttagcgattttgtaggtcgaaccgatggcctcaatgattggatcttttggccgtttagttttcctggcggaagccaatacaatagcaaagacatcctctttagaagctgtaatacattttccacgaggcgttatacgagccagctcttcctgagtgtactttttacgatttttacaagctaa

SEQ ID NO: 375297 - DNA, 681 bp, Salmonella enterica
atgccagatgctgagaatatccaaaatgcggggatccaggcactcattacaaccaatgatttgcttattcaggctaataaagaatttcgggtagcgcgccttacaaatgatgacatggactggtgtattgccagttccagagcacttcctgaagagcatcgacttccctgggatcagaatggtggagcgatcaatgctccagatgcttttaacttcagtttcaagctgctggacatagaaaaccgaccagccggagcgtgtctttgtacctattgtcctggagtagaacaaagagaaaatgaggaaccgtctgagaccgggccaattttaaatgttgaaatgcttcaaaattttcacatacgcgattcagagcttgatggtaatacactaaagttttcgctgtatgctatcttgttctttatcattgaaacccggtgtactggcatccgtttgatcgaaccaataaatgacagggttgcaaactattacattggtcagggttttgaagatttaacagaaggtagaaaagagatcctatggcgatcatcagaagatctcttacattggttccaggaggggtttgctgcttctgaatcccacagcgccattgatagtgaacaaattttaggcgataatgaacctagtatgaatgaacttgatgggggtgaaaatggctactaa

SEQ ID NO: 375298 - DNA, 1134 bp, Salmonella enterica
atgacaccgtatattcaggcgttgatcaatatgaccggcgacaaactccagcaacggatgcaaaaggatccgacagccgcttctgatagcctgctgtttatgggcaatcagcatgacacggtaccgcgtcggctgttgcaggatccgctgttatcacccagagacaaattcgcctggcaggtgatccgaatgcaggcgcaggacaacggtggcgcggtattcccctcctacagcgaattgcaggtacagctctcgaaccgcccacaggatgaaaaagcctcacgcagtaccgtcagccgggcattgttgatgctgcgcctgacgcgctggctcagcctgtgccataaggcgcgggatcgggtatccggacgcatcctcgggaatatctatgccctgcacgatgaaccgctgagcgtactggatgctgtacgctttgatgcgagctatcttcatctgctggagcagtgctcgcgacatgaaaacaaggccatccgcgccactgcgcaaggcattctgtacgacattcgccaggacaccagcctgcgttatttatcatcgcgtatagaactgctggaagaacgcgcccgctggcagcagcgccagtctcctgaggagactaagccagaaacgtccggtctcaatacggtaccaggcaaaatttcacttggtaccgtatcgggactaagccggaaaccggggcctgacggcgtagtctcaaatcaggaccgggctcctgtacgtactgtacctacagatctttgtaatagtactaccgcgcgcgcgaacagctcgccgccgaactggccacctgaaattccgttaacccattccgaaaaacagcttgtcttgcaggctatgcagaacctgccgcccccgctgtgtcaggaagtgcttgatgatgcagctcaacgcgttgcccgtggcggcatacaaaacccgctcgcctatctgctggcaacactgcgcaaggcgcaggacggtgagtttaatcagtatcggcgcggcaaagcggcagtgccggaatttgtgccgcctgtggtttcagagtcggaaataccggcaaggccgcgtcaaaagcgggatatcagtaagttggttgcggagattcgggcgcagtgtctggggagtggttaa

SEQ ID NO: 375299 - DNA, 540 bp, Salmonella enterica
atgttgccgacgattaatcaggccgttttgtcacaggtgatacaagccctgaaggacggcaatgtgcgctattgcgaagcgctgggctttgaccgcgaggagctgaacgaactgaatgacctgacctttgaggagttaatgcacctgggcaacacctcggcgcagttcctgaaaatcaccatcaaccacgatgtactgcgcaagatgctggttcaggtgcgtcaggagcagaaatttcaacaactggtcggccaggcggtgcagcttggtggctcaatagcgttaatcagccactacttcggtatctcgaccgctgaaatcagcgcccgccgtcggctgatggggatccacgttcgtcaggggcgcaaccaggtacccggcgaagaggaagaggccgccatctggaaccgctggcaggagataaaagtcgataacatcgactccatccctgcactggaagccatgatgctgctggcgcaggaacgttcgctctcactgaccgtggtctggaatctgatccggcagtgggaaaaaagctga

SEQ ID NO: 375300 - DNA, 1485 bp, Salmonella enterica
atgaacaacaaactgacttcgacggaactccagtcccgcctgctacagggcaattttgatcggggaagatcgcctgatgaacgatttgccgatccgctgatggaaacctcgatgatcgtcacgctggagcagctccacccttatgatctcaacccacggttgatgcgcaacccaaactatgacgacatcaaggaatcgatccgtcgtcgcgggctggacacgccgccaccgatcacccgtcgtcccgatcaggactggttcatcatcgccaacggcggcaatacccgcctgtcgatcctcaacgagctgtggcgcgaaacgcatgacgaacggttctggcgtattcagtgtctgtacaagccgtggggcggcacacccgatcaacccatgctgggcgaactgcgctgcctgatcggccatctggcggaaaacgatatgcacggcaaactcagcttcatcgagcgggcgctggggatcaacaaggcgcgggaactgtaccagcaggtggaaaagtgccagctttcgcaacgagagctggcggagcatctgaagaacgacggctaccccattaatcagtcgcatatcagccggatggaacaagcgctggaatacctgctgccctgcatccccgaagtactgtacgccgggatgggccgctcgcaggtggaaaagctgctgtcattacgggcggcatcattacatctctggcagcgtcacgccgccgaagacgtcggttcctttgacaatctcttttcctctgcgctgtcgctgttcaacgaccagcctgaagactttgctattgagcgggtccaggatgagctgctggggctgatgagtcaggaactgaacgttgattacaacctgctgttgctggacgttgatccttccgagcaaaaacgccaggccgtgctcggccccacgccggaaccaccaccgtacataccgccggaagaacccgaaccacgcccggtaacacgcaggcgtaaacctgaaacagaggaagaggacattggcgcaccagcccctctgcctgagccagaagaagcaacatcgctattgtgtgaagggaccgaacccgttacggatatctggcgcatcccacaactgtgggataccactgagtccttacgatcggccagcgatcgcttggcgtgggatttggcggagcattacgccatcgacgaccgggtgatttcggatgctaacgaaaatggcattggtttccgggtgatgccattcgcatcagatcatcccatgttcacccggccacagtcccgcgcctgctgggcgctgctggcggcactcaacgagatcccgctgacgaaagatctggcctcttcactgacgctcacactcttttttcaacgcgatgcggacggcttcttcttcagcgatctgtttcttattaaagcattccggctgatccgtattgtccgccggatcagagaattacagcaggaggcacaacatgttgccgacgattaa

SEQ ID NO: 375301 - DNA, 375 bp, Salmonella enterica
atgaaacggaaaatctggcgggcattttgctcttattacgcccagcatccctttgagaaagacgatgaagtgatcgtgttctttgaagctgccgatcgtgaagaagcgcgggaaacgttaccggtattaatgtcgctgctctggcatatcccgccggaaaaggtggactgctacaacctggaggatgagaacgagctgcgtgataactccggttcactgacctcccccagagactggccgctgtttgaaatcggctggtccaacaataagccgctctactccagcgatttaccgctattactactgcctccgcatcaacaggcccggctgtgggaagcctttctggcctgtcaggagggtaatcgggatgagtaa

SEQ ID NO: 375302 - DNA, 885 bp, Salmonella enterica
atgaaaaacgcagatgcacctgatttaccaacactaatagccgccattctctccaccaaaggcggcgtggcgaaaaccaccgatacggcgaaccttggcggctatctggccgatcaggggctgaaagtcctgatgattgacgccgatatccgacagccgacgctcagcagctattaccctcttgataacgaagcacccggcggtatctacgagcttatcgcgcaaaacgagctggatccagccatcatcatctcgcacacttccattcccgggctggatatcatcatctctaacgatccgcgcggcgaattgatgagcctgcttcaggccgcgccggacggcgtgatccgactgcgtcatctcgtgcgccagataaccggctatgacgtcattcttatcgataccattggcgcacgtaccatcgcgctggaaatggtgctgttagccagcgaccttattatctccccggtactgccggaaatgctctccgcacgcgagttcctgcgcggcacgctgcaaatgtaccgggatctccagcctttcacccgctacggtatcccgctgccgccgttgaaagcggtgatcaacaagctcgaccacactaacgatgcccgcgaaattcatcacaacctgctccaggttctccagcacaagcagaaagagcaggaactgctggtgcctaccgaaatcctgatgacgccggtttacgccagcgtggcctatcgccgagcggcatcgctgggactaccggtacatcgtctcgatacttcccgcgccagagggcgggcaacaccttgtgccgccgaaaccatgcagatgctggcgaaagaactgttcccgcagtttctcgccctgccccatcagcagatggagggtatcgcatga

SEQ ID NO: 375303 - DNA, 1269 bp, Salmonella enterica
atggtcctaacggatactaaagttcgttctgcgaaacctgaggagaaagagtattcacttgttgacggcgacggcatgttcttacttgtaaaacctaacggttccagggattggcgatttcgtttccgttttggcggtaaacagcatttgatggcgttcggcgtttatccggatgtttcgctggcggatgccaggaagaaaagggaagaggccagaaggttggtagctgctggtatcgatcctcgtgagcataaacgtgctgtgaaagaagagcaggcgaaagagattattactttcgagaaggttgccagagagtggctcgtgaccaaccaaaaatggtcggaagagcatgctaatcgcgtaaaaaagagcctggaggataatatcttcccggcaattggtacttgcaatattgctgaactgggtacccgcgatctgttaattcccatcaaagccgtagagacatctggacgtcttgaggtggcttcccgtcttcaacagcgcaccacggccatcatgcgttatgcagtgcaaagcggggtaattgattacaacccggcgcaggagatggcgggggcggtagcttccagtaatcggcagcatcgtccggcgctggagttaaagcgcatccctgagttacttgagaaaatagacggctatatcggcaggccgctgacccgctgggcaacggaactcactctgcttatctttattcgctccagtgagctgcgttttgctcgctggtcagagatcgattttgaaacgtcaatgtggaccatcccgcctgagcgagagcctattcccggcgtgaaacattctcagcgagcatcaaagatgcgtacacctcatctggtgccgctttcaaagcaagcgctggcgatcctgaagcagataaaacagttctgcggcgaacatgaactcatttttattggcgatcacgatccgcgtaagcccatgagtgaaaacaccgtgaacagtgcgctaagggtgatgggatatgatactaaggttgaggtttgcggccacggtttccgcacaatggcctgtagttcgttaattgagtcaggactatggtcgaaggatgcggtggaaaggcagatgagccatatggaacgcaattcggtgagggcggcgtatatccataaagcggaacatctggatgagcgcaagttgatgttgcagtggtgggctgattttttggatgcgaatcgggataaagggattacgccgtttgactatgcgaagatcaaccgggggaatggcgtatga

SEQ ID NO: 375304 - DNA, 444 bp, Salmonella enterica
atggtgccagactcccccccagcgtactgtaatgccattcaagagggaaaatttaaaacaggcatgtcagaccgtttcgctgtcgccaatgaatgtgtaattacatcattgttaatgtaccgccaagttttattgaaaaaacaagctcgtttatccttaagtaaaaacgcccctcattatagatggatgtggtttattgctatgtctatttttattggtggaaaaattgctaatgtaatgacaaaaataggcaatgtagacaatcgtgtcacatctgaaaagcatagaattaaatttattattttgacagcatttagatttataaagcgtatcttaataaaatgcgtaacactctctcaaaaaacatttttttcaacagtcaccattattaaaaaattgagagcagaacgaaaaaaacctaaccaaaacagtaaaaatatttaa

SEQ ID NO: 375305 - DNA, 267 bp, Salmonella enterica
atgaaaaaaagaaatttcagcgcagagtttaaacgcgaatccgctcaactggttgttgaccagaactacacggtggcagatgccgccaaagctatggatgccggcctttccacaatgacaagatgggtcaaacaactgcgtgatgcgcgtcagggcaaaacaccaaaagcctctccgatgacactagaacaaatcgaaattcgtgagctgaggaaaaagctacaacgcattgaaatagataacgaaatactaaaaaactgtccatga

SEQ ID NO: 375306 - DNA, 573 bp, Salmonella enterica
atgtcccagcccttcgatttcgacaaagcgcttaaggcactccagtctggccaggcattaaccggtaaagatgggatcttaactccattaatcaaacagttaacagaagctgcattggctgctgaactggactcacatctcgcttcggatgttgaagccaaccgtaaaaacggctccggcaaaaaaaccattaaggccgccacaggttccttcgaactcgccactccccgtgatcgcaacggcacttttgagccacaactggtgaaaaaacaccagaccactctctctgatgagatagaacacaaaattattcgcctgttcgcgctggggatgagctgtcaggatatcagccgggagattgaggacttgtatgccctcagcgtctcgacggcgactatcagcgccgtgacagacaaagttatcccggaactgaaacagtggcagcagcgcccgctggagaaggtgtatccctttgtctggctggatgctatccattataaagtccgggaggatggcgctataagatgtgggtctttctaccatgacgcgatgggtaaagccgttgcgggatga

SEQ ID NO: 375307 - DNA, 315 bp, Salmonella enterica
gtgctgtgccgttgcccagatcactatgtgtacggttcagccacgcagtctaccagcacaggcaccggctctctgacctcccgcaataccagtcagtcgcctgtcccggcgcagcaggcacaggattccggcgcccggaactgtattcgctttcagtgcgccggtgacgatggccagctaatggctggttgccgctacactctgatgttcccggacggacgttctgaagctggtgttaccgatgaacacggggttaccggatggcattatgctgaatcggcaaaagatatcagcctgcatattcttacggactaa

SEQ ID NO: 375308 - DNA, 990 bp, Salmonella enterica
gtgaagcaacagccgtttctgggaagttatgaaacacaaagtcacatgaccggaaatataaatgagccactatcgactatttatattatggaaatgaaactttaccgaaaaaccatgttgcatacgcattgtgttacgcccgttccgttcactaaaatgtatacactggaagaatttgcgtcaggcaaagcctggtctccggtgaagcgggagaacccctgttactttgagtcaaaagggacaatgaaacctgagagtcaggggggagaaacaaagcatattaaaattactgttccggagcgtccatttattgcaaaggaataccccattggtaatcccagagacccttttgataaaaatttaatagaacgtcaaatagatgaaagatttaacggatttgatttccctaatcaaattgcagcaagtgtatgtggacctgctgcatttttttactgcctgcaaaaggatcgccctgatgcatatgcgcaagctgcccgtgaactttggaggtacgggaaaactaaaataggtgacttaatcatctctccaggtgaaggctgccgacatccgacaggtatattttactatgatgacggcaagccgaagatagccggtactgactggatgactctggccgggctaagggattcagagaatactgtgctgagctttgatgctctcgattctcccgttgcggggatcacaatgtggcaaacactgacggaatggtttgagaaagccggttatgaaaggatctttagtaatgtagggatcactcaggcaggtatccagggcatcagggatttaaataaatataaagagcaaggttataaagtcgtcacattaataaacgatgggcttcttgtaaatagtacaaacaaaacaacgttacctacacactgggttgtctgggatggtttggtcacacaagactccaacggatatattagtttggaattgtattcccggggaaaacaagaaactggataa

SEQ ID NO: 375309 - DNA, 387 bp, Salmonella enterica
atgttttttgttttatctttgtttttactatctgcttgttcgttacaggcggaatttactccggaaggagaaaatcttaatgatgcaactgttggagtgccctattataaccaaataaatatatttggcggaatagttctttcttatgatatttatggtaaacaagtcattgcaggagatattcatccggataatttaggtctccatctacagtattgtggtgatgatgagttcaataattgtattcagattagagggataccaacaaaagcaggtatagctaaagtacgaatacatggcggcttaggtggcggaatgctttcaaaatcaggagaattcgacaaaacctatactgtcacgatcaaagattcagaaggatcttcttaa

SEQ ID NO: 375310 - DNA, 288 bp, Salmonella enterica
atgcgcctggcaacgcgccggtggctgtcagcgctcatgacctcgctgctgctggcgggggcgtgcgggggcgtgctgtggctcctgagctggaaaatagcggcgaacctggacgaaatcgcggcgcagaacgccacgctggagaagctgaacgcgaagacgtggggcgtgacgtatctggaggacagcaacggacgttttctggtgctgccgaagggtatgaaagccgaagcgggctggacggtggcgaacgggaagcggaacgcggtgaagctggtgaaggagtaa

SEQ ID NO: 375311 - DNA, 213 bp, Salmonella enterica
atgacagagctggaaacgcagttgctgagcgcattagagcagctacagcaggactactcgcaaaggctggacgagtgggagagcgccttcggggaattgcggacgatgtgtggtcttatgcaagaggacaacgagcggctgagcgggcaggtcacgcgcttaagtcagcaggtggagcgcttgagcgtgcaactgagtcgtttgagccggtag

SEQ ID NO: 375312 - DNA, 558 bp, Salmonella enterica
atggaaattattggcaacaatacctgtgtcaccagtctcagacctaaatataaagccgttcagtgtcgcggagaacagcataaatactggcttgaactccagttcgttgatgagaacaataccccggtttccgggctgaacgtgaggctggagtaccatccgctggcgtcagcaaaggatgtggagatgtggcggaaatccggctacgactacaatccgacgccgccgcccaatcctccggcgggcgttaccgacagtcagggcgtggtgcgcttcgacgacctgtactggatagcggttgacgtgaacacagacgggcaaccactggccgacgagatggaaaaacgcccgctgggcctgcggcgtaacccgaacagccagccggtgagcaacaacatgttccggccggaaacccgcgatcccaaatggcgctcagacgtgcaggaaaaagccgaggttgccgggtacatccatcactatgcgaccagctgccggagatcgagggctgggctgagccggagccgcccaagtttcatttcccaccgggacggtccctga

SEQ ID NO: 375313 - DNA, 1392 bp, Salmonella enterica
gtgctggcgctgcacgacacgaaagaatatgacctggcgaatgcgctgaacctgggcattatggccgatctggtgtatgccgccgaggtgaagaatccgaccatcgattactttttccgtcagaagtgtcaggatctgtcctgcctcccgcagcttgtggaatacccgaattattttcacatgctggcggtggacgtgccgttccgggagcggtatcagcctccgctctatatgaataccggggagggggcgctgggagaaggtgatacccgcctgtttacggtggagtgtacctcgcacgttctggtttcctggtgcggtaccgacagtctgctgaatgtccagaccgacgtgtcattcgggccgaaacggtgccctgcagagctgggcgggatgggagacgtgcacggcggttttctggaagcttatcagctgcctaaacgaaaattcggggataagttggatgcggaaacactgtttgtctgcggccacagccttggcggagcgctggcgctgctgtatgccgccgagatgaaagcatttaacccagtgctgtacacctacgggatgccgcgaacgttcagtcgtctggccgcgtacctgctgaggggcatcatccactaccgtcacgccaatgataatgacacggtgacacagataccgccggaggtggatctggacagcgagctttacgagaagctggggtggctgggtgacaaactgggctttgactgggtgaccacgtcggcaatcggtcttttaccgcgaaccttcggaggaaatgcgggtgtggatatggggattacacaggaaagagatccctactggcatcatggtaaaacggttttatttttgcgtgcggaacagagcgtcatgaggtccggtgagcgaaacgcgctgtggatagggggcggaacggtaagctatacggagaaggcggcggtcaagctgtatcttgttcctgccctgaatgaagaatgcctgacatccaccagagagcatcaggcggcattcatacaatgtctggcgccgggcgagctggagaagcggttccctaagggggaaaatacggcatcatccggctggttcagtaagccatcaaaccactcgatggcgcaccgctacctgccctatattcataatcaggtgctggagcttgccgatccggcgcgggatatggaccggaaagccatgcgggccatgttccgggagggcgttgaacaaaaggcaaacttcagtaacccggatgaggttgaacgtaaccgtgagtttctggcccttcaggacatgctgccggtcgccctgaggctgacacaggcagaggaaaccgggaaaaatgccctgctgcgctttgcggcggtaacggaggaagaagttgaactttctcagtaa

SEQ ID NO: 375314 - DNA, 768 bp, Salmonella enterica
ttgaactttctcagtaaaaccgtcgttgtcgtgttggctgcaacactgctttccgggtgtgataaccggcctgacaagacgctgtcccctccggtgggtgcaaagtgggtggacgtcactttccgggtgccggagggcattacactgcagccagccgagctgctgtaccgttcggcgcagtgcaaatccgtgcgctataactcaagcaatgaaccgcatgatataccgggctacaacgacgttgagcggccattcggtgcgcctgatggtgacaatatccgccgtctgcgggttgccgtggacggtggcggttcgtgccagtggcaactgaactcgctgaaggtgagcttcagaattgcggactatgttcccctggtgaagggaaaagaggttatcgataccagttatattttcgatttcggggactacggacttagtgacggctacgggaccgggcgggcgaaggtgttcagcgagaaaatattggatctgaatacagatttcttccctatggttgctaatcacatcgataatgcggttagcttgaagttatttgggggggagactggaacagaaaagtggcgcaggcgttttagtctaagtaatacacaacatatagctattgaacctgttgttcatcttatgaaagttgttgtattaaacccaccagatcatccaggaaatctgacagcaacttatccggatggcagtcgtgaagatataccgaatatttccccggattatgacaagttgctgtcaatgaaatag

SEQ ID NO: 375315 - DNA, 483 bp, Salmonella enterica
atggctattccgggtaatatgtggctctatgacgatggtggagcactaatcaaaggcggttgtgatgttgcagacagagagttcagtatagagtttaaaggatttcaccataatctctccattcccactgataatgccactggcaagcctaccggcactcgtcagcactcaccaatgatcatcgttaaagaattcgactattccagcccatacctctacaaagcagtagctactggtcagaacctgaaatctgctgaaatcaaatggtataaaatcagcgatgctggtcaagaagtggaatacttcaatatgctacttgaaggagttcgaatcgtatcaatatctcctactatggcctccccagaagacaagaacaacaatcaccttgaatctgttgagctaaggtatgagaagatcacctggaagcattgtgacggaaatataattttcaccgatgcctggaatgagcgacaaacagcataa

SEQ ID NO: 375316 - DNA, 231 bp, Salmonella enterica
gtgttcaaatcactaaacgattccattttattttcttttgctcctatagcaatgtttaaaccagttaaaattttactatttaaagcggaaaacattaatgaaacgatttctaattcagataaaattctaatgtgcctatatcttctgattgctgtatgttctatcattaaagccctcatttcattaaatgaattatatgataatcttaaaaagccggaaaaaaatagttaa

SEQ ID NO: 375317 - DNA, 288 bp, Salmonella enterica
atgaaaaatgataacctgttatcttctgatatctctatcaaaataaaaggaaaggaatatagtgaagttttattgttagcgttaatagcattatattctattggctgtgcttatggagttgcctttctgggacaagataaatttccaatcctctataacgtactgttgggtagtggatgtttaatcctgctttgttggcctttgattattgcattgcttatggttatacgattaagattaaaaaatagattaactatttttttccggctttttaagattatcatataa

SEQ ID NO: 375318 - DNA, 135 bp, Salmonella enterica
atgatatggttagtaaataaagcaaaagataaatatttcaaatggtggaacaaaaaagatctaccggagcaagtcgttttgattgcccttgctccgattatctatggtatttggttagtggttacaacctggtaa

SEQ ID NO: 375319 - DNA, 189 bp, Salmonella enterica
atgaatttttacattgatgaatctggaaatttctccctaaaaaactcaacatggaattcagtgggtatacttgctatacctcatcaaaaagaagaagaaattgcctcatttgttaaaacccttaaaaataaaattggcattaaaaaagatgatgaattaaaagattatttcagaagagattttgattaa

SEQ ID NO: 375320 - DNA, 159 bp, Salmonella enterica
atgtggataaagcactggcaaaaattttggttgctaagagaatttattctttcgataacatcgctctttcttatatcatcccctgccgatttgattattgagtttgctaaattagactttattttgtttagtatttcttcagatatgtttctgctatga

SEQ ID NO: 375321 - DNA, 597 bp, Salmonella enterica
atgccatcagcactaagtgaatttaatttctcctttgatcaaaaagaagaaattaaaaaggtgttatatgatgagatttttagtgatttatatataaacttgctaagattggacaatctacttcgcccttaccttgttttaaatcatgatctatcttatttcgacaagttcactgcggaattgactaataatcaaataaaaagatcattaagagataatcagactgaattcaatgtaagatcgcccataacaaaagacggatatgcacgaccattctacatctgttctgtcttcgaaaattacgcaacgtgtaattcgaacaattcattaggactacaaatagttgatgttttaatatcaaatttcaatagagcattaaaaggaaatttcgataatcctatacagattgcaaaagccataggtaagctaacaattaattcttatattaaaggtgtatatcctatagaattaatttacttaagtgaaaagttaacactgagtaaagacgaactgagtttaattagtatggtagaagatatgtcatataaactttttggcttcaagaaagatcccgacaacatatacaagggcatctga

SEQ ID NO: 375322 - DNA, 366 bp, Salmonella enterica
atggataatacattcaattatataaacaaaagcaaattatcagagaatttgctcagaacacattgtgttagcgtcaggctaaataatgaagaattgcatcttctcaacaccaagcgtggcgaaacaagcaagggggaatggcttcgattagcttcacttgacaagtttccaccagtagttccccctataaatttagaagcatggaaatcattgtctgaaatctctcagaagctgaacacccttataggtcatcttgaaaacaaaagcagtggtggtgagcttacaaaaacagagatctttgcggttaagcgccaaatttctgagcttcgcttctgtcttacatcctccaagagatctatgagttag

SEQ ID NO: 375323 - DNA, 267 bp, Salmonella enterica
atgaaaaagacccgttataccgaagaacagattgcgtttgcactgaaacaggctgaaaccggcacccgcgtcggggaagtctgcagaaagatgggaatttctgaggccacattttacaactggaagaaaaaatttgccgggctgggcgtgacggaactgcggcgtctgcggcaactggaggatgagaatcagcggctgaagaagctggtcgctgagctgagtctggacaaggagatgctgcaggaggtactgaagcaaaagttctga

SEQ ID NO: 375324 - DNA, 273 bp, Salmonella enterica
atgatcgagttaagcgcagaacaacgccagctggcaaagatagttcatgactacgccagccagtttcctctgacagaggatggtgatactcagctattgcagggctgctatgactatatggaagcctttaaaggggtgatggacagtgcatccaaagtccagatggactacatctgcctgcaatatcctggatattttcgctttgcaaagtggatggaacgactggctcagggtattgctgatggagttatcaaggttccgaaagatcactaa

SEQ ID NO: 375325 - DNA, 1215 bp, Salmonella enterica
atggaattgcaggattttgagctgagttacatcgagaaatggctgccggaagcctccgtgaagtataaagacggtagcccggcagtcaatctcggtctgattatcaccgtcttttttaaggacgggcatacgccagaagtccgccgcaggatggtggagtgcgtggatcgcttttacgcagaatttaagccgcatctgaaaaaaacgatcaccaaaaactgggtcggtattactgagaagaattacgccaaaaagcgacaggagatcctcgattcaacgcccgaagagattttttcctggtatctgggtagcgcagagcaggattttctggctcctgattacagtattttaattatgggcaagcgaatttttcataatgacaatgatcgctcagtcattaagctaacactcccgttgtcactgctgaaagagcctgatggcaaaaagcgttatgagggctggctgatgtggctgtgtgacaccttttcggtggaaagcggttatgccggactgtcgtttgcacttccttatgcccgtgagcgaatgttcccctatgaattcgccctggcgcagcgtttttccggcgtgatggtggattcgctgggaacgctggaaggcggcgaagccgtagaggggctgaaaggtgcctgctggtacaccattctgggcacgccgtggctggaaaagctgggtggtgcagagagactaagacatcgtttagctaaaacgcctgaaatcagcctgctttcttataacaacggcatactccttaaagcgggtgagcttcctcctccattgggtgaaatgaaaatcgagggattatcgccattgctgatcaaggtaaaccagattattcgccctgttcggtatgacgggcataatggtctgcatttccactctgagtatgaaaactttcagtttgaaaaagaatcgtctatggcatggtttgcgcgctttgacgaagccagcgccctgctggataaagaagaaatggggaaatcgtacgaccccgtacgtattaaatgctggaccgatgaaacagcgccccacgccggacaatgggccgcgatggttaacggcaccaccgagtacatccagacccgcgaagggcagaaattgccaccgtttgaggataagtacggtaagcaacacagggcctgctggaagctgctgaaacgagatgacaatggtagcgtttatacacttcctgagtaa

SEQ ID NO: 375326 - DNA, 1290 bp, Salmonella enterica
atggaaatgcccgatttacccgatacaccgacaggtgcgcctaatgcgcccaccggcacaaacaaccagccgtgggactgcaccacgacgggcgtcgaaatggtcgagaaacagtcacgtctgccgaacacagaaaaccgtcagtacctgcatatcaaggtggaatacgccatgcgttttccccaactgtcggcacaaattcgccgggaagggaaaacctaccggatgagccttaagcagacgatgatgagtggtcttattcgcgtggatgaaatcgcacgtaattactgctggtattacaaggcggaggtggcgtttgatatgcgaaccacgccgccccgcccttttctgagcagtacgctgctgaaaaaagacggtgctggccgtcgccacacgaccaatccttttccggtgccaggcaagggcatttaccgccgccctgacgtgattattgttaagaataaggaagaccgctggcctggactggcggggccggataccgaaggcaatatgcacagcgataacctggcccgcctggtggaggtgaagtttccaggggatacgctgtatgaagaccaatacgacgaatatatgaagattgtcggtaaagatcgtaaccgcatgaccattctggagatccacgactgtcgcccggaagagcaccagtggattgaccaggcggtcaacgtgacgatgaaagcctggcagaccagcggagccaaatactggccgctcgttctctacccgccgatttttatgccccgtccgccatccacccccgctgccgccagaatagagccctggacttacgccgggcacgttgtagccgacctcagtgagggcgcggtgcgtggcgtagccgaaggctggaacgccctgtcaaaagagacgcagcaggtcctgaattcagcggccagctggcttaacgacagcggagagtgggtttaccggaagggaagtgaggcctgggtctgggccagcaaaaccggtaagtcggtgaaatcctggaccaacgcccagattaaggcggcatggacagaaatacagcacgccaccgatatgacgctcgatatgctcaaacaggtggactgggtacaggtgttaactaatgtcgcgaaaacggtcggcgttattctggttgccgtgggtatcggcgttctggtggtaacgctgggaatcctggaagccattattggcgcatttttactgattgttcgtctggcgataagcgcctggggaacacaggcggctattctcggtacgggtacggcggcactggcagtccaataa

SEQ ID NO: 375327 - DNA, 666 bp, Salmonella enterica
atgcagctcgcggcgaccagcaatgttgccatcaatgccggaggcgatatcagcgtgggcgttatgggcaatatgacggcgctggcgggtgacaaaatcggcatgttctcccgcaccgggcaactgagcctgaaagccagcgaaggcacgattgagatgcaggcccggaacggtaacatgcggctgtttgcggagaagaagctgaccatttcgtcagaaagtgacatctcgtttaccggcaagaaacgcatcacgctgattggcggcggcagctacctgaagctggaggcggggaaagtggaatacggcaccacaactacctatatgcgcaaggtgaagcgaacgatggcggccgctgcgcagaatatgccgatgaaaatgccccgcaccggcactgcctacatctattccgctatctatcagttgcaggacaaaaacggcaacattctggttaatacaccctatcacctcaccaccccatcaggccagacagcaacggggttcagcgataacgaaggtcgctccgtgccggtttatacccgtcagcaggagaatgtggaactgcatgtcctgacgaaaacatcacagccggaagaatcaatgtggtttgtaggtgaaaccgatacgcaacaactggaaaccgaactcagggagagccagccataa

SEQ ID NO: 375328 - DNA, 858 bp, Salmonella enterica
atggtgtttgacccgcagggtgtaaatctgaaggacctgagcgacggcgtgattattaccttcacgtcattcactggcgctcgcgattcacgtctgcatgtctcggtgtgggggatgccgtaccgtgaagaatacggcttccgtccggctgaaatggcccgcccggaaatccatggcacgttgcctgcgcgtgttgaaagccgcgaaaaaaatgacacttacgcgcatattgatgagtacgggcgcttccgggtgcggctggattttaatctggacgactgcgagccaggctacgcttatccctggcttcggatggcaaaaccgtataccggcgatggctacggctggcacacaccgcttatcgacggaacggaagtggcgattgcgtactgcaacggtgacatagacctgccgtatatctcacacgccttccacgactcagaacacctcgatgtggttaaccgcgataaccgcagccagaatatcctgcgcaccgctgcccgtaatgagctgaggatggaggataagcgcggcgaagagcatatcgcgctctcaacagaatttgctaaaagccagctaaaccaggggaatattaccgacgcacaggataaacctcgcggtaccggttttgaactcaggaccgatgagcgcggcgttattcgtgtcgcaaagggactgtttatcagtgccgacgggcaacagaaagccgccggaggcgtgctggatatggacacggcgttgcgggaaatcgacatctgtctgcaacagctccggcagctggaaatggcggctgaacaggcgcaagccctgaaagcagacgtagacagccagatccgcatgttcaatgaacgcctgtaa

SEQ ID NO: 375329 - DNA, 921 bp, Salmonella enterica
atgctgacggatataacagcagtaacggataacgcctataaactcaatattaataacagcccggttattcctgatgtgctgcgttttcggggtactgaggaattaagcaaacctttctcctggcggattgaattcaccacgccgcagtcgaacatccggcctgaagatatgttgatgaagtacgccagcttcattttgcgggacagtaagagggtgcacggcatcattacccgcctggaatggctttccaccagtgcagaccagtctcattatgccgccacactggaatcccgtctcgcccttttgtcccgctcccgccgttgtgctctgtaccagaacctttccgtgccggaagtggtggagcaggtgctgcgttcgcatggtctggaaggtcctgactttgactttcgtctgtcgcgccagtatccggtccgcgagctgattacccagtggcgggaaaccgacctggaattcatccagcgcattctttctgaggtgggtatctggtttcgccaggagatgaatgacgttactgagctggatgtgacgctgtttggcgacagccagcttcactatctttttaatggcgttctgccatatcacgagccatcaggtctgtatgacggtgccgaactctgctgctggggcgtgcgtacctggcacaatacggtaacaggcacaatcagcacccgcgattacaatcctcgcaccgcgtcagagcccatggatagtgctgtttccgtccgctctcccgctgtcactatcggtgagcattaccgctacgctgaaccgtaccgcgaggcaggagacgacaccacctctgagccggaatccgaaagcggagccttctatgcccgactccatcatgaacgtgaactgaataaatctgcccgagtgcatctgttcagcaacgcatactag

SEQ ID NO: 375330 - DNA, 570 bp, Salmonella enterica
atgttagtcggctatgcgcgagtctcaactgatgatcagaatctgaacttgcagcgggatgcacttaagttagccggatgcacaaaaatatttgaagaccagatcagcggagccaaagctgaacgtcctggccttcatgctgttcttcagtttatccgtcccggagataccctggttgtctggcggctggatcgcctgagccgttcgctgaaagatctgattgaaatggtcaggcagctggagtcgaacagtatcggcttaaaaagccttcaggaatccatcgataccacctccagttccgggatgttgatatttcatctgttcggtgcgctggcagaatttgagcgcaatctgacccgagagagaacgcaggtcgggcttcaggctgcgcgggccagaggacgaaaaggaggacggcccaaagtgctgaataaagataaacaggctctggctgttcagttgtacgacgaaaggaaacataccgttgcgcaaatttgtgaattaatgggcgtgtcgaggcccacactctataagtacatcgatgcagccaggagcgtgacaaatgtttga

SEQ ID NO: 375331 - DNA, 360 bp, Salmonella enterica
ttgcccgccgattttttaaatgccgatcaacgggccagctatggtcagttctcaggcgaacctaatgatgtccagctggctcgcttctttctgctggacgaagcggatatggctttcattaacaaccggcgcggcagagccaaccgtcttgcggtggcattgctgactggatgtgttcgctttcttggcacatggcctcatgacctgtcatcgataccggctaacgtgcagtggtttgttgcacgacaactgggaatatctgatacaggcgttctttctgaatattccagaagagaaaccacattgcgtgaacaccaggcactgatacgacggcagtatggctatcgtgattttgcctag

SEQ ID NO: 375332 - DNA, 1344 bp, Salmonella enterica
gtgcctgatggcgtgcgcacttcacgttttgaacagttaagaaaaggtcctgttgccatcagcggcccggcatttaatcaggccgtcgtacgctatctgaaactgaaagcatttggtatgcagagtctcgactttaccggtattcctccggtgcgattcaatgcactcgcacgatatgcggatatgatttcagtgtacaaaatagcccggatgccgcccgcgagacgaacagcgatgctggttacgtttgtccgttcctgcgaaatatcggcactggataacgcgctggacgttctggatggggttattgctgatatcggtagggaggcgaaaaaaattgggcagaaaaaacgcctgaggacactgaaagatctcgataaatcagcgttagaactggcacatatctgctcggtgcttctggatgaaaatatcgacagtgagttgcttcgcacgacaatatttgaaaaatgtcctccggccaggctggccgataccatcacatttataaacgcgattgcccggcctcctgatgccagtgttcatgatgaaatggtggaacagtatgggagagtccgccgctttcttccctgtttgctggaaaatattgaattcagcgccgctccggcaggcgaaaccacgctggaggctatacgctatcttgctgcgatccggtcaacccgaaggcagcacattgatgatgcgccaatggcaataattaccggcccctggaagcggctctgctatggcaaagacggtcatttatcccgacagggctataccctctgtgttatgaataagttacgggacagtctgaggcgacgtgatatttacgtcgcacggagcgaacgttggggagatccatgggctaaacttctccagggtcaggactggcataccagcagagtgcaggtgtatcgctccctcgggcatcctctcaacgccggagaggccgtcaatgcgctgacccggcagctcgacacggtttaccgacaggtcgctaaaaattttgctgataatcaggccgtttcgctggatttcacaggtaaacgcacgaagctgaccattgctcatctgaacggactggatgagccgccgacgctgaagttactctcaaaacatatatctgacttgctgccggttgtcgatctgaccgaactccttcttgaaattaacgcgcatatagggtttgcagatgaatttacccacgcaagcgaagcgggtgcgcgtatggatgacctgaccgtcagtatctgtgcagtattgctggctgaagcctgtaatattggtatggagccctttattcgacccaatattccggcgctgacccgttatcgtctgagctga

SEQ ID NO: 375333 - DNA, 957 bp, Salmonella enterica
gtggcctctgcggacggtatgcgatttatagccccggtacgaacggtccatgcaggccccaaccgaaaatattttggttccagccgtgggatcacctggtacaacttcatttcagatcagtactccggatttcatggcgttgtcgttcccggcacgctaagggattccatatttgtactggaaggcctgctggagcagcaaaccggactcaacccgacagagataatgacagatacggcgggttccagtgacctgatcttcggtcttttctggttgctgggctatcagttctctcctcgtttggctgatgccggagcctctgtgttctggcgagtggataaagatgccgattatggtgtactgaatgatcttgcccgtaacacagccaatacgcggaagatagagcagcactgggatgacatgatgcgtatggccggttccctgacgctgggaaaaatccgggcctcagtggcgatccgttcattgttgagtagcgaccggccttctggtctgacgcaggccattatcgaagcgggaaaaataaacaagacactgtatctgcttaattatattgatgatgaagattatcgccgccgtatcctgacccaactgaaccggggtgaaagtcgacacgccgtcgccagagcgatttgtcatggacaaaagggtgaaataagaaaacgttaccaagatggacaggaagaacagctgggtgcgctaggcctggtgaccaatgctgtcgttctgtggaataccatctacatacaggctgcactggatcatttgcgcaatgaaggtgaaaccatcaatgaagaggatgaagtcaggctttcgccactgaggcacgcacatatcaacatgctggggcattacacattcacgcttgcagagcagataacaaaaggccagttaaggccactgaagcaggcggaagaaacggatgaatggccactatga

SEQ ID NO: 375334 - DNA, 234 bp, Salmonella enterica
gtgggtggggtgattacgcgcgtgcaacgatatagtttccatgcggtgttaattataagtaaaataaaaataggagaaatgtataaaataataagtgttgataacttggcgaaaaaatctgtgagctatttggcaataattgaacatcacgatgcgttgtttttcactgtacgcggcacagcaaaaaaacgcacaaaaagtttaaccctaccgaataagcctctttttagataa

SEQ ID NO: 375335 - DNA, 369 bp, Salmonella enterica
gtgctgaaagactgcgacggccagccgcagattatcttcattgcgaccggttcggaagtggagctggcggttgccgcttacgaaaaactgactgccgaaggggtgaaggcgcgagtggtgtccatgccgtccaccgacgcattcgacaaacaggatgcggcataccgtgaatctgtgctgccgaaagcggtgtctgcacgtgtggcgattgaagcgggcatcgccgactactggttcaaatacgttggcctgaacggcgctatcgtcggcatgaccaccttcggtgaatccgccccggcagagctgctgtttgaagagtttggctttacggtggacaacgtgatcgccaaagcgaaaacgctgctgtaa

SEQ ID NO: 375336 - DNA, 963 bp, Salmonella enterica
atgactgaacaagactcagattatgcactgctaactgaaattgccgtggcctattacgaccaggaacagactcaggaagagatagcgaaacgcttcggtatctcgcgcattaaggtcgggcgattgctgaaaaaggcgcgccaggaaggcattgttgagatcagcgtgaagtaccatccagtctttagttcacaaattgagcaacagtttatttctcattttggcatcaagcgcgcgcttatcgctctggaccatcacgatgaggatgaacagcgtcagcaggttgcggcgctggtcagcaactatctggcaggcatcttaaaaaacgacatgaccgtcaccgttggccagggacgcaacgtcgccgccgtcgccaatcacgtggggatctttccagagcgcaactgccgcttcatttgcggcattggtggaacaaaacgcgataatcaactgatcgatgccgatcatatcagccgtaatctggcgcgcaaattcaacggctttagcgaaactctctacgccccggcctatgtcgaaacgccggagctgcgcacagcatttatgcaaaatcgtttaattaaagccacgcttgagcaagccagcaaagccgacgtggcccttatcggcctgggcgatatgaatgaaaatagctttatggttcagcttggctggttcacaccacaggaaatagcgacggcacgtcaggaacaaggcgttgtaggcgatctcgcaggatatagctttttcaatatccagggcatccccgtcgatacggtaatgaacgatcgggttatcgggctgagtcttgagcagctccggaccattccctgtgttatagccatcgcctcagaaagtacaaaagccactgctatcctgggcgcgcttcgtacaggcgttattgatgtgctggcaaccagcgcgtctaatgcgcgcgccgtgatcaacatgcagaaagcgttatag

SEQ ID NO: 375337 - DNA, 795 bp, Salmonella enterica
atgaagccaatttggttgggaaccagctggaaaatgaataaacctttcacggaagcaatggcctggtgtgaaacactggcccagcgattgccggagactctacatcctgatattcaaccgtttgtcatcccaccttttaccgccattcatccggtcagcaagtatttacagcaacataaaatcccttgtctgaccggcgcgcaaaatatgcatgaagcggaagagggtgcctggaccggcgaaatctctgccgctatgttggcagaaaccggcgcgacgctggttgaactcggccattccgaacggcgcggcgcgttcaacgagagcgatgcagcaatcaaccgaaaagttcacgccgctctgcgccatggcctgcgcccacttgtctgtattggcgacagtgccgaagaaaaacgctggcacgtctcgcgtgaaaccgtggtccgtcagatgaaaatcgccctgtacggcctgaacgagcagcaggcattacaaacgctcgtcgcctacgaacccgtatgggctatcggtgaacacggtacacccgcggccccagagcaagccggagatatacatcaggcgctgcgtcaggcgctgtgtgaaatctttggtgaacagaccggacaacgtattcctctgctttacggcgggagcgtcaatctgcaaaattcggtagagttgctacaacagaacgatgttgatggactctttattggccgcgcagcatgggatgccaatggctattgcaaaatagttcaacgagttaaacaggaatttattcttcaggcgcagtag

SEQ ID NO: 375338 - DNA, 1008 bp, Salmonella enterica
atgtcacaagagaaaaaacctgttgtcgcgcttaccattggtgatcctgccgggattggtccggaaatctccgttgcgacaatgatgaataaaagcgtacacgacgagtgcaaacctttcttaatcggctccgtgcctatcatcgccagagcgatgaaaatcatgggatgtgattttgcgattaatactatttctcatccgcaagacgcgctttttaaatggggaattctggatgtactggaaacagacgactacgattgtgacagtatcgaatggggtaaagtacagaagctcgccgggcaaatgtcgttggactatgtcatgaaatcgatcgagctgggcaaggcaggtctgatcgatgtggtgtccaccgcgcctatccataaagaggccatcaagctggcgggctgtaagttacccggtcataccgaaatttaccaggttgaaacgcagtccgactacggcctgaccatgttccatgtacataaccttcgcgtattcttcgtgagtcgccatatggcgctgaaggatgcctgtgactatgccaataaagaacgtgtgctggcctgtgtacagcagatccaccatgaatttaccgcgctgaatgttgaaaacccgcgtattgccgtcgccgcgctgaatccgcacggttctgataacggtttgtttggccatgaagaagccgacaaccttattccggcggtcaaagcggcgcaggaactgggtattaatgcgattggcccggttcctgcggattccgtattccatctgggaaaattaggccgctatgacgcgattctctctctttatcacgaccaggggcatatcgcctgtaaaactctcgactttgaacgttccgtcactattactttcggcctgccgtttatgcgtagttcagtcgaccacggtacggcgtttgatattgccgggacaggtaaagcaggcaccgtcagtatgctggaatccacgctggctgcggcgcgttactggaaaatgaagcaccaatga

SEQ ID NO: 375339 - DNA, 1755 bp, Salmonella enterica
atgatcgttaaggttaacgcgaagcaaaaggacagtgaaatggaaaaacatctgttaattaataagggcagtaaagggtggggcgggccactgaccattagtattggtcaggagaaaaaaattgcctatattaccggggggatttgccctgcggtcgttgagcgcctgagtgagctgaccggctggccgtccgttgatgtgtttaaaaacggcgagccgcccgaagacgaaattggcctgatggtgattgactgcggcggcaccctgcgttgcggcctctatcccaaacgcggtatcccgaccatcaatttacatcccacagggaagagcgggccgctggcggaatttattcacgaagggatttatgtttctggcgtcacgccggcctgcattgaaatggtctggccgcagggcgaaggcggtaagctgggaatcgtggccgacgatttgactggggcgaccaccgttggtgtgttgctggcgcatagtggcttaaaaacggcggcatttttcgatacgcaatctatggctcgtaacgaggttgagtatccggcgatggtggtcagcagcggcagccgccctttaccaaaagcagaagcgcagcatgaagttagcgcggcggtaaaattgttgcaggcgcgtggggcgcactattttaccaagcgcattgataccacgctgcgcggcggcattggctttgaaatcgatgccatgctggagcaattaccgcaggaaaccgttgctgttgtcgtacctgccatgccgcaatcacgacgtatccttgtgggcggctattcggtgattgattccgtcgcgttgtcgcgtaccgatgttgcccgcgatgtccgcacgccggtaacagaatcctgggttccaggactactggcggcgcagacgcatcatcaaatcggtcatatctccctctcttcagtgatgaaaggcgaggcgcaaattcaacaagatttacaggaacagcagcaacgcggcatacgggttatcgttgttgacgcgatcaccgttgatgatgtcgacgccattgccggagctgtcgtcgcgcttaactggaacgtactggcggtagacccaggcccatttaccgagcggttggcggtacggcgcggtttgatgcgtgaagcccgtaataatgcgtcagcgtcgacagtggccgaaaaccaacgcggctcaattctgattgtggccggtagtgcgacttcggtgacgaaaaagcaactccagcatctgattgccaatgatgagcgcgtttgccatattccggtagatgcggaacttctggttgataagaaaaacgctgcggaaatagagattaaccgtgtagtgcaacatgcgcggcagtgtgtgccggctcagcaaaacgccctgtttgtctttgaatccgccttaaccgggcggctcctggatcttcaggaagaagaaaaacgctttggattagcgcacggccaggcggcagaaaatattaaccagggattgggtagaattgttcgcgaggtacttagctgtgccggtaacgaaattaaaggattatatttgaccggcggcgacacaatggtgaatgtgctgaaagaacttggcgctaccggtacggaaatgattgattatgttattccccaaacggatatggtacgtattattggtggcgagtatacggggctgatttgcgttggaaaaggagggcttaccggtccggaggatattgttagtacgattattgatagaatttataaagaagcacagtaa

SEQ ID NO: 375340 - DNA, 1008 bp, Salmonella enterica
atgaacataaacattcttgaaaaaatgaataaggttcccggtgggttaattattattccactgcttgcggcgatccttattaatacctttgctccacaagttttaagtattggtgggccaacaacggctttattcaaagtcggttccagtgctatgatgggaatattcctgctaatttgtggaacctcaattaatattcgtcaggcgggtctgccgctatataaaggcgcagtactgctgcttttgaaatgcgttgccggtgcgctagccgtatgggccgcaggggcgctgtttggtccagcgggtttcctggggatttctacgctggcgctgatcgcttgcttaaccagttcaaacagttctctgtacatcgcgttgtgcagtacctacggcgactccagcgatgccggggcgatttccgtattctgtattaaagatggtccctttgtcactatgatggtgctgggcgtcagcggcctggctaatattcctttcgcagcgctattgtcaatgttgattccactgctgatcggtatgctgtggggcaacctggatgagcgcttcaagcagctatgtgcggccgcccagccactggtcattatcattatgtcgtttgctatcggcgcgaactccagcattaacacggtctttacagccgggctttccgggatcttactcggcgttatctccgcagtaaccgggattatattttactttatatacaacctgttcctgaaaaagaaaacggcgttaggtgcggcgctcggcaccactgcggcaagttctgcgttaacgccggcaatggtggcccaggctgacccttccctggcgatgtacgttgatgccgccaccgcgcaactggcgacagcaagtatcatcaccatgattaccgcgccaatcctcgtcgcctggtttgataaacggctgaaaaagcgcacgctggctatggcgccagcgcaagaaggggacgttgcattatcttcctccgcagtgaaagggaataaataa

SEQ ID NO: 375341 - DNA, 375 bp, Salmonella enterica
atgtcggctccgttgtattcattactcattactgcggttggtaaatatgttaactcctccctcgaagagcaaaggctgattttattttccgatactatttctgccgacattgcgatgtattgcgctgtacaccaggcaagcgagttaaccgcaagaatattgtcagggcaaacaatgaaattaaatgatgctatttatctggtaacagcagtaggggatgttgcaacggagaacttaaaacagcttggacatattactttaagttttgatggtgcaacagttgcggaattgcccggtacggttcacttgagcggaattcctcctcgcaatattcaaccaggcgaccgaatttctttctacgaagtattgaattaa

SEQ ID NO: 375342 - DNA, 459 bp, Salmonella enterica
atgaaaacaatcgctattggtgcggatgatgctgcctacgatttccgggacgctatcattgcatatttgaatgggctgggaataaacgttgtggactacagcagcgataaatatcagggcagtacggtatatcccgatgttgcccatgcggttgcgatagctattaagcagggagagcacgatcgcggcatcttaatttgcggcaccggaattggtatgagcattgtggccaataaagtacccggtgttcgcgctgcccagtgccacgatacgttttccgctgaacgagcgcgcaagagcaataacgcacaaattatcaccctcggcgcgcgggtcatcggtacggaactggggaaaaagattgttcaggcgtggctggaatctgaatatgaaggcggcggctccgcaccaaaagtagaacgtattgattattacgaacagcaacacgccagagactaa

SEQ ID NO: 375343 - DNA, 951 bp, Salmonella enterica
atgagccagctagacgaactgaaaaaatataccacggttgtggccgataccggcgatattgactccattaaaaaattcgcgccgcaggatgcgaccaccaatccttcactggtgctgaaggccgcgcagctgcctcagtaccagggtcttattgccgatgctatcgggaaagcccgccgccagggcggcagctcggagatccaactgattaacgcctgcgatcaggtagcggtggatatcggtactgaagtgctacgtcatgtgccggggcgtatctccaccgaggtggacgcccgctttgcctgggatcgcgggatgtgcgtgtcgaaggcgcgtaagcttatccagatgtatgaaaagaacggcatcggaccggagcgcattttgattaaactggccgccacctgggaaggtatccgcgcggcagaagaactggaaaaaagcggcatcaattgcaacctgaccctgctgttctctttcgcccaggcgagggcctgtgcggaagcgggcgtctttttaatttccccgttcgtggggcgtatttacgactggtatcaaaagaaccagccgcaggcagaatatcgggtagatagtgatccgggtgttctctccgtgcgtaagatttatcagtattacaaagcgcacggttatgacaccgtggtgatgggcgccagcttccgtcgtattgagcagattcaggcgctggcaggctgcgacaggctgactatttctccggtactgctggatgaactggccgccagcgaaggcgcgctgacccgccaactggatcccggctgtgtaacagaaacccgccccagtccgatgactcaggcagagttcctttggcagcataatcaggacccaatggcggtagataagctggcagaaggcattcgtctttttgccgtcgatcaggtcaaactggaaaatcagattcagcagatgctgtaa

SEQ ID NO: 375344 - DNA, 357 bp, Salmonella enterica
gtggtcggcgaacggggcgaagtcctcccatgtttccatcacgtcgaccatgcagcgctgcagctcctcgaacgggaataccgatgccttatcgtcgacaaactcgcacataaacaggttcttaaagtcctcatcactgttttcgcgtctgagctggtcgaggtcgaacagggtgcagccaccggcaagggcgtcctcaatagtgacaatctgccgccactgtccgtctgcgcaaagaagtccaccggcgagcgcgctgtgactgatgtcaatttcgatgcggtcagcggcactggcgcgccctttgttaaacagctcgccagaccagaaggggtaagcaccgtgcgccagtgttga

SEQ ID NO: 375345 - DNA, 156 bp, Salmonella enterica
atggctctgcgcggtgttggaattggtgccgagaaaaatcagctttgcgccgttgttgccgatgacaatcgggtcgccggtcaggtcaacgtcaaccagtcgcgcaaactgaatgatgtattcccggaacacgtaagcctgcgttttactggctga

SEQ ID NO: 375346 - DNA, 339 bp, Salmonella enterica
atggccggttttgagcgcgcgcagcagtgcctcgcgggagaaatagaacgtcgcgccaatctggcgggatttgagaatgtcacgaatacggtgcgccagtcctgcccggtaccactgcaactggtattcgaaagactggtcgaagaaaatttcttccagctttgcgacagcctcatcgctgaaaaagttctttttcggcctcttacgctcccccttgttacggttggcaacgttggggttaaggtcggcctcgttgccggtctggctgtagcggttgacgcgcgccagtcgctcaatctgccgcccgagcaggtcaatctctttgaagtcgccgcctga

SEQ ID NO: 375347 - DNA, 1176 bp, Salmonella enterica
atggccctgaatgacagtaaaatccgctctgcaaaaactctcgataaatcttacaagctcatcgactcgcaaggtctgtacctggcggtatccaccagcggcgcaaagctgtggtatttccgctatcgcttcgatggcaaagaaaaccgtcttgcctttggcgcttacccgctggtgacgctggcggaagcccgtgaaaagcgcgatgcggcgcgtaaactactggcatccggtatctgcccctctcagcttcgcaaaacgaacgacgccagcgttgatgaatcccgcacgtttaagtttatcgccaccgcgtggcacaccagttgccttaagctccggtcggaaggtcacgccgataaaatcctcacctgcctgaagcgctatgtctttcccgatatcggcgcgatggacattgcgaagatcgaaacccgccatctggcgcagcttgttaaggctattgacgataagggcgtgcatgacgttgccgggcgggagcgtcagcatctgaccaaaattatgcgtcacgcggtgcagcagggcgtgactaaatataatcccgcttacgatctggatggtgtcgtaaccccaacggtgacccaacaccaccccgccctgcccctgaaacgcctgccggagctgctggagaagatggacggttacaaaggtcgcctgttgacccgtctggcgctggagctgaatctgcatgtctttttacgctccagcgagttacgcctcgcccgctgggatgagttcaacctgaaagcccgtatctggacggtgccagctaaacgggaagcggtgaagaacgtgcgcttttccgagcgtggcgcaaagatgaaggatgagcatctggtgccactatcagcgcaggcggtcaccctgctggagcagattaaggacatcaccggagagtcggtatttgtctttgcgggggcgcactcgatgaacaaaccgatgatcgaaaacaccatcaacaaggcgctgcgggtgattggctatgacaccaagaccgaagtctgtgggcatggcttccgcacgatggcctgtagcgccctgaatgagtccgggctgtggtcaaaggacgccatcgagcgccagatgagccacaaggagcgcaacggcgtgcgggcggcgttgtacataaggccgaacatctggaagcccgtatggagatga

SEQ ID NO: 375348 - DNA, 651 bp, Salmonella enterica
atgacaggtaaagtcattccgttcaatcctcttgataagcaaaatttgggggctagtgttgctgaggcattgctaagtaaggaagctcatcttctggatgaactaactccttttgctggagcaggtatttatgccatttattataccggtaaccatccggcatatgagcaactttcagccctgaatcgtgatggcaaatttaagctaccgatttatgtcggaaaagcggttcctgctggtgcccgaatggggctaactaatccagaaaaagttggtaatgttctctttaaacgattgaaagaacatgcagaaagcgttaaggcagcgcaaaacctttccgttgaagatttttattgccgtttcttggttgttgatgacatttggataccattgggcgaatctctagttatttctcgctttaagccaatttggaactcgtcaattgatggttttggtaatcatgatccaggtaagcatcgttatactggtttgcgaccacgttgggattttatgcatcctggtagagggtgggcacaaaatctacgtgaacgcaatgaaactgtcgatgagctgattagagacgctaagcaatacttgcagaatttgccaccctgtttggcacaaagctttatagaagctgaaggcgattaa

SEQ ID NO: 375349 - DNA, 1209 bp, Salmonella enterica
atgaaatctgtagaactatttgccggtgctggcggcttggctatggggtgtgagattgctggttttgagcatcttgctgttgttgagtgggataaatgggcctgtgataccgttcgggagaaccaaaaaaatggttttcctttgttgtgtaactggaaccttttcgaaggtgatgtgagagagtttgactggactcagatcccaaaagggatagaccttcttgccggaggaccaccttgccaaccgttttcaattggcggtaaacataaggccaactcagactcaagagatatgttcccggcaacagcagaagcaatcagacaaatccgtcctaagacttttattgttgaaaatgttaagggactgactcgtgctacatttgcaagttacttccagtacatacagttacagcttgaatttcctgcggttgcaccacgacatggtgaagattggagcgaacatttaaaacgtttgcaggaagaaaaaaccagcggaaaaagtaaaggcaagggattgacttataatgttttagcaacattggttaacgcagctgattatggaattccacaaaaacgtgaacgtgtattcattgtcggtttccgtgatgaccttgagatcgaatggtcattccctaagccaacccatagctatgatgcgctagtttatgaacaatgggttacgggtaattactggaaacgccatggtttaaagatgccagaaattccagtgaaattagttaaccgtatcgctaaattgcgtaagaatccgccagatactcttccctggaaaacggtaagggatgcaattgctgatttacccgatcccgaaacgaagttagctgaaaatattcgaaatcatactttccaggctggagcgcggacttatccaggccatacaggcagtcctctagatcttccagccaaaacgctaaaagccggggatcatggtgtccctggtggcgaaaatatgctcgtgcgcgatgacggtactgtacgctactttacagtacgggaaagtgctaggatccagactttccctgacagttatcgttttcatggtagttggacagagacaatgagacagttgggtaatgcggtgcccgttcatttggcatattgcgttgcaagcagtgtagcggaaaaactgcttacagccgagattggcattatcctgaggcaaagtagtcagaataaaagggcttctgcatga

SEQ ID NO: 375350 - DNA, 327 bp, Salmonella enterica
atgaaaactcttcctgcaaatcagcgggtggcgaagccatgcccgccgcctgtgctcatctggcaaacgctacttacacgcctgctggagcaacactatggcctgtcgctgaatgagacgtcgttcagtgatgaaactgttattcaggagcatatcaacgccggtatcacgctggctgatgccgttaactttctggtggaaaagtacgaactggttcgtatcgatcgccgggggtttaactgtcaggagcagtcaccttaccttcaggcgggagatattttacgagcgaggcaagtaactggtgttttgaaacgtaaccggagatga

SEQ ID NO: 375351 - DNA, 327 bp, Salmonella enterica
atggaaaaacacggtaaccctgagtgggggcttcggtgcgaggtaatgccccgctttagcgcaaggcttgtacaggaaggcaaccggctacattatttagctgaccgcgccgggataacaggcgctttcaatgaggaagagtgccgcaaactgaatatggcgtttccgcacttcattaaacaaatggagctgatgctgctctctggtgagattaatccccgccatgcacattgtgtaacgctgtaccacaacgaactgacctgtgaagcagagaccctcggttcgcatggctacgtttatatagcgatttatcctactcaacgttaa

SEQ ID NO: 375352 - DNA, 474 bp, Salmonella enterica
atgtctgaattcattttaacttctaccttcccgataaatgaacagcgcattatccgtcgcgccatgcgcttgctggagaaataccatcgccaacctggcgagcagtttatcgctaccggcttcactaaaaactggctgcaactacgtcttgcccgacaggaacgggaaatctttatggcgctgtatctcgataaccagaaccgactgctggagcatgaaacgctgttcctcggcacgattaacaataccgaggtacatccccgcgagattgtaaaatcagcactgcgccataacgcggcagcagtgatcctcgcacataaccatccgtcaggagtgacggatgccagtaaagcagatcgcactattactgaccggatcgtaaaagccctgaatctggtagaagtgcgggtactggatcatttcatcgtcggtgatggcgatgcgttgtcttttgctgagatgggctggctgtaa

SEQ ID NO: 375353 - DNA, 819 bp, Salmonella enterica
atgagattagccagccgctttgggcgggtaaaccagatccgccgtgaccgcccattaacccatgaagaactgatgcgtcatgttcccagcgtttttagtgaggataaacacaaatcccgaagtgacagatacacctacatccccacaattaccctgctggataatcttcagcgggaaggtttccgaccgttctttgcctgccagacccgtgttcgggatgagagtaaacgtgaacatacgaagcatatgctgcgactgcgccgtgaggggcaaattacgggtaaacaggtgccggaaattatcctgctgaacagccatgatggatccagtagctatcaaatgctgccgggtttgttcagagctatttgttgcaacgggcttgtatgcggtgagtcttttggtgaagttcgcgtaccgcataaaggcaacgttgttgaaagggtgattgaaggggcttatgaggtgctcggtattttcgataaggttgaagagaaacgcgatgccatgcagtcgttgatgttacctccacctgcacaacaggcattggctaaagcggcgctgacgtatcgctttggtgaagagcatcaacctgttaccgaatcacaattactggccccccgacgctggcaggacgactcaggggatctctggacaacctatcagcgtattcaggagaatctgattaagggtggcttatccggtcgctctgcacagggtaaacgcgccagaactcgagccattaatggtatcgatggtgacgtaaaactcaatcgcgcattgtgggtaatggccgaaaatatgctgcaacttgcatcgtga

SEQ ID NO: 375354 - DNA, 624 bp, Salmonella enterica
atgcttaatttaagcaataatggtccattaaatataaaacacttgaaaagaatcaaagatactttaaacaagtcactcagagaatatcaccgaacaatgatacttagaattgaccttcgattgccagaaaatagcccgtatgaaaatgactcgacattaataacgcgttttctggaatccctgaaatcccagaagaatgcagataggttaaataaaatatctctcagaaaaagaactcatcactgtcggataagatatgtgtgggtaagggagtttaacaaaaatggcaagaagcattatcatttggctttatttttcaatcaagaagcttatgcctatcccggaacatataaacctgaccatgaaggtttatatcgtcacaaccttgcatatatgattatggaggcctgggtaagggcattacatctcgatcaagaggagagctatcaacagtattatcggcttattcagtttcctgataactgtcatgctcgactgaacatgtatggcttatcttaccaggatgattatgcaactatcatgaacaggctaagttatctggctaaagaatacagtaaagactattcggacggtaaacgtaactttggttgttctatagggtaa

SEQ ID NO: 375355 - DNA, 213 bp, Salmonella enterica
atggacacccggaataacaatagccgtctgcttgacgataaaatggttgatatgaaatttatcactgaatttaccggattaacggacaagtggttctataagctgataagcgaagggaagttccctgagccaattaaattaggccgtagttctcgctggttacaaagcgaagtggaaaaatgggttcaggaacgcattgatgcctcacggtag

SEQ ID NO: 375356 - DNA, 276 bp, Salmonella enterica
gtgacgtccattttacgctatgccgtccaacagcagcttatccgctataatccggcttacgatctggaaggctccatacagaagccagaaacggaacatcgcccggcgctggagcttgaagagattccattgctacttgaacgtattgatgcctacaaaggccgcagactgaccacgctggctattcagcttaacctgctggtatttgttcgttccagtgagctacgcttcgccagatggtcagagatcggtaacgttccggtgaactcaccttga

SEQ ID NO: 375357 - DNA, 393 bp, Salmonella enterica
atgttccttcgcgttacccctaaaggttcgaaatactggcaaatggcttaccgcttcgacgggaagcaaaaaatcttctccataggtgtttaccctactgtttcacttgctgatgcaagacaacgccgtgatgaggctaaaagacttcttgctcagggcattgaccctaatgcaaagaaacaggccgaagtgaaagagcttaaagccaaacgcgacaacactcgttctttcaaatctgttaccaaagcgtggttttctaccaaaaagaaatggtcagaagattatcgtcataccgtattgaatcgccttgaaacctatatcttcccggatattggcaacagagacatcaccgagcttgccactggcgatctgttagtccccataaaaaagtag

SEQ ID NO: 375358 - DNA, 249 bp, Salmonella enterica
ttgtgggaaacggcgcgatattctgccggggtggcgcagggacgaaaattgaaatgcacttttcacgatctcaaggctaaagacatatctgactacgaagactcgagcagggagaaacagcgattctcaggacataaaacggaaagccaggtactggtatatgatcgcaaagtgaagatttccccaacgctggatcttcccattttagcaaaaacagaagatgatgatggcgcaaaatataccaagtaa

SEQ ID NO: 375359 - DNA, 123 bp, Salmonella enterica
atgatagaaaaactggcgataaacaaggagcgccagtggccggagccgaaagatggtgagccaaagctgcgcatcaaagatgcaggcagcgccggtagtggtagtgccagaagaggcttatag

SEQ ID NO: 375360 - DNA, 240 bp, Salmonella enterica
atgagtgataccccacagacaattaacatctttaatctgcgttcagatacaaacgaatttattggtgcgggcgatgcgtatattcctccacacaccggattaccggaaaattgtactgatatcgtccctcctgaaattccggccagtcatattgcagtatttgactctgaaacccaaacatggagtctgaaagaagagcatcgcggcgagacggtttacgacacaactatcggtaattag

SEQ ID NO: 375361 - DNA, 216 bp, Salmonella enterica
gtgtgggtaaaagacgaagcggctgaaacagcagcgcagcttcgtcaggcggcagaaaccaaaaacaggctcctgcaaatagcatctgaaaaaattgctcagttacaggatgcggttgatcttataatcgcaatagatgatgagaaagcgcagctcgacgaatggaaaaagtatagggtttcagtaaaccggatggatgcctcaaaccctgactga

SEQ ID NO: 375362 - DNA, 771 bp, Salmonella enterica
atgtacttgattgattataatagctatcgctcggtaaaaggtttcaatcgtcgtgttcgtttccttgttatgcattacacctctattgattttaaggcgtcgattgccgctttgaccggggcttcggtaagcgctcactatctcgttcctgacccttcagaaaaaacgtatattgctgcaggttttaaggatatgcgtatattcaacctggttgatgaaaatgagcgagcctggcatgctggcgtaagttcatgggccggacgcagcaatctgaatgatacctccatcgggattgagatggttaacctggccagtgataacaacggcgtgtttgtttttcctccctataatccggtcctgattgatgcaatcaaggagctggccgccaatattctgcaacgatatcctgatattacgcctgtgaatgttgtcggacacagcgatattgcccctgggagaaaaagcgatccaggtgctgcttttccgtggaaagaactttacgacgcagggatcggtgcatggtatgaggaatcgaccatgcagcactacctgaagcagttcagtaagtctgtaccatctaaaacagaaattgttgctaagttaaaagcatacggatatggcatctcagatgcaggaacagaaatcggatacaagaatttgatccgtacatttcagcttcacttccgacaaaagaattatgatggtgtcgctgatgctgaaacagcggcaattctttatgcgttagtggataaatacttcccggcaaagtaa

SEQ ID NO: 375363 - DNA, 1467 bp, Salmonella enterica
atgaaaataggatcccaaccagtcacattgcaatatgcatatacaggtaacgaggcgacatcaaaccttgagttattaaataaatggagaatagaatcccctgatattgagagggaggagcgtaatagtatttacaacaaaataatagaagcaaatcataccgggagcttatcaattactgctcgtcatgttacctctattccggtatttcctgataatttatccgagttgactttatcttcatgctatacactggagtctattccaaatcttcctgatgggttaaaaagtttaactatatctgaaaataagaacattaaaatttcatatttcccagatagcttagagtcactatctatagatatgcaggcatatgaagaaaattattctttccccacgttaccttatggattaaagagttttactgcatgttatggtaaatttttgcccccccttcctccgcatctgtcttctttgtcactgcaaaatttctctgaaatattatgtgctgagttaccatctggattagataaattagacttacaaagttgccctttcttgccattaatgaaaatgttacctgaggggttaaaagaactaagtattgaacttatacgaacagtttccgatactgttatagatgatatattgcctgaaaagctaaaaaaattaagtatcaatttttgtgataatattaaacttccagttaagcttcctgctaatttaaagtctatcaatttatcctcaatgacccctgttgtatgggaaataccaacctgcaatctgcctgcacatatagatatcagtaccgatggttatgttaaacttaatcctgaatttcttaccaggagtgatattacctttagtcacaagtctgcaggagatgcgttaagttttcagcctggagatgtggtttatggtttatgtaaagcaagagatcgagtaagtactttagttaattcattatattctttttcaaagaaagacattattattcaaaacacattaacagatgcggtctgggacaggaagaatagagccgtgtttaataaagatgagaagatagcagaaagattgaatgatgttcagagagggattttttttagagaatatttatctcaacatcaaaaatacaatattaccgaagataaatattcagacttatccaatgaggagtgctggataaaaacaagtaaagccggccttgaatttcagacacgattaagggaacagtcagttatttttgtcgttgataatttagttgatgctataagtgatattgcaaataaaaaaggaaagcatggtaatgctattacagcacatgagctaagatgggtatatcggaatcgacatgatgatctggtaaaacaaaatgttaaattttttcttaatggtaaggctatttcacacgaagatattttttcattagttggctgggagcaatataaacctaaaaatggcgtgtga

SEQ ID NO: 375364 - DNA, 252 bp, Salmonella enterica
atgaaaaaaagaaatttcagcgcggaattcaaacgtgaatccgctcagctggttgttgatcagaactacaccgtggcagatgcagccagcgctatggatgccggcctttccacaatgacgcgatgggtgaagcagttgcgtgatgcgcggcagggaaaaacgcctgaagcctctcccattactccggaacaaattgaaatacgtgagctaagaaaaaaacacaacgtattgaaatggataacgaaatactaa

SEQ ID NO: 375365 - DNA, 450 bp, Salmonella enterica
atggaccgtaaatccccatctttatatgaaattcttactggcaactttacaggggaccttccccttgaagctgtaaacgaagaagacccggtcattttatccgtgctggataacatccagagtattttgaacgcccgggccgggacccaatcccatctccaagattatggtttgccggatatgaccaaaatcctgcaaggcatgcccgggaccgcccacgagctgatcgatacgctggccggtgttctgctcaagtatgaaccccgtttgcagtcccttaatgtaaccttactcgaacagcaagtgcccggggagttgcgctacgccatcgatgcggaactaagaggtatcgggcttgtacggtatgggaccgagtttatgtctgagggtaaagtgatgatcaggcacttgaaacaacaacagcatctggaaaaccataagtttatctaa

SEQ ID NO: 375366 - DNA, 1365 bp, Salmonella enterica
atggctaaaaactcttgctctgtatactcttcaattttgttctttaaaactattgagctcataatttcacctaactccatatatctacatcgccgcgatgcagcgtcacagcttggcatctcagaacgtcaggcgcaacggcttatcaatcgttaccgggtttctggtgctgaaggacttgtcagccgtaaacgcggccagcccagcaatcgccggttgaccgaatcgcttaaactgcgcgtactcacgctgatacgtgaaaactacagtgactttgggcccacgctggccgctgaaaaactcagggaacgccatgatatccgactttcaatcgagaccgtccgcaactggatgacgtctgacggactctgggtcccgcatgctcgtcgcaagtcacgggtttatcagccccgacatcgtcgtgattgtctgggtgaactgatccagatcgacggctcccatcatgactggtttgaaggtcgtgcgccaaaatgctgcctgcttgtatttatcgatgatgccaccggccgcctgatgcatttgcggttcagcgagtcagaaacagcctttgattacatgctggcaacccgggaatacattgagcagcatgggaagccggtatcgctgtacagtgacaaacacgcaatatttcgcgtcagtggtccggagaaccgcaataccaccgttacccagttcggacgtgtactctttgacctggcaatcgagcttatttgtgccaacagctctgaagctaaaggccgcgtggaacgtgcgaatcagactcttcaggatcggctaatcaaagaaatgcgtctggaaggtgttaccggcattgaggccgcgaatgcctggcttgccactttcattgcagactttaaccgccgattctcacgtccggccaggttcccgaaagatttgcatcgtccggtgcaggaaagccccgatgaattaagagacatctttgcctggcatgatgtccgtaccgtgtcgaaatcactgactttccagtacgataagatcctttatctcatggacccaacagaagaaaacagccgtcttgccggtgagaaaattaaagtgctggattatcccgatggcaccctcgccttccactacggacaccggagccttgagtgtcaggcattcgataagctggcttgtgtcgaccagggacagattgtcgataacaaacggctcgggacagtactcagactggctcaggtaaaacaggatgagcgggaaagcgaaggcaaacgggaacgaagcaaaaaatcgcccagccgtaaggctcaggtgcgcgtccaggaacagctccgggctatcaatcctgttctggcagacccgagatttatccagtacagataa

SEQ ID NO: 375367 - DNA, 264 bp, Salmonella enterica
atgcgctttgaagattatactggaaatgagtttaaaaatttcctgcaagatatttttaaagcaaacactgcgcctgatgatgataagctagacgagctgcttgagcattttgaaaaaatcaccagtcatcccgatggaccagacttgatataccacactatagatgaggaagactgcaatccggaggggataactaaggtagtgaaagcatggagaaaatctcaaggcctcccgctttttaaaaactctgaagctgattcgtga

SEQ ID NO: 375368 - DNA, 264 bp, Salmonella enterica
atgacagcctcatataaacagcttaatgactatactgaaaacgagtttatccaattcgtaaccgacattgttgaagtcaattcaaattcagaggaagaacatcacgctttggtatcaaagttcgaagagctggttcaacatccaaggggtaacggccttatttattatccagaagacggtgaggacgattcccctgagggaattgtccaggcgatcaaaacatggagaaaatcaaaagggctcccattattcaaagattcataa

SEQ ID NO: 375369 - DNA, 369 bp, Salmonella enterica
atgatgaagcgagttactagtgcgttatttatcgtggtattaatggttgtatggattattctaccatcaacaactattccttattcatactcaaaagtatttgagattaatagtcctgacaataaatataaagtaattgtttaccatggagggataatatcccctatgtcactttataagtacttaaaggatgaggattattttttcattatttacaatgcatccggtgaggtggtttttaaaccatctccgtattatggcacttccaacatgggagcatatgacggtatagaattccagtacggtgatagccattctttactttacccaggaccagaaggctatgattcatacgaattcactaagtga

SEQ ID NO: 375370 - DNA, 870 bp, Salmonella enterica
atggcagtttcatcaacaaccactacaaaagagcaggagcagcaggaaaagaaggtcagtgttgatttcttccacattgatatgattccggatgccatggataaaatgaaatggcctgtggctgcaaagttaatgaggcattggtttgataccaagccttcattttcatatacagcgcaatccaaaaaaagtgctcaagatgctgacccgacaacactacccgaatcacaaattaattgtgacataattaaaatgtcctgggcaattcagtatgaacaagttaaaaatggaataaacgaactctcccgtatatggaaaagtgaaaaaggtattaagcggttgaagtttcaattgggtaaaaaaggctcgtttaatgaagagggtattttgttgggttattctgaaaatatcaaggaacttgatgcggatgcccaggtcaacatcttagtaattggtagtaagttcgatactgtgaatgaatggtatggtgctatggggaactctactttgaaagtatgcattcgtggaagaacaagtaaaagtggaagtgagaatatatttaccgtcgataaattagggttttatctcaaagacacatatgatttcgttgacgaaggcaagactccagagccacttggcatttggagtaaaaacagaatattagataaagcagagtccgcattatatatgtcaacttatttatctggtgtttggggcgtattggcaagagattttactggttttgttccagttttcaacgcggactttagaaaatggcaggctaagcataacactggaggtgattttatagtgctttcagatattttatggctggaacccttaccaaaggataaggtgattgttttatga

SEQ ID NO: 375371 - DNA, 1020 bp, Salmonella enterica
atggaggataagcgcggtgaggagcacatcaaactcgccacggaatacggcaagacgcagctcaacagcggacacctggtggacgcgcaggggcaacgtcgcggcacgggtaccgagttgcgcaccgatgagtggggaacaatccgtgctggaaagggactctttgtcgctgcggatgagcaggcgaaagcgcagggtgaggccctggacagggatgccgcgctgaaggaaatcgacaggcttaatcagcaaatgcaacagctggaaatggccgcagaaaaagcgcaggcgctgaagggggatgtcgacagccagatacagatgtttgagcagcggctgaaaccgctcagtgaagcggtgcttttctcagccccggaaggcatggccatgaccagcggtgaagacatgcagctggccgcagcacgaaacgtggctatcaacgccggagaggacttcagtgccggagtgatgggcaatgcgaccctgcttgccggggagaaactggggctttttgcccgcaccggtcaactgagcctgaaatccggggaagggccaatcgatgtgcaggcgcaaaacgccagtatgcggttgttcgctgagaagaagctgacgctgagctcagcgagtgacatctcctttgtcgggaaaaaacgtatcacgctgattggtggcggaagctatctgcggcttgaggccggtaaggtcgagtatggtacgacagcgtcgtatatgcgcaaagtgaagcggactatagctgcgggaagcagtagcctggagcagggaccggctgaactgcccgctccattaccagatttgtcatgtggtccaaataccgcgtgttttagggtcctggattccttaacaggctctgaagatatggagtttgcatatcaagtacagacatctaccggtacagtggtaggaagaactgattcagctctgacgcatgtagtaaattcagataccgaagaaaacgtaaaccttgattatgttttccagataagagcggggacaaggtaa

SEQ ID NO: 375372 - DNA, 450 bp, Salmonella enterica
atgagatttaaatcaccgtctctatacgaaattcttactggcaactttacaggggatcttccccttgaagttgtaaacgaagaagacccggtcattttatccgtgctggataacatccagagtattttgaacgcccgggccgggacccaatcccatctcccagattatggtctgccggatatgaccaaaattctgcaaggcatgcccgggacagcccacgagctgatcgatatattggccggtgtactactcaagtatgaacctcgtttacagtcactcaatgtgaccctactcgaacagcaagtgccaggtgagctgcgctacgccatcgatgcggaactgagaggtatcgggcttgtacggtatgggaccgagtttatgccagagggtaaggtgatgatcaggcacttgaaacaacagcagcatctggaaaaccatcagtttatctaa

SEQ ID NO: 375373 - DNA, 270 bp, Salmonella enterica
atgcaccaaaggaaggctatcatcagttttgttataatgtttttattttcttgcattcaggtaaagtccagcctgaaaaaccattatccgaaggataaagaaaatctatgcctgaccattcaggtgcaactaaatcagagaactgatattcccaaaaataccaagctgaactttttattttttctccagttttgtcatagacgacgaaaaatgattgatttgaaaaaagacgcaatatctgaccctagcccaaattcagtacagtgctaa

SEQ ID NO: 375374 - DNA, 198 bp, Salmonella enterica
atgagcaaaaagattatcacgatccaagtaagaggcgagcacgctgacgttaaagctgtacgtcgttcaaagcttgaacaaagtgttaatcgttccctgcgtgcctcattttctctggaaggtaaccatattaccgatacgtcatggtctaaaatggagcaagctgctcgatttttgacgagaattgcagccgcttaa

SEQ ID NO: 375375 - DNA, 1041 bp, Salmonella enterica
atgaaacacaaaaaagtaagctttcttaaagaaaacggtgaattttctctgagccttctcagttttggtattgttcatgtcaaaaaatcaaaagagcataaaagaagcgttaactattattggaacactcgcacacaggaaattatcatcgggtctggaacgttgcgtaatcataattccattccatcaatagctcatttatttaactataaaagatcgagcgctgacttaagcagagaagaaattcaacttggggattctgtgtgcgtactacttaacaccaccgccgccctttttctttttgggtccatagttggtatcgataagtcgaagaaaggtacttattttcatattctaccacacgataaaatgtttccctttcagttaaacagagtgattaaagtcaaacatcaaaaaaacaatatctatcttctgaatgacggtgctaacgaacgacatgaatatatggcaaccaagaatcttgcttttgccaaataccaatatcaagtagagtttgtagagttcatcatatcatacatcaaaattgcccccttagtaatcagctatgcttccgataaaagcaaaataataaacgagaaaaccctattgcaatgtcacaaagttctttttgaacatatttactcatgggcaggtgaatacagaacacaccctgtcgtcgttggagataaagaacggccaacaatggagcatgatgaaataagaaaagcacttaaagcaagccttagagcttgcactaaaagagagttagaaaaaataaaatcaagggaacaactagttcttaaactggcaacacttcacgcagaacttgcgtggatccacccttttgaagatggaaatggacgttcaattcggttatttcttcaaattgtggctgcgacgatgggatatgaatttgatatggaaaaactagatggaagtaacaaaaacaagcgagcctaccattacgctgtaagatgtgcaatacacaacaacaagcgtaatttgattgcccttatatcaagggcaatcaaggagctttaa

SEQ ID NO: 375376 - DNA, 432 bp, Salmonella enterica
atgtccaaaaacctcgaattatttaaccagcagacggcggaaatctttgcggtgctatgggataacttcccggtgccacaggtcattacctacgaaaaatttaacgccgcgctacctgatgactactttgaccaacttaactcaccagaaatgaaagcactgaatcagttgcgtagtgtggttgagggtacattcacttttcttaatgaaaacggctacatccagtatgaaacagaccatcagacccattttcggaatgcgcgcctgaccgagaaagcgctcgccgtgctcaacaaaaaacctgaggcactaggcggaaatgaaacgatgggcgataagattatcagtgcggtgaaagacgggacgccgggtgtaattgccggtgcggtgacaaacctgctttccctcggtgtcaatctggtaaccagctaa

SEQ ID NO: 375377 - DNA, 819 bp, Salmonella enterica
atgaaagttagctatgacgttgtcatcaaaagtggtgatcaagaagttgatatggagtatggccttgataccctctctggaacggctgaggtgacatgcatactagcagaggcaatactcagaaaaaaaattattaagcgccgcactcatgttaaccctgcgcgagcggttctcaaacaaagctttaaaagttcttatggtcaaaacttcgacttgattgttaatgagccggaattagctgccgaattaaaaaaaatgacccgttctgtgttctcggaagtcatggggtattttatttctgagtctctatatctggaaactaaggagctgtctccaaaagctgcagggattattgaggagcttgaggaaattgaagatgaacttattgatcgtatcagacaacctttggtaaggatgcataggataaatcttcaaaaaaactttgatgttgagcttaactataaaaaacctgctggcgaacaaagaatagcaaagttagacacaatgactgctacgaacttgacacaatcaaaaataaagcccgatcaagttaatattaacgcagttattactcgttttaatgcgagaactggaaatggtaggttagttatcgaaggtgaagatgatacagtagcctttggtttttacatgcctttaaaggctatacccgccgctcaaaaaagattggtctcattaaatttacacaataataatggcaggcaagacaactacacatatctaaaacttactgttagcaaagttgtagtaaaaagtggtgatgtggtgaagtatctaatccgtatggttgaaactgtatga

SEQ ID NO: 375378 - DNA, 726 bp, Salmonella enterica
atgagaaaggtgttgctgtcttcggctggcgtgattgtagctgtgtgctccttgtattacttcaacttcggggtaaacggacatttatccagcaagactgatgtttgggcacagtttggtgattatttggggggcgtcgtcaatcctatactttcatttattacaatttacctccttataaattcaataaaacttcaaagggaggctaattccagcctgattgatgaagtaaaaaggcaagaatctttagaagagtataaaaaatttgaagtgagattttttcatttggttgaatgtcaggattctaactttgaaaggttttgtgttcaagttggtgatgttgatggacaaactgacggggtggtcgaagaatttacaagtggtgcagccgtaacttatcttgaagataatattgtaattttagttaaggctaaggtaaaaaaagaggtaataacaaagtggttaagtgaagtggatgctaatgattgcattttttcagtggtgcgtcgcttttatttgattgtgaagttgatagataattgcggggttgaacgggaagattattatgaaacattagttaacttaactgacataaaaataatatctttagttgcaatggcttgtacatactatgagtgggatataataaagtatatccatgacagtaaaatacttgaacgagatggagttaaagagtttgtttcgcaaatatccactcacgattga

SEQ ID NO: 375379 - DNA, 351 bp, Salmonella enterica
atgcgtaactctaaagggctcggcaactttaagaacctgtttttctactcaccgaacgggaaaccggacggcataaaaatcgtgccactgagcgaggtcgccacaaaagatgacttttttaacatcaaaaaagccagcgctgccgacctgatggatgcgcaccgcgtaccgttccagctaatgggtggcaagcccgagaatatcggctcactcggtgacgttgagaaggtggcaaaggtatttgtgcgtaacgagctgtcgccgctgcaggacaggttcagggaggtaaacgactggctcggcatggaggtcatcaggttcaaagagtacacccttgacaacccggaataa

SEQ ID NO: 375380 - DNA, 939 bp, Salmonella enterica
atgaagagcgctaccgtaatcgcgtactcgacgggcttaaacgaagggcaaaatcactgggttactctctccagcaagatcctgagttatgcgtgtgaaccgggagtttctcaggaaggctaccgcgctcctgatgccagactccctgaacggttcccgataatcgggaaactcagagcgcattatccggtggccacactctgccatgtgttcggggttcatcgcagcagctacagatactggaaaaaccgtcctgaaaaaccagacggcagacgggctgtattacgcagccaggttctggagctgcataacatcagccatggctctgccggcgcaagaagtatcgcaaccatggcaacgctgagaggcttccgtacaggacgttggcttgccggcaggctcatgaaagagccggggctggtcagttgtcagcaacctgctcaccggtataaacgtggtggccatgaacacattgctatcccgaatcaccctgagcggcagttcgcagtgacagagccaaatcaggtgtggtgcggcaacgtgacgtatatctggacaggtaaacgctgggcataccttgctgttgttctcgacctgttcgccaggaaaccggtgggccgggcaatgtcgttctcactggacagcagactgaccatcaaagcgctggaaatggcgtgggaaacgcgtggcaaaccagccggggtgatgttccacagcgtccagggcagtcattatacgagcaggcagttccggcagttactgtggcgataccggatcaggcagagcatgagccggtgcggaaactgccgggataatagcccaatggaacgcttcttcaggagtctgaagaacgaatggatgccggtggtgggttacgtaagcttcagcgaggcagctcacgccataacggactatatcgttggatattacgcgcactaa

SEQ ID NO: 375381 - DNA, 171 bp, Salmonella enterica
atgcaaattttagaacagtctttttttttcgttcctgagaattgtcctgaacgatttgaaaaagcaaataacacatgtgctgatggcgtaatcattgatttagaagatacggtgacatctgagaaaaataatttccagagaagttgccgaaaaaagaaaagggaattttga

SEQ ID NO: 375382 - DNA, 750 bp, Salmonella enterica
atgaaagttttagtctgtgtaaaacaagttgtcgatcataatgttagaattagaataaagcaagatcattctgatgttgatatttctgactgtaaactcagtatcaatccatttgatgaaatagcagttgaagaagcagtacgtttaaaagaacggggggtaatcagcgagattgttgcagtgtctataggatataaaggtgtaggagacgtattgcgtacagcactggcatacggggctgacagggcaatacatatattaacagaaaagtctcttgatccactgattgtagccaaaactatcacagctattactaagaatgaaaaacccgatattatattattaggcaagcaagctattgatgatgattgtaatcaggtaggtcaaatgctggcagcattactcgatcttcctcaggccactaatattagtaaagttactgtttctgataatttattaactgctgttcgtgagattgatggaggagcagaaacattgagtttatctctgccagcagtactcacaacagatctccgactgaatacaccgagaaatatcagcttgccgaattttattaaagccaagaaaaaaactgttgaggagataaatttcgattcacttggtatcagcccgtcatccaaattgactactatcaaagtcgatgagccagcaacaagggaggccggcataattgttccggatattagcacgttgctaaataaactaaaaaacgaagaaaaaataatttaa

SEQ ID NO: 375383 - DNA, 942 bp, Salmonella enterica
atggcttctttagttattgctgaacataatggcaacattcttttaccttcaacactcagtacaatcactgcggcgaaagccattgatagtgatatagatatacttatgttagggtatggtatagaaaatattgcagttaaagccagtcatattcagggggtatccactgtatttgttgctgacggtgcactattcgaacacattctggcagagaatgtggaaaaacagatctgctattttttgaacagagacaaaaatcattatcagtcaattcttttccctgcaagctcttttggaaaaaactgtgcgccacgcttagccgcaaaacttgatgtatctcagattagtgatattacgcgtgtcattgatcaacatacctttgaacgtccaatctatgcgggtagtgctattgccacagtgcacagtgatgatgaatataaagtgataactgttcgtcctaccgcatttgcggctgcggaagaggggggaaaagcccccattgcatctacagaggttgttactggttcagatcaggtaaaatttattagtcaagatgttaataaaagtaaccgtccagacttacaatccgcccgagttgtagtatcaggtggacgaggagtaggaagtgcgcaggcgttcaaagagcttgttgaaaatctggcagataaattaggggctgccgtcggtgcaagccgggctgcggtagatgctggttatgccccaaatgattatcaggttggtcagaccggcaaaatcgttgcgcctcaactttatattgctttgggaatttctggtgccatacaacatcttgctggaatgaaagaatcaggcatcattgtcgctattaataaggatcctgacgcgcctatattttctattgcggattatggtctggtagcagatatattcaaagctgtacctgagcttatcgataaattataa

SEQ ID NO: 375384 - DNA, 621 bp, Salmonella enterica
atgcttgaagccagagaactgcactgcgagcgggacgagaggacgctgtttcgcgggctgtcgttcaccgtggacgccggggagtgggtgcaaatcaccggcggcaacggcgcggggaaaaccacccttctgcgcctgctgaccgggctggcgcgcccggacggcggggaggtgtactggcggggcgaacccctgcgccgcgtgcgcgacagctatcatcaggatctgttgtggaccggacatcagccgggaattaaaacccggctgacggcgcaggaaaacctgcgtttttttcatcaggacggcgataccgcacagtgcctggaggcgctggcgctggccggacttgccggatatgaagatattcccgttaatcagctctcagccggacagcagcgccgcgtggcgctggcccgcctgtggctcacccgcgcgcccctctggatcctcgacgaaccttttaccgctatcgatgtgaacggcgtggcccgcctgacacagcgtatggcccggcatactgagcagggcgggattgttatcctgaccacccaccagccggtgaacgttgcgccggataaaatccgccgcattgcgctgaccggcgggagggcagggcaatga

SEQ ID NO: 375385 - DNA, 660 bp, Salmonella enterica
atgatgtggcgaattttccgtctcgaactgcgcgtggcgttccgtcacagcgcggagatcgccaatccgctgtggttcttcctgattgtgatcaccctgtttccgctgagtatcgggccggaaccgcaactgctggcgcgtattgcgcccggcattatcctggtggcggcgctgctttcttcactgctggcgctggagcgactgtttcgtgacgacctgcaggacggcagtctcgaacagctgatgctgctgcccttaccactgccagccgtggtgctggcgaaggtgctggctcactggatggtcaccggcctgccgctgattgttctctccccgctggtggcgctgctgctgggaatggacgtgtacggctggaaaatgatggcgctgaccttattactgggcacgccgacgctgggttttctcggcgcgccgggcgtgggattaacggttgggctcaaacgcggcggcgttctgctgagcgtgctggtgctgccgctgaccatcccgttactgatttttgctaccgccgcgatggaggcggcctccatgcacctgcctgtcggggggtatatggcgattctgggcgcgctgctggctggcagcgcgacgttaagtccctttgcgacggcggcagcgttacgcatcagtctgcagtag

SEQ ID NO: 375386 - DNA, 249 bp, Salmonella enterica
gtgggtgagcgaactgatactgaaaagggggcgccagtgagtacggcatttgcatcgtggagtgattttttcgccatgggcgggtacgccttttatgtctggctggcggtggcgatgaccgttattccggtggcaatactggtggcacagagcgcgatgcagcatcgcgcgattttacgccatgtcgcacagcaacgcgcccgtgaggcgcgtatgcgcgcggcgcaggcgcaacaggaggccgtgtga

SEQ ID NO: 375387 - DNA, 987 bp, Salmonella enterica
atgtaccgacaccagtaccccggagcgcaccaggaaagtgcccagcaggcacagcgagaaggcgcagatggacagcagcagcgtccacgccttaaagctggcgcgctgttcggtgaccgccagcgagtgcagcagggcggtgcccgccagccacggcataaaggaggcgttctccaccgggtcccagaaccaccagccgccccagcccagctcatagtaggcccacgcggagccgagcacgatacccagcgtcaggaacacccacgccgccagcgtccacggacgggaaaaacgggcaaacgcgctgtccagacgcccgcacagcagcgcggcgatggcaaaggcgaaggccaccgagaaaccgacatagcccatgtacagcagcggcggatggaaaatcagccccggatcctgcaacaatggattcaggtcgcgcccctccaccgggaagtccggcagcgtgcgggcgaacgggttagaggtgaacaggataaacaccaggaaaccggcgctgaccatccccatcaccgccagcacccgggccacaatatccaccggcaccggcctgctgaacaccgccaccgccagggtccagccgctcatcagcagcacccacagcagcagcgagccctcatgcgccccccacgtggcggccacgcgataccagaccggcaactgcgtattcgaattcccggcgacataggccacggtgaagtcattcaccacaaaggcgtgcgccagcacaaaaaacgcgcccgccacgcagagaaacagcagccaggcgaacaccccggacgacgccatcatccgcgcatcgccgcgcgccgcgccccacagcggatacacggacagcagcagcgccacgccgagcgccagacacagcagcgcgttgccgatttcaggcatcatgatgatttatccttatacccgctttgcggacggcggtggttttcctgcatcgccttttccacttccggcggggtgtag

SEQ ID NO: 375388 - DNA, 1224 bp, Salmonella enterica
atggcatttcaattagctggtactgatatgcacggcagtccgttgctgtcgctgcaaagtaataccgtaacaatgttcagttggggtccttatggtggttgtaccccccgtaccggcgcgtcccgcagtctacccggttttaacggcgagcggcaggatccgctgaccagcgcttctcacctcgggaacggttatcgcgcatacagcccctttctgcgccgttttacctgtcctgataatgaaagcccgttcggcgagggcgggattaacgcctacgcttactgtaatggcgaccccgtcaaccagaccgatccgagtgggcatggccccctgacatggcttttgggagctggtatgcgtatcggcctgcgcattcttctggatggtacaatggccaaaggtatgctcaaggcattaagaatagcagggaaagtggaaacacaccttgaacgcctggcttctgtttctactggcttaagcgctgcaattatggcaaacaaagatccccagatggcggccaggctgggctgggcttcgtttggtcttggtctgccggatgcgctgacaggagcaaaaaaactcttccagcaccagtataaacttctgtcaggcttacatgagctgattgccggcaataaaaatcaattagccttacattcctacggttgtaagccaatgtattatgaattttccaaaaaaatggattcggctggccgctacagattgaaaggcacctatggttacagtgataacttcagggatataggtgaagaagccttgttacttcatggtacgtcaaaagggaacctgcttgtcagttatggtaaagtagaattatcggttcatcgcttttttggtacggaaataaaatatactcggtctaaagcaaatctcaaatatatgcttctgacacctgcagaattggtagaggccatgcgagatgatttaggcattaatctcgcggatccagataaaagaaacaagcctattcacctgattagctgctatgcaaaaaggggcgccgctcaggctctggcggacgccacaggcagagaagtttatgcgtattctacccatattacacggtcgcaaggacttgaaaggctggaatatgccgattataaaataaaagcaggctatcgtatgtatgatccccgccgactatttttaggggggcataagcctaatcgacgttcatttttccctaaagtccccactctttaa

SEQ ID NO: 375389 - DNA, 2019 bp, Salmonella enterica
atgggctggcaaaagtgtagcggtattaggcgcagctatctagggcgtatcactagaattatatgtaatcctcaatcgaaatatgaaaacataaaagaatttacttataatttactcaaaaatgataatggcgagattacggaaatatctactcagataaagaatttaaacaccggtatgattgaggtttatttttttgatggcgcgggcagaatttattctgagtttaaaaatgctgctgacttcgatcaacctgatgcattttatgaagtaaaatctattaagtgggatgatcgtgggcgtaagcatagcgaaattaataaagattattccagagatgtacataaggagttgaacgaatactctgtcactacacaatatagctacgataattggggggggaattatttaacaactttatcttatggccgtcaggacattgatagccacgatcctgtacgtcgttgtgatattagtcagacaagatcagaaaatggtaaattagtgctggggtcaacgaaaactgaatatgatgtccagggaaatgctatcaggcaaattattcgcgataaaaacgatacggattatgctattactcggtctgagtacgatggtttagggcgccttcgtaaattcatcgatacatctggatatgttacggcgttaacctacgatgagtttgatcgcatgctgtctaagcgactgcctaataaagctctaattgagtggacctacgcttcatacactcctgaaaattatccagtcaccattgcgttaaatggtgtacaggtgggtagccaaacttatgatggcttaggacgtctgacggcaatatcctctggtgggcgtgtcagtagcgcgacctatactggggcaaatgacacgccagataccaccatggatgcgatgggccaaaggattactcatacgtggatctctgagcttcatagcgtacctgataccattgtgggccccgattttatgcaatccttctcctacgataatattacaggtgctttattggaaagttctgaaacgggaagtcgttcaacgcaattcaaatattatccctctggcctggctaaatcagagaaaataacagatagtgatataccgatggttgaaatggagcgatcatggtcattaatgggtatgactatgacttacagggatatctccaataatatcgttaatattgcttacgataattatggtcgctatttaactaaaactgacccagatgttacttctaccgtgcgctatgatgatgttggtagactgtattaccaaaaatctacaggctattcagatgaaattattattgagcttggactggatgatttcagccgtgaacatacccggaaaataacttcatcttccggcgaggtaatgaatatcacccagaattattatccaaacaatcagttaaaaaagcgtgtaactgctgttggcttaaatataattcgtactgaaaattttgaatatgacgaatgtaatcgcctgatacattattactgtgaaggttcatctcctgtagtcgatgcgtataataatgctattgcgcaacaagatttcactttagatgattataataatattacctgctgtgttacgacgctagttggaggattgaaagataccgcaatatatgaatttacgaatccagacgatccttgccaacttatcacggtaacgcattcgttacatagccattatccagccagctataagctggagtatgaccataacggacgaatgacaaaagatgaagcgggtcggaccctacattatgatagtactggacgattagtccaggtattgagtgatgatgaggaaagttattatggctatgattcagataataaaattataaagcaaatctctaatcagggtaaaaatactgcgctgtattatctggacgatggaataatcagcgaaatggatacgcattcaaataaacatacacgcttggtttctggcgccatgggaattattggcgttaatgacgacgctaaataa

SEQ ID NO: 375390 - DNA, 243 bp, Salmonella enterica
atgctgctggcgttgatattggcgctgaattccccccagtttgggccagaatgtacagagctatgtaactactgccttgccctgacgcagaccctggcagggcagggattttcctcggaaacggagaaattccttagctggctgttgtatgacctgatcaactacttcgcggcagaaatgaaagccccgcgctggctgcgtaccgccgatggggtgaagtttattgacggggtgacagcatga

SEQ ID NO: 375391 - DNA, 150 bp, Salmonella enterica
atgatgcaacaggactggcatcccgccgacattatcgcggcgctgaaaagcagggaacgtcgttatctgccgtttcccgcaactcaaggctggcgtcctccacgctggcaagcgcccttaatcgccgctggcccaaaggcgaaagattga

SEQ ID NO: 375392 - DNA, 258 bp, Salmonella enterica
atgtataccactcgcctgaaaaaggtcggcggatccgtcatgctggcggttcctcctgctgtgctgaaaacgctggcgctgtcgacggacagcgaagtgggcatgaccattgataatggctgcctgattattgaaccccggaaacggccctgctattcgcttgaggaactgctggagcagtgcgatccaaacgccgaaataagcgaagaggatcgggaatggattgatgcgccagcggtgggcagggagatcctgtaa

SEQ ID NO: 375393 - DNA, 333 bp, Salmonella enterica
atggacagaggggaaatctggcttgtttcgctggatccgattgccggccacgagcaaagcggaaaacgtccggtacttatcgtatcgaaggcatcgtttaacaagctgacccggctacccgttgtcgttcccgtcaccagcggcggaaacttcgcccgcacagccggttttgccgtctcactggacggcgcgggaaccagaacaacgggcgttattcgctgcgaccagcccagaaccattgatatgggcgcccggaacggtaagcggctggaacgtctacccgacgctgtcgtgaatgaagtgctggcccgactggaagccattctgagctga

SEQ ID NO: 375394 - DNA, 216 bp, Salmonella enterica
atggcaatgctggagcgggaaatgcggtacctggcgaaacaggcgggtggcgcgcataaaacggtcagtgaccgcatggcgcaggcgaaacgcttctgtgagcgtctggcggagcagaatgtgcagatccgacatgttaaacacctgaaagcgcggcatattgaggactacatccgacatcggctggcgcagggcatggataaacgcaccctgtaa

SEQ ID NO: 375395 - DNA, 657 bp, Salmonella enterica
atggcgatgataagggttgttctgcggcaggccggacgcgtgaaactggctgacagcgaccggatcagcaaccgggccgtgggtatcagcggcgcatcgcgcaacggtacgcgccgggcaattacggacgggaagtatcaggcggtacaggaaagcgcccgcctgaaagatccggggctggcggcagcgctggagctggcaaggctgatgggcctgcgctcgcaggaggcggtacagagcgcgcagtcgctgaaaacgtggcgacaggcgctggagcgcggtgagtcccggttaaccgtggtgttcggcaccaaaggcgggcggccccgcgaaacgataattctggatgctggcgcagtcagaaaggcgctggataacgcgatcgatattgcagaacagcgcaacggcaggctgattgaccgggccacgctgaaagaggcgatgcagttctggcgcaaacaggcggaacgactcggcttaacgggacagaactcaccgcattcgctgcgttacgcctgggcgcaggatgctattcgctattatctggcgcagggattcagtgaacaggaggcgctggcgatgacggcgatggatctgggccacggcgacggacggtacgtggcgcaggtttacgggcgaagggatgaggctggttga

SEQ ID NO: 375396 - DNA, 2352 bp, Salmonella enterica
ttgctgatattggcgagcaggttgagcgcattggtcagcaatgtcagactgcgtttgctgcagatggccgttgaaactcgggggcgcgttgccccctcgccacctccgccactaccaaaaagcaccggtgataatttcgtcggtgcttatccgtggaataaacccggtaaggccattggccgtgacagaccccttacacgtgccgaactccgtcaggtgcaaggtgttttaaatcggattgatcgcctgccgtttttcctgcaaacgctgtttacctcacgttataacttcatccgccgcacaaagagccctttgggtgggttgtatttcctcaaaaacacgtttgagcgcaagctgctaccgcgtcttgagcgtgttaatgaactgtgcgggatgaatgaatcggcctcgattggttttttgtccgagcgtgaccagtatgcacgtctgccggatatgaatgacaaagagctcaaaaaatttgcggccagaattgcttctcaactctggagcaaatacgaggagttaagcgacgcatgggaggaggcgcacggcgggaaagaaactttattcaccgatgaggcgcaggcgcatttatacggtcaggtggccggtattgctcgcgcttttaacttcaccccgatgtactggaaaaaataccgtaagggtcagatgacgatccgcatggcattttctgctatttcccgtctgataaaagatgagtggtggaacagccagcttaaggcgcagcggatgcgctggcgcgaggcgctgctcatcgcggcgggtgaggtcaacaaagaccgctcaccttacgcaagcaaaatggcgatccgcgatgtgcacgcgcgccgcctggctaatctcgaatacctgaaatcctgcgagctggaaaacaaagtcaccggcgagcgaatcgaccttatcagtaaggtcatgggaagtatttcaaaccctgagattcgtcgcatggagctgatgaacactatcgcagggattgagcgttatgccgctgctgagggtcatgtcggtatgtttatcacactgaccgcgccgtcgaagtatcacccgacccgtcaggtcgggaagggtaaagaaaagaccgtacagcttaatcacggctggaatggagtggcttacaccccgaaggatacgcagcgctacctgtgccgcatctggagcctgatgcgtaccgctttcaaagataacgacttacaggtctacggtatgcgcgttgttgaaccgcatcacgacgggacgccgcactggcacatgatgctgttttgcaaacgccagcagcgcaaagaaatcaccgaaattatgcgtcgttatgctctcaaagaggatggcgacgagcgcggtgcagcccgcaaccgctttcaggctaagcacctgaacaaaggcggcgcggcagggtacatcgcgaaatacatcgcaaaaaatatcgacggttacgcgcttgatggcgagctcgataacgataccggaaagccgctcaaagatactgccgccgctgttactgcatgggcgtcaacgtggcgaatccctcagtttaagccgattggcctgccgacgatgggcgcttaccgtgagctgcgcagactgcctcgcggggtcagtattgctgacgagtttgacgagcgtgtcgaagcggcacgcgcggcggctgatggcggtgatttcgacctgtatatcgctgctcagggtggcgcaaatgtcccgcgcgacggccagactgtcagggttgcccgtagcgtcagtgatgaggtcaacgactatgaggaagatatcgagagagtggtcggtatttatgcgcctcacctcggcgcgcgtcacgttcgcatcacccggtcatcagaatggcgcatcgttccaaaggttctggccgttgagcctttgactttaaaaagcggcatcgccgcgcctcggagtcctgtcaataactgtggaaagctcaccggcggtgatattccaggtatgaccaatacaccgtctgagtatgccgcagcggtgctaaatctcgtcgatgacgggtttatcgcatgggatgacgccgaagtcgtgacggcgctcaggggcgtattaaaacacgacgcgccgcagcaaaatcgccagcaaagaagcggagggccattaaaaccgcatgaccttgcaccatcaggcaggctgactaaatccgaacgcgcacaaataccgcgcatccgctttgaccttgcgcagcatggcatcacgccgaaacgctgggaacttgaggcgttggcgcgtggggcgagcgtgacatacgacgggcagaaattcacatatccggttgctgatgagtggccgggattctcaataagtcaacaatggtga

SEQ ID NO: 375397 - DNA, 321 bp, Salmonella enterica
atggtgattgaaatgagtaaattacaggcattaatcgagtctgaaattagtgatttatttgctggtttcggccagcctggcgagccagaaaatccagtagaaatgcagcagcaattagtggcacggattatgccattgattacgccaatagaggctgaaccggtgtcgttagaggaagtaattgttaagtttcgtgaggggaacgagggattcccggttgagcgtttcagagctgactgggttattagctggatgttggctcatttcccgccagtagccagaagatttgatgatgaacaactcttcattaagaggaactga

SEQ ID NO: 375398 - DNA, 210 bp, Salmonella enterica
atgcatgtaattccaggtgggatacctcaacataaaacgaaaaacattaagttaatggctattgtccatcgtttgcagaagataatggtcaatgagaacctgacgcctgccgagctggtagggtgtgctgaaattgtcagggataattacggcaagctggataatatcagcaggccgacacaatacgcacctccaccacgtcgactatag

SEQ ID NO: 375399 - DNA, 930 bp, Salmonella enterica
atggaaaatgtaacctttgtaagtaatagtcatcagcgtcctgccgcggataacttacagaaattaaaatcacttttgacgaatacccagcagcaaattaaaagccagactcagcagatcaccataaaaaatctttatgtaagcagtttcactttagtttgctttcgtagtggtaaagtgacgattagcaataatcacgatacgatttactgtgaagagcctgggatgttggtactcaaaaaggagcaggtcgttaacgtgacgcttgaagaggtcaatggccacatggatttcgatatactcgagataccgacgcaacgacttggtgatctctatgcgcttatcccaaatgagcagcaaaccaaaatggtgaaacctgtcgagaaagtgcagaagatcttctatacgcctgactttcctgccagaagagaggtatttgaacacctgaaaacagcgttctcctgtactatggatacaaacaaaagttgtaatagctgtaacaaccaaagttgtattgaaaatgaggaattaatcccttattttctgctgttcctgcttaccgctttcctccgactcccggagagttatgagatcatcctaagctcggctcagataacgttaaaggagcgcgtttacaacattatatcctcctcaccaggtaggcagtggaaacttccggatattgccgataatatatttatgagtacatcaacactcaaacgaaaacttgcagaagaaggtaccagctttagtgacatctacttatctgcgagaatgaatcaagcagcaaaacttttacgtataggcaaccataatgtcaattctgtagcattaaaatgtggttatgacagcacgtcctactttattcaatgtttcaaaaaatattttaaaactacgccatcaacgtttattaaaatggcgaatcactaa

SEQ ID NO: 375400 - DNA, 819 bp, Salmonella enterica
atgcgtgtccaccttcacgtccagcggcgtggaataacggatatttcccgcattgtcctccaccttcaccgtcagcgtgtagctcccgtccgtccacgcgctatccggcgtaaagtgccaccggcctccggtctgggtcagctccacctcccggctgctgccgtcatgcgcgatctgtaccgtcacccggcgcacatcaggatcgatattttcgatggtaaagcccggcgatctgtcgctggtgacgttatcacccttgttgccgctgtcatccgcgctgtccagcgtgatgaccggctccgacagggtggtgtcaatggtaaactccagcgtccgcgtcgccgtgttgcccgccgcatccgtcgcctccaccgtcagcgtgtgtttaccctcgcccacgtcgcccggccagctgtattcccagaccccggcggcattcttcgtcgcgttcacccagttcgtatcgccgtccagactcagacgaaccgcattcacatcccccggtgtcgtcacccggaactccgggcgcagggcgctggtcaggttatcgccggaaattccgtggtcgttcaccagctcgatgccatcaatggccgtctgcgtgtccaccgttaccgtcagcggcgcagactggcgaatgttccccgcctcgtcttccacttttaccgtcagcgtgtactgaccgtccgcccagtcacccaccggtgtgaagctccagcgtccgctcgcgctctgcgttgccttcagtacctccctgacgctgccatgctgaacctccaccgtgacataacgcgcatcgttatcaatgttgtccagtaa

SEQ ID NO: 375401 - DNA, 1557 bp, Salmonella enterica
atggtgatggcgacgcaggattatgtcgacgacaggctcgccgaacatgaaaaatcccgtcgtcatcctgatgccactcttaaagaaaaagggtttgctcagctcagtaacgcgacagacagcgagtctgaaacgctcgcagcgacgccgaaagccgtcaaggcagcgtatgaccttgctgacgggaaatatacagctcaggacgccaccacaacgcgtaaaggcattgtgcaactcagcaatgccactgacagtatgtctgagacacttgccgcgacaccgaaagcggtcaaggtggtatatgaccttgctaacgcgaaatatacagctcaggacgccactacagcgcgtaaagggattatccagctcagcaatgccactgacagtacgtctgagacgctggccgcaacgccgaaagcggttaaagcggccatggataatgcgaacgggcgcctggaaaaaaacagcaatggcagcgacattcctgacaaggatttgtttgtacgtcaaatcggtgccgcgcgagcgtttgatggcgcggttactatcggcggtgatgctaacccgtggacaacggcggagtttatcgtctggctggagtctcagggcgcattcaatcacccgtactggatgtgccgaggggcatggtcttacgctttaaataaagtcatcaccgacacgggctgtggcaatatctgtctggctggcgcagtgattgaggtaatgggagtacgtggcgcgctgacgatacgcataaccacacccaccacaacgtcaggtggcggggttgccagcgctcagtttacctatatcaataacggtgatggatatgccccgggctggcgacgagagtttagccgtactggcgacgagatgacaggcaacctctaccttaaaaatgatggccgtgtgaatttctgcattatgaatgaagacggaactccccgcatgtggctcttcaaggataaaggcggcgacggtattcatatcaacaatggtaatgatggcggcggggattacgttttccacaaagacggcagtttttatgcaccattagcagtccgtgcaggtggtagcaaaaagcttgctgttcggtccgataataattcggcactgagtgctcactttaatttatggggcgacgcaaacaggcccacagtgattgaactgggcgatgaccaggggtggcagtattacagtcagcgaaaccctgacggctcagttctgcttacggtcaacggcgatattatggctaaccgtaaactgaatgtgggggctgctaccttttccagcgacggcaatgttaacggttcgctatggggaggttggctgaatgactggattaataacactattatcaatcgtttcgtcaaggatatcaggcttggtggaattgaatatgctcaggcatggaatggccccggattcaatgacacaccaggctatgtaataaccggtgtcattaacggtaatggcgacgaattaatcgatggggtacgccggcgcccattgcaaaagttgattggcggtatctggtataatgttacgagtatttaa

SEQ ID NO: 375402 - DNA, 171 bp, Salmonella enterica
atgcaggaaccgcgttgcattgctcagcttctgcattacgaaagcccgggaatgatggatttcaccatcactcacggcagagggcgcaagggcatcatcatccgtacaaaaaaaccgggcgctataagcgctgtttttacttttctgaaatcccggaggttctggaaatga

SEQ ID NO: 375403 - DNA, 333 bp, Salmonella enterica
atgattgagttgattaaattagttaaaggcacaaacgtaactgactcgtttttgtgctgggaagaattaaagaaacaaaacaaagagcacgtattcaacgtggatgttaattccattattcgtgcattacataatcagtattttaccccatcagaaatgggatatttgttttacctcgcctcaaacccgacaggtcgtgtggcagtgcaaggtgcggtttccctgtctgcgcgtgatatcgacaaaatcataagacgcatttggcgtgaccagatgcgagaacatcgtgagcgtatgcgctcaggttatttcgataatgggattccattctag

SEQ ID NO: 375404 - DNA, 231 bp, Salmonella enterica
atgaatacgctgataagtagacgtttcggaaagacgacaatggcggagttattgcaacaggcaataaacgaggagagagcccacgctgcagcgcgcttttcatctcacctcgacgccttaattcgtcatatcgctgatgctgaattgtcgcgcgttgaaattgttgaattgctcagtcaggaatcagtcaagtttcataatatcggcctgtctcgcggggagtctctttaa

SEQ ID NO: 375405 - DNA, 297 bp, Salmonella enterica
atgtctctgatgcgctccgtattacttaataactggctaaagattgcggttatgaaaaacggtgaattatcgcttgctgacattaagcgcgataaagaaaccggatcgatgacggaatcaaccatcgctatttattcgagtgaattaaacctcctgacggatgtagtcaatttgcttgtgaaacgcgccgtttttcataagcaaatcaccaccgtcgatgaattatcgaaattaaccatcgagctaaccggttactgcaccggtgagtttaaaaaactgaccatagagaggagataa

SEQ ID NO: 375406 - DNA, 225 bp, Salmonella enterica
atgccagattatatggatcgcattcaggagcggcaggcggaatcgctgacccgccagattaacgccgcccgggtaaaaacgtgcggcgctgctgcattgttttgtgttgattgtgaccgtcctataccgcagaagcgtcgcgcggcacatccgacagcgcagcgttgtttttactgccagtcattgctggaagcgaacgcgaaacactatcgggggctggcatga

SEQ ID NO: 375407 - DNA, 489 bp, Salmonella enterica
atggctattccggtttacttatggcttgaagatgatggcggtgcgcctataaagggcagtgttgatgtgaacggcagggagggaagtattgaggtaagtgagctgatgcactccgtagaacagcctaccgatcccctaacgggcaaggctacagcaaaacgcttacatagttcatatgcatttatgaaaagcgttgataactcatccgcctatctatacaaagcgctctcttctggtcagacccttaaaaaggccgtgttcaaattctatcggatcaactacaacggccaagaagaggaatatttcaggactacgttggaaaacgtgaaggtaacggaaattgagccttttatgatggacattaaaaatcctcaatgggaaaggcacgaccatcttgaatatgtagatttggcctacgagaaaatcacatggcactatctggacggtaatattatccactctgattcatggaaaggacgggctgcataa

SEQ ID NO: 375408 - DNA, 363 bp, Salmonella enterica
atggcgtggaaatacgatgtagcaacacacaccttcactcgtaatggtgaaaaatacacagccgattatgcaggtgcaacaggttataagaatgatagctctcaggaatgtgtcagtggtaaaggtccgcttcccagaggcacttatacaatcggatcccctcataactcagcccatacaggtaaatacacgctcaaccttacccccagtctgagtaactctatgtgcggacgttctgccttccgtattcatggtgcaagcaaaaagcatccactggattcatcagaaggttgtatcatcgccccactcagcgtcagaaaaagcatttgggctagcggtgacagggagctaaaggtgaaatga

SEQ ID NO: 375409 - DNA, 579 bp, Salmonella enterica
atgaaatatctcctccttgctctttccgtaacatcttccgttgcgatggctacacaaatggaaggttttggtgccaactactaccaagacgattcatccatccctaactacgacactagcaaaagcttagtgccgaatgtgattattggagataatgtctatacgatggaatttagcagccttatagatatagcaaaaactactggcgtgactgttaatcaaggcaaccaagcatcatggctgtgccttgcttctaaaggtgtcaactactggtttatctctgataatgagatggggcaaggggatctaacatcaattgcaattgccaaggcagatcaacaaggaaactgctctccttacaagggtgatttgagcattacgattaagggaactcctttgctggatgcttcatttgaaaacatctcgtcaatcttcctgaacaaaccaaatggcaatacagtccagtattgcactaacaccaaaaactatggcgactttactcaaatgaactgcctccagtatttttttaaaaacaaaagcattaaaggtgtgattattaatcagattacatccaactaa

SEQ ID NO: 375410 - DNA, 714 bp, Salmonella enterica
atggataaggtgccgccgttcgccagtcagcgatcagtatggcattttcatccgcttgagtttccggaaatattacgaagtgcagagtttcccaagactcctgttaatggggagttaactcctatagaatttattcacttctataatggagataaaattgatgatactgattatgaagaggctgcaaaagaattaggatgcgaagttgcagcaattaaagctgtagcaaaaactgaaaatggtccttatggctcctattttaaatttgaagataacgatgattatgttcctgcgatattatttgaaaggcatcactttcataaatatacaaatgggaagtatgatcagttcgaagatatatcaaatcctgttgcgggtggatatggtgcaacatcaatacagtatgcaaagctaatcaaagcgtatgctttagacaagaaagcagctttaaagtcagcatcttggggtaagtttcagattttggcgtcgaactacgccacatcaggctacgctagccctgaggatttcgtttttgcattaagtaagtctgagaaaaatcagttgaaagcattcgttagcttcattaaggctgatagagttttattgcgctccattcggactaaagattggctttcatttgctcaaagatataacggaccaaggcagaagggatatgatttgaaaatggagagaaattacaatgcatcattataa

SEQ ID NO: 375411 - DNA, 447 bp, Salmonella enterica
atgcatcattataagttttttgcgttggctgcaatgcttttgtgtggttcatcgtttgcgagtgatgaatatttcatgtgcaacactgcaaaaggaacaatcaaactagatgaaaacaaaggcgtgcttcggtacaccttatcgaaagaccgcaaaactgcatttaattatgaatcgaaaggtaatgattattcaggatttaaatacaatcattactcacgatttcaaaccgattatttcagtgtatcgtttgtaaatgcagagtataagtacacgatatttagtaattatgagggtgagagtgaaagccgtggagttagtgttacgaacctgaatagcaaaaaggaatctgtttacgattgtaagtccgttagcattgatcgtcttagtgatttgtcggcaaaactggcttgtgataaagattctgctttggggtgtgaagaatga

SEQ ID NO: 375412 - DNA, 303 bp, Salmonella enterica
gtgctgctgcattttccggaaaaaaatagtcagcttgcaagtattaatcaaaaaagctcaggggaagtaaaatcggcattagagaatttgaacaaatctgttgatgcacaaatcaataacaacccagatcgtaagccatttattctggagcttaaaaaatcatggggagagatgattgataaaaaatgccaactggaaacggttgattcgaaaggaactgatgcagagacggccgaagtgagcaactgtcttataaaaagttaccaggaagaaaggaagtatttcgatacgatgctgccgtaa

SEQ ID NO: 375413 - DNA, 1029 bp, Salmonella enterica
gtggcattcagtggcgggattaatattggtggtgacagtggaagctggactacggcggaatttatcacctggctggagtcgcagggcgcgttcaaccatccctactggatgtgtaaggggtcgtgggcctatgccagtaacaaaatcatcactgacacggggtgcgggagtatctgtctggcgggcgctgtggtggaggttctggggactggcggtgcgattaccattcgggtgacaacacccaccacaacctcaggtggtggtgtacccagcgctcagttcatctatatcaatcacggcgatggatatgctccgggatggcgacgagattttagccgtactggcgacgggatgaccggcaacctctaccttaaaaatgagggtcgtataaatcttgctattgtggatgaagccgaaacgccccgcatgttgctcttcaaggataaaggcggcgacggtgttcatattaacaatggtaatgatggcggcggggatttcgttttcggtaaagaaggcagtttttatgcaccattagcagtccgtgcaggtggtagcaaaatgctttctgttcgttccgataataattcggcactgagtgctcactttaatttatgggggggcggaaatcgccctacggttattgaactggatgacgagcagggatggcacctgtatagccagcgaaatccggatgggactatttcattcactgttaacggtattgtctactgcacagcgttaaatgtaggcggcgctatttatcagaataacggcgacatctacggttctgtctggggaaatagctggctgagtacgtggattcacaacaatgtagtaagaggggtcagacttggccccgtggcgctttctggcggtctgtggcgtgattttcaactcggcggcggacaggtggtgacgggcttccatactgacggtaaatgggaaatggaaggtggtgatgacaaggtctattaccgtcccgttcagtatctggttggtgatacgtgggtaacggccccaagtgtataa

SEQ ID NO: 375414 - DNA, 336 bp, Salmonella enterica
atggcgcagcggctgaccgcagtccgggcaggcgcaggagtcaggtccgataacggtttcttcgcgcacaaggtgttccggcaggattttgcggaccggacgcgctttcttttcttccggctccggcagcaggcgcgcaagctgcgtttcggcagaagcgatatcggcgtcggcatcctcttcgaacagggagcattgcaggccgctgaaggattcagcctggcggccaaagcgctgctgtcgtgcgagcatcagggcttctctcatcaggtgtatctgatggtctttttcactcagggaagcgtcttttttacggttctcttccaggagggataa

SEQ ID NO: 375415 - DNA, 336 bp, Salmonella enterica
atgctgaagcctgagcagctcttcctcgtccgccatcccgtcgatatgcgctgtggtattgatgtcctcactatgtatgtgcagaattcactcagcatgccctggcatgacggcgcagccttcctcttcaccaataaaaaccgcacccgcattaaattgctgaggtgggacaggcacggcgtctggctctgcgcccgccgtctgcaccgggggcgctttatctggccgcgtgacggcgacagcacatggtcgctcacgccggaacagtttgactggctcgtctccggcatcgactggcagaaaatgtccggtcacgacctgacaaaatggacatga

SEQ ID NO: 375416 - DNA, 315 bp, Salmonella enterica
atgaccactcaccacaccaccacgcaaaaagctcagcatgtccgggactggcgcgccagcggccttacccgccttcagtattgtcgcctccacggcctttcctctcatgcttttcacaagtggcttcgcctgccctatgacggcgtctctgtcactgataacccggtgctgctgcccgtctgtatcctgccgtcacctgaacctgcgccacccgacagcctcatcaccctgcacctccccggcggctaccgtatcgactgccttcccgcacagcttcctgacgttctccgggcggtgaaacatgctgaagcctga

SEQ ID NO: 375417 - DNA, 1122 bp, Salmonella enterica
gtggaaaaatctactgatgtatgtgggtacattcaggatgttatacgtattggtatggaagctgctcctgttgcagaagcgaagtttacagaaagggcgtccaacgcaaagtatacgggtctccgatttcttgaaaataaaatagaaagaggtgtaatacgatcgccgattcagaaggggagtaattataaagttatagagtcaatagagaatattgattttatttatcaaaaaagcactaataaaattctcgagctaaatcccgagggaaacgatggactctatcgtgctacagggtttaataaagaaacgcatggttattataaacagtcaggagaaggattttacagaaagcagaaatcattttcaccgttgtcaacggaagcacctaatacgataaaatatggcgagagggaaatcgttttatctaaagagcctggttcagaaacgtatcagggaaccttttctgataccggaaaaaatgtaggtatgacattttatagaacttctgacggtaaattttaccaggcctctgggctgaaagggggagggcctattcggcatgttgacaagccttattcagagttaagagaaggcgacgttgggtatgatgaggatcttctggatatttccgatgattcaccactactggaggacatgctgccttctctgtcagaagaattatatcctacatcagaagaaaatgtgcaaagtatatataaaaaactccagagtggtgatactgcagcaggcgagactgaagttgtattatgcagggggacaactggtccgcaggctgaaaatattgttaagcttaaaacagcaggaggtgtggagggcgccgatccgaatgtattgcctgtctctgaagaaacagccaggctgcaggttcggaatggaagagtggtacctgaatatacaacagatcttagtgttgcagacaggtttagcagggagcattatcttattatcgttaaggtaaaagccaaatatattacacgaggtagtgtaagtgaaagcggctgggttatgccacatactgcaccagtggaacctgttggcataattgaccggacgtatggtcatgcagaaaatatcggacaggcaaacgcttctaagtaa

SEQ ID NO: 375418 - DNA, 378 bp, Salmonella enterica
atgaacattgttagtcatgttgtcaccaacgataccggtgtcattgaccagtacaatgctgttaataacagtctgagtatccaccgtcaccgtcagcggcgaggattggctcatatttcctgccttatcctcaacttttaccgtcagagtgtagttgccatccgtccagtcactgtctggtgtaaagtgccaccggccgctaacctgtgtcagcgtcaactcctcactcttaccgttgtgtgtaaccaccaccattacctgacttgcatccgcgtcgatgccattaatcgtaaaaccaggcgttttttcgttggtgatattgtcgccaggcacaccgctgtcatccacagtatccagcctgatagtcggtgtcgatag

SEQ ID NO: 375419 - DNA, 327 bp, Salmonella enterica
gtgaacgccgaacacgccgttatcgacccgaaaaaactcgcggcttatgctttagattcaacacatcctacaggggggcacaaagccagggtgtttgagtcagcactgggatacaacccaactaatgcagatgttttagcagcaagaattcaggaaggcgtattatcggccccagcaaaagtgttgcaggcaaataattatggtcaaacaatggctgtcgatatgcccattttaggcgtcaacggtgaaacagcgattgtgcgtacaggctggatgtatgaaacagacgcattagttcctcgcctgacaaccatattcgttaaatga

SEQ ID NO: 375420 - DNA, 687 bp, Salmonella enterica
atgaaaagagccgaattagatgttgtggttttaggcgaggatttaccgaatgaaggattggtaaaagggacggttggtacgattgttatggttttcgataccccgacactgggctatcttgtcgagttttgcgacgaggaaggaagaacaatagcaatgcctgctttgctacctgctcagctaaagagttatttcactccaggcatcctcaaaacactgctggttgacaataattacccggtagccaacccagtagatccagatgtaatggccgacttgatgcgcaaagcagcccctgctgagtgggatgctcagaagagaaaggtttttgaggatatccagcgcctgatgattcaccggctggactactctgatatgtttgaaatcatggatgggcttgagtacaacggcttgactctgtacagcttggtgcaggcggagaatgatgagccagtatggtcgaatatctacatccgcaactttgaaacacgcgacaacgatatctatgtcgatccgaacctctctgacaaggtactgattggtgaagatggcatgtccgtgtttgcctacagtttcaatgatgactgttttgagatccgcgataaagcatcaacggattatgtcattgagtcacatacgaacttcagcgaattgttgtccgcgttgattgatacggtgaagttttag

SEQ ID NO: 375421 - DNA, 675 bp, Salmonella enterica
atgctctgttgtgaaagatgtattgtacttactcatgaggataaaaaagcttggcttagaaaaaaaatctgtaatagtagcaaaattaaagtaatatataatccatctagctatcctattttagttaataaaaaaaaacgatctgagcaaatagtccttgctgttggacgactgacaaagcaaaaaggtttcgatctattactaagagcgtggggggggataactaaaaaagagggctggcgcttaaagatagtcggcgggggagaagaactgaacagcttaaaagaattagctgagcagttaaatatacatgattcagttattttcgaatcaccaacttcagaaattgtttcacactacaaaaatgctgatattttttgcctatcttcacgttttgaaggtattggcttagttttattagaggcacaatcttttggattaccctcactttcttttaattgcgattatggaccggctgaaatattaaataataataatggatatttaattccatgttttgatatagctcagtactctgaaaagttaagtgagttaatgcaggataataaacttcgatcaaaaatgtcatgtaatgctaaagtccaagctaaattatttactgtagagagatttacagatagctggttatgcgtactggatgagattttactatga

SEQ ID NO: 375422 - DNA, 807 bp, Salmonella enterica
atgacggaacatcagaccagcgagcgacgcgggtgccgaattattggtattagccgaagccttttgcattatcgcccgaatgccgaacgggatattccggtgatcgaggcgctacaggatctggcgcatcactatccggcctatggatttggcttgatgttcaacaagctgcatcaggcagggttatcgtggaataagaaacgcgtttaccggatatattgtcggttaaaactaaacctcagacgcaatggtaaaaaacgcttgcccaaccggaacccgcagcctttggcggtccccattaacatgaatccctgttggtcagtagattttatgagtgacgcgctgatggatggaaggcggttcagattgtttaacgtagccgatgattttaatcgggaagcgctggcagtcgaagtggacttaaatatcccggcgcatcgcgtagtgcgcgttttggagcggctcagcgccgaaagaggctatccggcgtttatccgaagtgataatggaccggaacttaccgccgccgtcctgtcggagtgggccgagcagcatggagtcatactggattttattcaaccgggaaagccaatgcagaacggatttaacgaacggttcaataagacattacgaacagaaatactcgatatgtatctgttccgaacgctgtctgaagtccgagagttaacagaaaaccggcgaacggaatataacgaggaacgcccgcatagctcacctggcggcataccgccggttacctatgcaaggcaaaaactggccggagactctaactggcagtggtactaa

SEQ ID NO: 375423 - DNA, 267 bp, Salmonella enterica
atgaagaaaatacgtttcaccgaatcccagatcctgagagtcctgaaagaagttgaaggcggtcgacatgtgaaggaggtttgtcgtgagaatggtgtttccgaagccagctacgataactggaaatccaaatatggcggcatggagtccccggatatcaaacgcatgaaagagctggaagaagaaaaccggcgattgaagcaaatgtacgcgtctttgagcctggatcatgaaattcttaaggatgtcgtcgcaaaaaaactttaa

SEQ ID NO: 375424 - DNA, 891 bp, Salmonella enterica
atggacggcgcgatcctggttgttgctgcgactgacggcccgatgccgcagacccgtgagcacatcctgctgggtcgtcaggtaggcgttccgtacatcatcgtgttcctgaacaaatgcgacatggttgatgacgaagagctgctggaactggttgaaatggaagttcgtgaacttctgtctcagtacgacttcccgggcgacgatacgccgatcgttcgtggttctgctctgaaagcgctggaaggcgatgcagagtgggaagcgaaaatcatcgaactggctggcttcctggactcttacatcccggaaccagagcgtgcgattgacaagccgttcctgctgccgatcgaagacgtattctccatctccggtcgtggtaccgttgttaccggtcgtgtagaacgcggtatcatcaaagtgggcgaagaagttgaaatcgttggtatcaaagagactcagaagtctacctgtactggcgttgaaatgttccgcaaactgctggacgaaggccgtgccggtgagaacgtaggtgttctgctgcgtggtatcaaacgtgaagaaatcgaacgtggtcaggtactggctaagccgggcaccatcaagccgcacaccaagttcgaatctgaagtgtatattctgtccaaagatgaaggcggccgtcatactccgttcttcaaaggctaccgtccgcagttctacttccgtactactgacgtgactggcaccatcgaactgccggaaggcgtggagatggtaatgccgggcgacaacatcaaaatggttgttaccctgatccacccgatcgcgatggacgacggtctgcgtttcgcaatccgtgaaggcggccgtaccgttggcgcgggcgttgttgctaaagttctcggctaa

SEQ ID NO: 375425 - DNA, 1032 bp, Salmonella enterica
atgccgatcatagcaccaattccccgtgacgaacgacgcctgatgcagaaagcaatccataaaacgcacgataaaaattatgcccgcaggctgacggccatgctgatgctgcatcggggcgaccgcgtcagcgatgttgccagaacgctctgctgtgcccgttcctctgtcggacgctggattaactggttcacgctgtcgggtgttgcaggactgaaatcattacctgccggacgaacccgtcgctggccttttgagcatatctgcacgttattacgtgagctggtaaaacatgctcccggtgattttggctaccagcgctcacgctggagtacagaacttctggcaataaaaatcaatgagataaccggctgccagttacatgccggaaccgttcgccgctggttgccgtctgcggggcttgtgtggcgaagggccgcgccaaccctgcgtatccgtgacccgcataaagatgaaaagatggcggcaatccacaaagcactggacgaatgcagcgcagagcatccggtattttatgaagatgaggtggatatccatcttaatcccaaaattggtgcggactggcagctacgcggacagcaaaaacgcgtggtgacgccgggacagaatgaaaaatattatctggccggagcgctgcacagcgggacaggtaaagtcagctatgtggggggcaacagcaaaagttcggcgctattcatcagcctgctgaagcggcttaaagcgacgtaccgtcgggcgaaaactatcacgctgatcgtggacaactacattatccacaaaagccgggaaacacagcgctggctgaaggagaacccgaagttcagggtcatttatcagccggtttactcgccatgggtgaatcatgtggaacggctatggcaggcactccacgacacaataacgcgcaatcatcagtgccgctcaatgtggcaactgttgaaaaaagttcgccattttatggaaaccgtcagcccattccccggaggcaaacatgggctggcaaaagtgtag

SEQ ID NO: 375426 - DNA, 567 bp, Salmonella enterica
atggcgatggcctgctggattgcggtgctggcggtggccgaagccgtacagcgcgtctcccgcggcaccagaacctccttcagctactgggggatggtggcggcgcacctcgggctggcggtgacgattaccggcatcgccttcagccagaattacagcattgagcgcgatgtgcggatgagggcgggcgacagcgtgaccattcacgactaccggttcaccttccgggaggtgcgggacatcaccgggcccaactaccgcggcggggtggccatcatcggggtgacgcgtgacggggcgccggaggcggtgctgcatgcggagaaacggctctacaacaccagccggatggtgatgaccgaggcggcgattgacggcgggctgacccgcgacctgtacgccgcgctcggggaggagctggacaacggcgcgtgggccgtgcgcctgtactacaaaccgtttgtccgctggatatgggccggggggctgctgatggcgctgggcgggctgctgtgcctggcggacccgcgctaccgccgccgtaaaccattgccggaggccggatga

SEQ ID NO: 375427 - DNA, 741 bp, Salmonella enterica
ttgctgcaggaaaacgcctaccgtgaggttatctggcgtcagcgtgtcaatgaagctgcacgcgcagtgatgctggcttatgccatagacagtgacctcgataatatcggggcgaatttcaatgttgagcgtcttgtcgtcacacctgctgatgacaccaccattccacccaccccggcagaaatggaactcgatgccgattatcgtctgcgtatacaacaggcttttgaagggctgagcgtggcggggtctgtcgggtcgtaccagtatcatggccgtagtgctgacgggcgcgtcggcgatatttcagttatcagcccgtcgccagcctgtgtgacgatttccgtgttgtcacgtgaaaacaacggcgtcgcatctgaggagctgctcgcaattgtgcgcaatgccctgaacgcagaagatgtcaggccggtcgctgaccgggtgacggtacagtcagccgaaattgttaactaccagattaacgccacgctttatctttatcccggcccggaaagtgaacccattagggcggcggctgaggcaaagctgaaagcctatatcagtgcgcagcaccgcctcgggcgcgatatccgtaaatcagcgatttatgccgccctgcatgttgagggtgttcagcgggtggagctggcggcaccggtcgcggatattgttctcgataacacacaggcgtccttttgcactgcctacagccttgtaatcgggggctctgatgaatga

SEQ ID NO: 375428 - DNA, 273 bp, Salmonella enterica
atgcgcgacattctgctgacgccggtcggctcgcgggtaatgcgccgtgaatatggctcgctcctgtctgcgttgattgatatgccgcaaaacccggcgctcaggctgcaaatcatggtggtgtgctattccgcgatccagaaatgggaaccacgcatcaggcttacctcaatcagctttgagcgcggcgacactggcgaaatgtatgtcgatattaccgggatgcgtaccgataccggtgcgtcagtttcaaccactgtttcactgagttaa

SEQ ID NO: 375429 - DNA, 276 bp, Salmonella enterica
gtggatgtcattggtcatattatcgccaacgacgccactgtcattaaccagttcgatcttattgatcgtgatgtcggtatcgactgtgaccgacagtggcgcagaatagcgaatattacccgcctcatcttccactttcactgtcagtgtatagcgaccatcaccccagacgttgtccggcgtgaaatgccagcggccatccgtgcctcgggttgccgtcaatacctccttgatgctgccatgctggatttctaccgtgacgaagcgcgcatctga

SEQ ID NO: 375430 - DNA, 276 bp, Salmonella enterica
atgggcacaacggcaaaaattactgtgaattcacctggctataaaaaaacactctcaggtgaaattacgaggataagtgctgattcgttctcagatgatgaaaaaaatggtgctgaacgttattacaaagttgaaataaagccagatgataaaatcatagtccctcctgagttagagggtgtccaggttaatgtatatgcgctaagtaagaaagtgactctgttaaattacattacagcgttagtcggcgataatattgtatttaatgtatggtaa

SEQ ID NO: 375431 - DNA, 273 bp, Salmonella enterica
atgcagtataagaataagttaaagcatattaatataaaaaatggcatcctcttactcgctgaaaagtttaatttaacgttgagcgaaaaaaaggttatttattatatcgcagcagggttatcggtaaaaagctgttcaaacttattagatcgaaacatcaagaccatttcaacccaaaaaagatcagcttatagaaaaatggctatcactactgatgtggaactaattcatttaatgttaactgagttttctatttcaatagagataacttga

SEQ ID NO: 375432 - DNA, 150 bp, Salmonella enterica
atgaagagcgctaccgtaatcgcgtactcgacgggcttaaacgaagggcaaaatcactgggttactctctccagcaagatcctgagttatgcgtgtgaaccgggagtttctcaggaaggcacggcgtacttcgcaaagctgtccgactga

SEQ ID NO: 375433 - DNA, 189 bp, Salmonella enterica
atgcagggcgacaccctcgacgtgatttgcgccaggtattacgggcgcactgagggcgttgttgaaacggtgctgcaggctaatcccggcctgtctgagctgggtgtcattctgccgcatggcacggcaattgacctgcccgacgtgccgtcttcaccagtaactaacactatcaatctttgggagtaa

SEQ ID NO: 375434 - DNA, 297 bp, Salmonella enterica
atgacagaaggggaaaaaggcgtcctgtcactgtttgtgattggggcaatgattgtggtcggaaaagtgctggcaggtggtgagcccatcaccccgcgcctgtttgtcggacgcatgctgctcggcggttttgtctcaatggtcgccggtgttgttctggtgcagtttcctgatatgtcactgcccgccgtgtgcggtattggatccatgctcggtattgccggttatcaggtggtggaaatcgccattcagcgccgctttaagtcacagaagggggaaggcgatgccggtcattaa

SEQ ID NO: 375435 - DNA, 198 bp, Salmonella enterica
atgcgcgaaagggtggtcgctgtaatcggtgaaaatctctggcctgccatcaaggccggtaacaatgacgtcgtagccacggtttttcgtcagcggatggttcgccgttccttcggaatacgccagcatgtccagaaaggcggcgatattctggtgagtattaatgaccggcatcgccttcccccttctgtgacttaa

SEQ ID NO: 375436 - DNA, 255 bp, Salmonella enterica
atgacgtcaagtcatcatggcccttacgaccagggctacacacgtgctacaatggcgcatacaaagagaagcgacctcgcgagagcaagcggacctcataaagtgcgtcgtagtccggactggagtctgcaactcgactccatgaagtcggaatcgctagtaatcgtggatcagaatgccacggtgaatacgttcccgggccttgtacacaccgcccgtcacaccatgggagtgggttgcaaaagaagtaggtag

SEQ ID NO: 375437 - DNA, 519 bp, Salmonella enterica
atggcactaccccgtaaactcaaatatctgaatatgttcaatgacggcctcagctacatgggcgttgttgaatccgtgacgctgccgaagctgacccgcaagctcgaaaactatcgcggcggcggtatgaatggcgctgcagcgattgacctcggcctcgacgatgatgcgctcaccgtcgaatggtctgtcggtggcctgcctgatgtggcgctgtgggcgcagtatgccgcgccgggcgctgatgctgtgccgctgcgttttgctggttcttaccagcgcgacgacaccggcgaaatcgtggcggtcgaggtggtcatgcgtggccgtcataaagaaatcgacggcggcgagaataagcagggtgaaaacacctcgaccaaactgtcgactgtctgcacctactaccgcctcacgattgatggcagcgacgtcatcgaaatcgacaccgtcaacatggtcgagaaggtgaacggcgtcgaccgtctggagcagcaccgccgcgcaatcgggctgtaa

SEQ ID NO: 375438 - DNA, 414 bp, Salmonella enterica
atgaaagtcctgataacgctgcttgtgctggccgtgctcggtctgatgtggttgcgtcatgagaacggcaatttatcccgctcctttgagacggcaaaccgcgttgcgagcgagcaaaaggcgacgattggcatgctgaaaaatcagcttagtgtcgccggccagctcgcccgacgcaatgaatccgcgcaagtggcactgcgcgaacagctcgcaaaggcaggcgcagaagcaaaccgccgcgagcagatgataacgaggttacttgatgaaaatgaagcctttcgccgctggtataacgctcccctgcctgatgctgtgcgcaggctgcacatccgccccgcctgcgccagcgccggtgattgtggtcaacggatgcccgagggtgagcctttgcccgatgccgggaagtga

SEQ ID NO: 375439 - DNA, 660 bp, Salmonella enterica
atggcaaccgaggcaacatcaagctgccaggaccgggtcacacttgctctgcaccatatgaagaatgtacagctggtacataatgcagaaaaaggagtatacgataacaatctcccggggctggtttccacggggcgtgagatgttccgtatggaaatgctggaacggattgcccgggaaaaggccagaacgctggctttcgttgatgaaattgaggtttatctggcgtatcagaataagctgaagaaaccactcgggctgaccagcgtgacggcaaaaatgcgtttctttggcgtatccggcgtgacggcttcagaccttcggagcgctgagcgtcaggtgaaagccgccgaaaacagcgagttcagtgagtggatactgcagtggggcccgttgcaccgcgtgctggaacgcaaagagccggaacgctttaacgcgcttcgtgaaaagcaaatgtcggactatgaggacacgtaccagatgctgtctgacacagagctgaaaccgtccgggctggtcggtaataccgatgcagattgcactatcggagtaagggcgatggagagtgcgaaaaaggaatttctgaacggcctgcgccctcttgtggaggagatgctgggtagctatctgaaagtgaaagcccggcggcgtcttaactga

SEQ ID NO: 375440 - DNA, 468 bp, Salmonella enterica
gtgtcagataatctgtttaacgggcggcgttttcgggcgctgactgtagtggataattttagtcgggaatgtctggcgatccatgccggaaaatcgttaaaaggcgaggatgtggtcagaataatggaggcactgcgggtgctggataagcggctgccggtacgtatccagacggataacggcagcgagtttatctcaaaaagtctggataaatgggcgtatgaacacggcgtcacaatggacttctcgcgccccggaaagccgacagataacccgtttattgaatcatttaacggcagtctgcgggatgaatgcctgaacattcactggttcctgtcactggaagatgcgcaggaaaaactcgacaactggcgcagggaatacaatcatgagagaacgcattcatcattaaatgacatgactccggctgaatttatccgaagtctccggaaagacgaagatctctga

SEQ ID NO: 375441 - DNA, 351 bp, Salmonella enterica
atgcgtaactcgaaagggctcggcaactttaaaaacctgtttttctatgctcccggcggaaaaccggacggcatcaaaatcgtgccactgagcgaggtcgccacaaaggatgactttttcaacatcaaaaaagccagcgccgccgacctgatggatgcgcaccgcgtaccgttccagcttatgggcggtaagcccgagaacatcggctcaatgggtgatgttgagaaggtggcaaaggtctttgtgcgtaacgagttatcgcccttacaggacaggttcagggaagtaaacgactggctcggcatggaggtcatcaggttcaaagagtacacccttgacaacccagaataa

SEQ ID NO: 375442 - DNA, 192 bp, Salmonella enterica
atgcataattccctttcatcaatagacccgtttgccgattgggcaaaaaagctgactgtaatggctttaaataacgacctcagttctcgcgaggttgaaagctacaccgcaaaaatggtcgagcaggccagtaaagatgagcttacggtcgttataaaacacctgttaaaccacatcagaatgcacaaataa

SEQ ID NO: 375443 - DNA, 312 bp, Salmonella enterica
gtggctctgtgggcgcagtacgccgccccgggtgctgatgctgcgccgctgcgttttgctggttcttaccagcgcgacgacaccggcgaaatcgtggcggtcgaggtggtcatgcgtggccgtcataaagaaatcgacggcggcgagaataagcagggtgaaaacacctcgaccaaactgtcgactgtctgcacctactaccgcctcacgattgatggcagcgacgtcatcgaaatcgacaccgtcaacatggtcgagaaggtgaacggcgtcgaccgtctggagcaacaccgccgcgcaatcgggctgtaa

SEQ ID NO: 375444 - DNA, 372 bp, Salmonella enterica
gtgaccattcacgactaccgcttcaccttccgggaggtgcgggacatcaccgggcccaactaccgcggcggggtggccctcatcggggtgacgcgccacggcgagccggaggcggtgctgcacgcggagaaacggctctacaacaccagccggatggtgatgaccgaggcggcgattgacggcggactgacccgcgacctgtacgccgcgctcggggaggagctggacaacggcacgtgggccgtgcgcctgtactacaaaccgtttgtccgctggatatgggccggggggctgctgatggcgctgggcgggctgctgtgcctggcggacccgcgctaccgccgccgtaaaccattgccggaggccggatga

SEQ ID NO: 375445 - DNA, 255 bp, Salmonella enterica; identical to SEQ ID NO: 375436

SEQ ID NO: 375446 - DNA, 339 bp, Salmonella enterica
gtggtgttccccgacggcgctgttatggagtatgagccggaaaccggtgcgctgacggtcagcggcatcaagactgccgatgtgacggcatcggagtccattaccgccaccgtgccggtggtactggtaaaagcggcagaacgtatcaccctcgacaccccggaggtggtatgcaccaacaaactgacgacggcgacgcttgaggtgcagaaaggcggcgccatgcggggaaacatcgaacataccggtggcacgttgaaatcaaacggcgtgcaggtcgataaccacggtcacggcggcgtacaacggggcgggaactggacggagggcacaaaatga

SEQ ID NO: 375447 - DNA, 339 bp, Salmonella enterica
gtggtgttccctgatggcgcggttatggagtatgagccggaaaccggtgcgctgacagtcagcggcatcaaaactgccgacgtgacggcatcggagtccatcaccgccaccgcgccggtggtgctggttaaagcggcagagcgtatcaccctcgacaccccggaggtggtctgcaccaacaaactaacgacggcgacgcttgaggtgcagaaaggcggcaccatgcgaggaaacatcgaacataccggcggcacgttgaaatcaaacggtgtgcaggttgatgaccacggtcacggtggcgtgcaacggggcgggagctggacggaggacaccaaatga

SEQ ID NO: 375448 - DNA, 960 bp, Salmonella enterica
atgaaaagcacaaaacgtacccctagtcttcaaagtcccccaaagatttatcccctgaatcaatcgcctctattcaagcttaaaaataaaagaaaatcacttgaaatcatagggctatccaagaaacaagcagacaagctaatgcttgactcagcgtacaaagaatttgtaaataatgccggaaggacaatacaggaaccaattgctcagctcaaagcggttcataggaaaatcggcgttttattgagcagaatcgaactacctccatatcttcactctggtcggaagaagcattcaacacttactaatgtagaatcacataagctagcaactgaacttctgaaactcgacattcataagtttttcccctcgactagggctgcaaaggtctacaaggcatttgtagaaaaatttgagatgtcacctgatgtagcttatatcatgaccaatctctcaacctttgcaggaaaagtgcccacaggcagtccgataagcatggctatggcgttttgggccaataaagacatgttcgacgagcttagcaaccttgcggcctcaaacagcttagtatttacggcatatgttgacgatgtggcgttctctggttcgaaaatcccaaaaggatttgccgcccaagctaaaaaatgtattcgttcccatggactcacctctaaagacaaaaaagagcgattttatccgtcatcagagggaaagctgcttacggggatagtcattcaggatggggaacttaaggtacgttgggcacataacgattcaataggaaaagaattcgctactttggctgaagcaaaagacaacgctacaaaaataatccatctagaaaagctagcaggtaaactgcatgcagccggtcaagttgacttcagacaaaaagatagagctcgtttttttacacagcagctcaaagccacaaaaaagcgctcagaacaaggtacttaa

SEQ ID NO: 375449 - DNA, 840 bp, Salmonella enterica
atgttgtatcacgttgttattgaaaagaaaccagtaaaaactggcaaagatggtgctgaagaaaacaaaacagatctcaccaaagagcagctgattgctcgcttcatagaaccttacgagctaggcaacccaattacagtaaacggcacgactattcaaacatcagaaatcaacagattaactgttaaggctactgaagccagcattgaatctttcatacctgcgatagaagcagaagatcgaaattcaagtgtgattatgtttggcggaccgtcttacctagaacgtgcgatatatcgagctcctgatgtaactgatgaattcatcactggtcccgctggcagcaaaaaaccgatcgcatcaaaaaaaccaaataaatcaacaacaaatacaaagtctgacaaagttttcattgttcacgggcatgatgatgcagcgaagatcaagactgctcgttttgtagaacaattggattacaaagctattattctgcatgaacaagcaagctctggtagaaccataatagagaaaatcgagcagtttactgatgtgggatttgctgttgtgctatacacgccggacgatataggcaatgccaaagacaatgcagacgacctacagttaagagcccgtcaaaacgttgttttcgaacatggttttttgataggtaagttaggaagagatcgtgtagtagctttggttgatggagcaatagaacttccgaatgatattagtggggtcgtctacataaaaatggacgaggcaaacgcatggcatcttcagttagccaaagaaatgaaacaagctggttttaacattgatatgaacaagcttgtgtaa

SEQ ID NO: 375450 - DNA, 1557 bp, Salmonella enterica
atggacaatttttcacttttaacaacgccctggctccccgtccgtttcaaagatggctcgacgggtaagttggcccccgtcgatctggcggatgaaaatgtggtggacatcgccgcaacgcgagcagatttgcagggagcggcctggcagtttctactgggattgctgcaatgcagtatcgcgccgaaaagatacaaaaactgggaggatatctggtttgatggattgcatgccgatgcgctccataaggcattagcacagttagaacacgcttttcagtttggcgcggaaacgccgtcttttatgcaggattttgaaccgttaaccggcgaaaaagtctctatggcctcgttgctgccagaaacgcccggcgcacaaaccacgaagttcaataaagatcattttatcaaacgcggcgtaaccgaacgtttttgtccgcactgcgcggcgctggcgctgttctcgttgcagcttaacgcgccctccggcggtaaaggctatcgtaccgggctgcgcggcggcgggccactgaccacgctggttgaattgcaggaatatcagggcgagcggcaaacgccgctctggcgcaagctgtggctcaacgtgatgccgcaggatactgcggatctgcctttaccagaccagtgtgatgcgaccgttttcccgtggcttgccgcgacgcggaccagcgagcaggcgaatgccgttaccacgccggagcaggtcaataaactccaggcgtactgggggatgccgcgtcgtatccgcctggattttgccaccttacagtcaggttgctgcgatatttgcggcgctgaaagcgatgagcttcttggctttatgaccgtcaagaactacggcgttaactacgatggctggcggcacccgctgacgccttatcgcgccccggtaaaagatcaaaacgccttcttttccgttaaaccgcagcccggcggccttatctggcgcgactggctgggattaagtcagaacaaccagacggaagcgaattacgaatctcccgcgcaggtagtcaaggtgtttaacgcccgctcgctgactgacgttaaagcggggatctggggctttggcgcggatttcgacaatatgaaaatccgctgctggtatgagcatcacttcccgttgctgatgacggaaggtctgatccctgatttacgtaaggccgtgcaaactgcggcccgcctgttgagcctgcttcgcagcgcgctcaaagaggcctggtttgccgatgcgaagggtgctcgcggtgatttcagttttatcgacattgatttctggaacctgacgcagggacgttttctcaacctgattcacgatctggaaaacggccacaagccggacgaaaggctgaataaatggcaaagagaactttggctgtttacccgtcattacttcgatgatcacgtctttaccaacccctacgagagcagcgatctggaacgcatcatgaccgcgcgcaagaaatattttacgacatcggcggaaaaacaaagcgcaaaagccgccaaagcaaagaaacaggaggctgctgaatga

SEQ ID NO: 375451 - DNA, 2646 bp, Salmonella enterica
atgcttctaagcgtctccccttatagcgcgtcaggcaaagacatcgaatttaataccgatttcctcgatgtaaaaaatcgcgataacgttaacattgcacagttttctcgtaagggttttattctgccaggcgtctaccttttacaaattaaaattaacggacagactctgccgcaggaatttcctgttaactgggttattccagaacatgatccacaaggaagtgaggtttgcgcagaaccagaattagttacgcaattgggtataaagccggaactcgcggaaaaactcgtctggataacgcacggcgaacgacaatgtctggcgccagattcactgaaaggcatggattttcaggccgacctggggcactccacgctgttggtgaatttaccccaggcgtatatggaatacagcgatgtcgactgggacccacccgcccgctgggataatggtattcccggcatcattctggattacaacattaataatcagctccgccacgatcaagaaagcggcagcgaagagcaaagcatcagcggcaacgggacattaggcgcgaacctgggcgcatggcgactgcgggccgactggcaggccagctacgaccatcgtgacgatgacgagaacacttccaccctccacgatcagagctggagccgctactacgcctatcgcgcactaccgacgctcggggccaaacttacgctgggcgaaagctatctccagtccgatgttttcgacagctttaactatatcggtgccagcgtcatttctgacgatcagatgctgccgccgaaactgcgcggctatgcgccggagatcgtgggcattgcgcgctctaacgcaaaagtcaaagtctcctggcaggggcgcgtactgtatgaaacgcaggtgcccgcaggaccgttccgtattcaggatctcaaccagtccgtttccggtacgttgcacgtcaccgtggaagagcagaacggtcagacccaggagtttgacgttaacaccgcatcggttcccttcctgacgcgccccggcatggtgcgctacaagatggcgctgggccgcccgcaggactgggatcatcatcccattaccggcacattcgcctcggcggaagcttcgtggggggtcaccaacggctggtcgctatatggcggcgcaattggagaaagcaactatcaggccgtggcgctgggaagcggtaaggatcttggcgtggtgggcgcggtggcggtcgacattacgcactccatcgcccacatgccgcaagacgacgggtttgacggcgaaacgctgcagggtaactcatatcgcatcagctactcccgtgactttgatgaaatcgacagccgactaacctttgccggataccgcttctcagaaaagaactttatgagcatgagcgactatctggatgcgaaaacctatcatcatctcaatgccggtcacgaaaaagaacgctatacggtcacctataaccagaacttccgtgaacaaggcatgagcgcctatttcagctactcacgcagtaccttctgggacagcccggatcagagtaactataacctgtctctttcctggtacttcgacttagggtcgataaaaaatctcagtgcgtcgctgaacggctatcgcagcgaatataacggtgataaagatgatggcgtctatatctcgctgtctgttccctggggcaatgattccatcagctacaacggtacgtttaacggtagtcaacaccgtaatcaactcggctattccggccacagccagaacggcgataactggcagcttcatgtcgggcaggatgaacaaggcgcgcaggcagacggttattacagccatcagggcgcgctgacggacatcgatctgagcgcggattatgaagaaggatcgtaccgttcgctgggcatgtcgttgcgcggcggcatgacgctgaccacccagggcggcgcgctgcaccggggaagtttagcgggcagcacacgtttgctggttgataccgacggtattgcggacgtccccgttagcggtaacggctcgccaacctcaaccaacgttttcggcaaggccgtgattgcggatgtcggaagctattcgcgcagcctggcgcgtatcgatctgaacaaattgccggagaaggcggaagcaactaagtcggttgtgcagatcacgctcaccgaaggcgccatcggctaccgtcactttgacgtggtcagcggcgagaaaatgatggcggttttccggctggcagacggcgacttcccaccgttcggcgccgaagtgaaaaacgagcgccagcagcagttgggcctggtggccgatgacggcaacgcctggctggcgggcgtaaaagccggggaaacattgaaagtcttctgggatggtgcggcgcagtgtgaagcatcactcccgcccacgtttacaccggagctattggccaacgcgctattgctgccgtgcaaaatgctggaaggtcagccccccaccgcaccgcagaaaagttctccgctgcctgcgcaaccgctaatccaggaacatacgcaaaccgatggtcaaccggccgcgccggtggcgacaaccactcaaaccccgcccataccgctggctgacaaccatgcggtgaatcgcaaggatatggaataa

SEQ ID NO: 375452 - DNA, 1086 bp, Salmonella enterica
atgcagcgaattttattacagctaatactggtaataatatctggtttttggtgtattgcgctacaatgcgctgaagtaagaacggatatagaatataattctcaaattatttcacagtttgatagtcttggtgcactgactggcgatcctacactcgataccatccatactccattaccaacaaacattcatatcctttcatcgtgcactaagtcaggtggaggcgatgggggtggttgtattcctcaaggtacaattccctatggacttgaatccacccttgagtttgatccatcaacttctttcatcaatacaaccgctgtcgataacggtatcacttatagttttactggtgaagcggtaaaagcgacggcacatgccgactgtacgggtaatcaggcaactaacagcgtaatttgtgtatgggataaatcattttcacttcccctcaccttacttaccaaacagaatggaataacaattaaccagcaaaatcttacagtttcggtaatacccggaggaggaaatagtgacactaatcaatattcatccctttccggccatattattattgatgaatcggtaagcagttacgctagttatgaaccggaaacatcgggcattgagaatctgaaattcaaatggactgtaacagtgacagaagataccgagggtgatttcggtatatggaacggatcacttgtacttaatggctctccagcgtccaccctacatcgttattttcctccagaaatattagatgcttcattttctgaaaatacgatagtgcacagtacagaagtcgccatgactggcgcaaaaaataatgtcgagctagcctctgtatatctctaccatggcaatacgccatgcgacgatacatccttgtgtaactacagtcttaataagacgtcagttgctcttgtatgtcacgatctgaatgcgcagcttgcctttagcagcacttgtaatgcttcagacacaacacattgcctgaacggcaaagtaggtacgataaatggtacctgggggaaagtcagcattgatacaacttgtgcaatcaccgttttgataccctacgaataa

SEQ ID NO: 375453 - DNA, 138 bp, Salmonella enterica
atgaccataagcaaaagaatcataatttcatttattctatttatgtgcttcaccaacaatacatttggatctggatacgttaagatcaatgccgaattgaatgatatggcaggcagaggggtaggcacagtgatttaa

SEQ ID NO: 375454 - DNA, 1044 bp, Salmonella enterica
atgaaatcactgatactgtcaggtgtattttttttctttgctgtctgtgattctgcgcaggcagctatcgaatggtcatattgtaacgctgatggaagtattaacatccagaatattaatctcaaatcaggggctttttcccctgagcaggaactgcagagtgttagtatcccaataagctacacttgctatacatcaccaaaagtgagtggtcctgattattatacaacccttaatctttacgctatggggggagtcgtaactgctctaaaaaatagtggtctcggcatggatatcactgttcaggaagggacgtcgccttccgtaaaatttacatggaaagagatacaggcaggattttctggctggagcagctcaaaagtattcgggcaatatatggaccaggcgaaaacatataaccgtagcggaatgcttaccttacgtatctttgtcgaatcctcttttaaaaatacttttgtgaaaataaatataccgtcaagtactatgaacatactaccctacaacccagttgggataacggcaccgactgttccattcacacctttagccgtttccgcctttaatatcaggattattcccgacaactcaggcagggttattatctctccttctgtaatcaaaatggggcgtttttatacggaatataaggaaaccatggcgtccagggaaattccttttaccgttacagcacaacagaatgtcggaacgcagaccccgttcgttgccccactggctatagagttcaggaccaacgatctgacactggcagatgctgacagcaccgtaattcttaagaataataaacaagaaaacaatggattcagactgtcggtaattgatgtggataataacacaccagttaaatttaatatgaaaacagatatgggatctatccatcttgataacggtgctggtggcaaaattataaaacagtataaagcaaaggtcgaagctatacccggtgcggtaattaaaacaggtgctttttcagccgcaatgacagtgattgttacttacaattag

SEQ ID NO: 375455 - DNA, 1263 bp, Salmonella enterica
atggccctgaatgacagtaaaatccgcgcagctaagcccctcgctaaatcttacaaactcaccgacgcgcaaggtctgtacctgactgtatcccgtagtggcgctaagttatggtattttcgctattgcttcggcggcaaagaaaaccgcctggcctttggcgcttatccgctggtcacgctggcggaagcccgcgaaaagcgcgatgccgcgcgtaagctgctggcgtccggtatctgcccttcgcagagccgcaagatggataacgccgccgttgacgaatcccgcacgtttaaatttattgccactgagtggcacaccagttgccttaaactctggtcggaaggccacgccgataaaatcctcacctgcctgaagcgctatgtctttcccgatatcggtacaatggacattacgaaggttgaaacccgccatctggcgcaacttgtaaaatccatcgatgataagggcgtgcatgacgttgccgggcgggtgcgccaacatctgaccaaaatcatgcgccacgccgtacagcagggaacgattaaatataatccggcttacgatctggatggcgtcgtgaccccggttgtgacccaacatcaccccgccctgcccctgaaacgcctgccggagctgctggacaagatcaatggctataaggggcgggaactgacccgtctggcgctggagctgaatctgcacgttttcctgcgttccagcgagctacgcctcgcccgctgggatgagttcaacctgaaagcccatatctggacggtgcctgcacagcgggaagcggttaagggcgtgagattttcatcgcgtggcgcaaagatgaaggacgagcatctggtgccgttatccgcgcaggctgtcgccctgctggagcaaataaaggaaattaccggagaatcggttttcgtctttgcgggggcgcactccatgaacaagccaatgagcgaaaacaccatcaacaaggcgctgcgtgttatcggttatgacaccaaaaccgaggtgtgcggccatggcttccgcacgatggcctgtagcgccctgaacgagtccgcactgtggtctaaggacgccatcgagcgccagatgagccacaaggagcgcaacggtgtgcgggcggcatatgtgcataaggcggagcatctggaagcgcgtatggagatgatgcagtggtggtcggattatctcgacatgagccgcgaggggtacgttgcgccgtatatttatgcgcggcggcataaggcggcctga

SEQ ID NO: 375456 - DNA, 867 bp, Salmonella enterica
atgaagcggtttgcgcagcaggcgggcggcagccataaaaccgttcatgaccgcattaagctggcgcagcggttttgtgagcgtctggtgctggcgcagaatgtgcagatccgccggttggagcagcttaaggcgcgacatatagagggttatatccgtgaacggctggcgcagggcattacaaagcgttccctgcaaaatgagatggcagcggtacgttgcattctgaaagaggccgggcgtgacaggctggcgcagagtgagcggctgaacaaccgttctcttggtctgtctggcgcatcccgcaacggtacaaagcaggcgatcacgccggagcattatcgtgacgtgctggagacggcccgcgtaaaagatccggggatggcggcagcgctggaactctcaaggctgatgggattacgttcgcaggaggcggtgcagagcgtacagtcgctgaaaacgtggcgacaggcgctggatcgtggtgacacccgcttaaccgtggtgtttggcaccaaaggggggcgaccccgtgagacgactattcttgatgctgtcgctgtcagaaaagcgctggataatgcgctgaccgtggcagaagatcgccacagcaggctgatagataagccggatctgaaaagcgcgatgaaatactggcacagccaggcgtcacgtctcggcttaacgggcgcatactctccgcactcccttcgttacgcctgggcgcaggatgcgatcagtcattatctggcgcaggggttttgtgagaaggaagcgctggcaatgacggcgatggatttgggccacggcgacgggcgcgggcggtatgtggcgcaggtttacgggagaaagcatggtgctgactga

SEQ ID NO: 375457 - DNA, 222 bp, Salmonella enterica
atgacgcaaccggactggcatcccgccgacattatcgctgggctgagaaaacggggcacctcgctggcggcgctgtcccgtcaggccgggctggcgtcctccacgctggcaaacgcccttaaccgccgctggcccaaaggtgagaggctgatcgccgaagcgttgggcattgcgccagagcaaatctggccttcccgctaccataagcctgaaaattactaa

SEQ ID NO: 375458 - DNA, 462 bp, Salmonella enterica
atggctacgaccctcacccagacacacccgctactctccatttccttcaatgccgccatggatttcaccgtactggcagaacactgcaaacagttcgccgaaaccctgattgaaagcgacgatccggcgctacgtctggcgctttgcggacggcttgtcgcctgcctttcgctgccgcgccccacgctgaccgatcccatcccgccgcacctggttgaaagcctgaccaccgatacccttcccgccagttcaacccattttgaccccggttccgaattactttgtgactactcactcacgttggcgcaacttctgacggggcgggcgttgctgccgaaaatggaacagacgctgaccggattactgtgtgagttggtctggtgctttgccgctgaactcaaggccccgcgctgggtacgtaccactgacggcgtgaagtttatcgatgaggtgacagcatga

SEQ ID NO: 375459 - DNA, 1149 bp, Salmonella enterica
atgaatgaaatgacgctatcgcgtactcgtccggtgcttccttctctgttggggagcttcgtcgtttgcccggcgaaatacctgctggaaagcgaagctcattcttacgcacgcttaccgctgcatccgggagtgattctgggccaggtaatacatcaacgcgtcaattcagtgatatacagggaggccgctttcgggaattataccctcaggcaactggaaaatgattttacgatcgcgctgacagccaatcgacgtgctgggccggtagcaaactggatatatgaccgtcacggcgttgccgggctggtatcgcggcaaatgcttgttacccagatccgctacgtcagatcgcttctgccgcctgttttcgtaaaaggggggcctgcacacgaaaaaacattacccgttggccgggaggttatgctgaccagcagtgattttgatatgcatgggcgggccgacctcatatatcaggagcgacccgatcggttaaacgtagttgatttgaaaaccggaaaggtaacagatgagcaaaaccaaccgaaagaagctaacctgttacagattgcggcctatggcataatggtaaaagagcgagcacctgatatgaacattgggttagttctgacggggtgccgtgatagctgggaagggacactgaatacagacctgattgaacgggtcactacagttatcaaaaatattaatcggcttttgccacggaatatcccacttccgctatacgagctggtttgtcctggcacgtactgctcccattgttcctgtcgttgctcatgcccggcctgggcagaaaagctacgcaaacagatgcaaccgtctctttctgatcatcagcatggcggaatcgatatcagcgggaaattacttgaagtggaaagtgacgatcatcttcttacgctgaagatccttctccccgatagttcagttgttaaggtctttcgtgtgccttccagcatcatcccagaaccaacggaaataacaggaaaaaaaatcgtactgtacggattaaacaccttcagcgagacatcaacagagtattttccccgcaacttctacgtcatcaatatgcaggatacgagaagatcggcgtttcagtttcactggcaaagtgaaagagagaattaa
